United States Patent Application Publication US 2024/0327476 A1 - sequence listing, part 53

SEQ ID NO: 100238 - DNA, 2922 bp, synthetic construct
  misc_feature 1..2922: note = Description of Artificial Sequence: Synthetic coding sequence
  source 1..2922: mol_type = other DNA
atgtacaacatgagaagactgagcctgagccccaccttcagcatgggcttccacctgctggtgaccgtgagcctgctgttcagccacgtggaccacgtgatcgccgagaccgagatggagggcgagggcaacgagaccggcgagtgcaccggcagctactactgcaagaagggcgtgatcctgcccatctgggagccccaggaccccagcttcggcgacaagatcgccagagccaccgtgtacttcgtggccatggtgtacatgttcctgggcgtgagcatcatcgccgacagattcatgagcagcatcgaggtgatcaccagccaggagaaggagatcaccatcaagaagcccaacggcgagaccaccaagaccaccgtgagaatctggaacgagaccgtgagcaacctgaccctgatggccctgggcagcagcgcccccgagatcctgctgagcgtgatcgaggtgtgcggccacaacttcaccgccggcgacctgggccccagcaccatcgtgggcagcgccgccttcaacatgttcatcatcatcgccctgtgcgtgtacgtggtgcccgacggcgagaccagaaagatcaagcacctgagagtgttcttcgtgaccgccgcctggagcatcttcgcctacacctggctgtacatcatcctgagcgtgatcagccccggcgtggtggaggtgtgggagggcctgctgaccttcttcttcttccccatctgcgtggtgttcgcctgggtggccgacagaagactgctgttctacaagtacgtgtacaagagatacagagccggcaagcagagaggcatgatcatcgagcacgagggcgacagacccagcagcaagaccgagatcgagatggacggcaaggtggtgaacagccacgtggagaacttcctggacggcgccctggtgctggaggtggacgagagagaccaggacgacgaggaggccagaagagagatggccagaatcctgaaggagctgaagcagaagcaccccgacaaggagatcgagcagctgatcgagctggccaactaccaggtgctgagccagcagcagaagagcagagccttctacagaatccaggccaccagactgatgaccggcgccggcaacatcctgaagagacacgccgccgaccaggccagaaaggccgtgagcatgcacgaggtgaacaccgaggtgaccgagaacgaccccgtgagcaagatcttcttcgagcagggcacctaccagtgcctggagaactgcggcaccgtggccctgaccatcatcagaagaggcggcgacctgaccaacaccgtgttcgtggacttcagaaccgaggacggcaccgccaacgccggcagcgactacgagttcaccgagggcaccgtggtgttcaagcccggcgacacccagaaggagatcagagtgggcatcatcgacgacgacatcttcgaggaggacgagaacttcctggtgcacctgagcaacgtgaaggtgagcagcgaggccagcgaggacggcatcctggaggccaaccacgtgagcaccctggcctgcctgggcagccccagcaccgccaccgtgaccatcttcgacgacgaccacgccggcatcttcaccttcgaggagcccgtgacccacgtgagcgagagcatcggcatcatggaggtgaaggtgctgagaaccagcggcgccagaggcaacgtgatcgtgccctacaagaccatcgagggcaccgccagaggcggcggcgaggacttcgaggacacctgcggcgagctggagttccagaacgacgagatcgtgaagaccatcagcgtgaaggtgatcgacgacgaggagtacgagaagaacaagaccttcttcctggagatcggcgagcccagactggtggagatgagcgagaagaaggccctgctgctgaacgagctgggcggcttcaccatcaccggcaagtacctgttcggccagcccgtgttcagaaaggtgcacgccagagagcaccccatcctgagcaccgtgatcaccatcgccgacgagtacgacgacaagcagcccctgaccagcaaggaggaggaggagagaagaatcgccgagatgggcagacccatcctgggcgagcacaccaagctggaggtgatcatcgaggagagctacgagttcaagagcaccgtggacaagctgatcaagaagaccaacctggccctggtggtgggcaccaacagctggagagagcagttcatcgaggccatcaccgtgagcgccggcgaggacgacgacgacgacgagtgcggcgaggagaagctgcccagctgcttcgactacgtgatgcacttcctgaccgtgttctggaaggtgctgttcgccttcgtgccccccaccgagtactggaacggctgggcctgcttcatcgtgagcatcctgatgatcggcctgctgaccgccttcatcggcgacctggccagccacttcggctgcaccatcggcctgaaggacagcgtgaccgccgtggtgttcgtggccctgggcaccagcgtgcccgacaccttcgccagcaaggtggccgccacccaggaccagtacgccgacgccagcatcggcaacgtgaccggcagcaacgccgtgaacgtgttcctgggcatcggcgtggcctggagcatcgccgccatctaccacgccgccaacggcgagcagttcaaggtgagccccggcaccctggccttcagcgtgaccctgttcaccatcttcgccttcatcaacgtgggcgtgctgctgtacagaagaagacccgagatcggcggcgagctgggcggccccagaaccgccaagctgctgaccagctgcctgttcgtgctgctgtggctgctgtacatcttcttcagcagcctggaggcctactgccacatcaagggcttctag

SEQ ID NO: 100239 - DNA, 2922 bp, synthetic construct; identical to SEQ ID NO: 100238
  misc_feature 1..2922: note = Description of Artificial Sequence: Synthetic coding sequence
  source 1..2922: mol_type = other DNA

SEQ ID NO: 100240 - DNA, 2814 bp, synthetic construct
  misc_feature 1..2814: note = Description of Artificial Sequence: Synthetic coding sequence
  source 1..2814: mol_type = other DNA
atgtacaacatgagaagactgagcctgagccccaccttcagcatgggcttccacctgctggtgaccgtgagcctgctgttcagccacgtggaccacgtgatcgccgagaccgagatggagggcgagggcaacgagaccggcgagtgcaccggcagctactactgcaagaagggcgtgatcctgcccatctgggagccccaggaccccagcttcggcgacaagatcgccagagccaccgtgtacttcgtggccatggtgtacatgttcctgggcgtgagcatcatcgccgacagattcatgagcagcatcgaggtgatcaccagccaggagaaggagatcaccatcaagaagcccaacggcgagaccaccaagaccaccgtgagaatctggaacgagaccgtgagcaacctgaccctgatggccctgggcagcagcgcccccgagatcctgctgagcgtgatcgaggtgtgcggccacaacttcaccgccggcgacctgggccccagcaccatcgtgggcagcgccgccttcaacatgttcatcatcatcgccctgtgcgtgtacgtggtgcccgacggcgagaccagaaagatcaagcacctgagagtgttcttcgtgaccgccgcctggagcatcttcgcctacacctggctgtacatcatcctgagcgtgatcagccccggcgtggtggaggtgtgggagggcctgctgaccttcttcttcttccccatctgcgtggtgttcgcctgggtggccgacagaagactgctgttctacaagtacgtgtacaagagatacagagccggcaagcagagaggcatgatcatcgagcacgagggcgacagacccagcagcaagaccgagatcgagatggacggcaaggtggtgaacagccacgtggagaacttcctggacggcgccctggtgctggaggtggacgagagagaccaggacgacgaggaggccagaagagagatggccagaatcctgaaggagctgaagcagaagcaccccgacaaggagatcgagcagctgatcgagctggccaactaccaggtgctgagccagcagcagaagagcagagccttctacagaatccaggccaccagactgatgaccggcgccggcaacatcctgaagagacacgccgccgaccaggccagaaaggccgtgagcatgcacgaggtgaacaccgaggtgaccgagaacgaccccgtgagcaagatcttcttcgagcagggcacctaccagtgcctggagaactgcggcaccgtggccctgaccatcatcagaagaggcggcgacctgaccaacaccgtgttcgtggacttcagaaccgaggacggcaccgccaacgccggcagcgactacgagttcaccgagggcaccgtggtgttcaagcccggcgacacccagaaggagatcagagtgggcatcatcgacgacgacatcttcgaggaggacgagaacttcctggtgcacctgagcaacgtgaaggtgagcagcgaggccagcgaggacggcatcctggaggccaaccacgtgagcaccctggcctgcctgggcagccccagcaccgccaccgtgaccatcttcgacgacgaccacgccggcatcttcaccttcgaggagcccgtgacccacgtgagcgagagcatcggcatcatggaggtgaaggtgctgagaaccagcggcgccagaggcaacgtgatcgtgccctacaagaccatcgagggcaccgccagaggcggcggcgaggacttcgaggacacctgcggcgagctggagttccagaacgacgagatcgtgaagatcatcaccatcagaatcttcgacagagaggagtacgagaaggagtgcagcttcagcctggtgctggaggagcccaagtggatcagaagaggcatgaagggcggcttcaccatcaccgacgagtacgacgacaagcagcccctgaccagcaaggaggaggaggagagaagaatcgccgagatgggcagacccatcctgggcgagcacaccaagctggaggtgatcatcgaggagagctacgagttcaagagcaccgtggacaagctgatcaagaagaccaacctggccctggtggtgggcaccaacagctggagagagcagttcatcgaggccatcaccgtgagcgccggcgaggacgacgacgacgacgagtgcggcgaggagaagctgcccagctgcttcgactacgtgatgcacttcctgaccgtgttctggaaggtgctgttcgccttcgtgccccccaccgagtactggaacggctgggcctgcttcatcgtgagcatcctgatgatcggcctgctgaccgccttcatcggcgacctggccagccacttcggctgcaccatcggcctgaaggacagcgtgaccgccgtggtgttcgtggccctgggcaccagcgtgcccgacaccttcgccagcaaggtggccgccacccaggaccagtacgccgacgccagcatcggcaacgtgaccggcagcaacgccgtgaacgtgttcctgggcatcggcgtggcctggagcatcgccgccatctaccacgccgccaacggcgagcagttcaaggtgagccccggcaccctggccttcagcgtgaccctgttcaccatcttcgccttcatcaacgtgggcgtgctgctgtacagaagaagacccgagatcggcggcgagctgggcggccccagaaccgccaagctgctgaccagctgcctgttcgtgctgctgtggctgctgtacatcttcttcagcagcctggaggcctactgccacatcaagggcttctag

SEQ ID NO: 100241 - DNA, 2922 bp, synthetic construct; identical to SEQ ID NO: 100238
  misc_feature 1..2922: note = Description of Artificial Sequence: Synthetic coding sequence
  source 1..2922: mol_type = other DNA

SEQ ID NO: 100242 - DNA, 2814 bp, synthetic construct; identical to SEQ ID NO: 100240
  misc_feature 1..2814: note = Description of Artificial Sequence: Synthetic coding sequence
  source 1..2814: mol_type = other DNA

SEQ ID NO: 100243 - DNA, 2907 bp, synthetic construct
  misc_feature 1..2907: note = Description of Artificial Sequence: Synthetic coding sequence
  source 1..2907: mol_type = other DNA
atgtacaacatgagaagactgagcctgagccccaccttcagcatgggcttccacctgctggtgaccgtgagcctgctgttcagccacgtggaccacgtgatcgccgagaccgagatggagggcgagggcaacgagaccggcgagtgcaccggcagctactactgcaagaagggcgtgatcctgcccatctgggagccccaggaccccagcttcggcgacaagatcgccagagccaccgtgtacttcgtggccatggtgtacatgttcctgggcgtgagcatcatcgccgacagattcatgagcagcatcgaggtgatcaccagccaggagaaggagatcaccatcaagaagcccaacggcgagaccaccaagaccaccgtgagaatctggaacgagaccgtgagcaacctgaccctgatggccctgggcagcagcgcccccgagatcctgctgagcgtgatcgaggtgtgcggccacaacttcaccgccggcgacctgggccccagcaccatcgtgggcagcgccgccttcaacatgttcatcatcatcgccctgtgcgtgtacgtggtgcccgacggcgagaccagaaagatcaagcacctgagagtgttcttcgtgaccgccgcctggagcatcttcgcctacacctggctgtacatcatcctgagcgtgatcagccccggcgtggtggaggtgtgggagggcctgctgaccttcttcttcttccccatctgcgtggtgttcgcctgggtggccgacagaagactgctgttctacaagtacgtgtacaagagatacagagccggcaagcagagaggcatgatcatcgagcacgagggcgacagacccagcagcaagaccgagatcgagatggacggcaaggtggtgaacagccacgtggagaacttcctggacggcgccctggtgctggaggtggacgagagagaccaggacgacgaggaggccagaagagagatggccagaatcctgaaggagctgaagcagaagcaccccgacaaggagatcgagcagctgatcgagctggccaactaccaggtgctgagccagcagcagaagagcagagccttctacagaatccaggccaccagactgatgaccggcgccggcaacatcctgaagagacacgccgccgaccaggccagaaaggccgtgagcatgcacgaggtgaacaccgaggtgaccgagaacgaccccgtgagcaagatcttcttcgagcagggcacctaccagtgcctggagaactgcggcaccgtggccctgaccatcatcagaagaggcggcgacctgaccaacaccgtgttcgtggacttcagaaccgaggacggcaccgccaacgccggcagcgactacgagttcaccgagggcaccgtggtgttcaagcccggcgacacccagaaggagatcagagtgggcatcatcgacgacgacatcttcgaggaggacgagaacttcctggtgcacctgagcaacgtgaaggtgagcagcgaggccagcgaggacggcatcctggaggccaaccacgtgagcaccctggcctgcctgggcagccccagcaccgccaccgtgaccatcttcgacgacgaccacgccggcatcttcaccttcgaggagcccgtgacccacgtgagcgagagcatcggcatcatggaggtgaaggtgctgagaaccagcggcgccagaggcaacgtgatcgtgccctacaagaccatcgagggcaccgccagaggcggcggcgaggacttcgaggacacctgcggcgagctggagttccagaacgacgagatcgtgaagaccatcagcgtgaaggtgatcgacgacgaggagtacgagaagaacaagaccttcttcctggagatcggcgagcccagactggtggagatgagcgagaagaaggccctgctgctgaacgagctgggcggcttcaccatcaccggccagcccgtgttcagaaaggtgcacgccagagagcaccccatcctgagcaccgtgatcaccatcgccgacgagtacgacgacaagcagcccctgaccagcaaggaggaggaggagagaagaatcgccgagatgggcagacccatcctgggcgagcacaccaagctggaggtgatcatcgaggagagctacgagttcaagagcaccgtggacaagctgatcaagaagaccaacctggccctggtggtgggcaccaacagctggagagagcagttcatcgaggccatcaccgtgagcgccggcgaggacgacgacgacgacgagtgcggcgaggagaagctgcccagctgcttcgactacgtgatgcacttcctgaccgtgttctggaaggtgctgttcgccttcgtgccccccaccgagtactggaacggctgggcctgcttcatcgtgagcatcctgatgatcggcctgctgaccgccttcatcggcgacctggccagccacttcggctgcaccatcggcctgaaggacagcgtgaccgccgtggtgttcgtggccctgggcaccagcgtgcccgacaccttcgccagcaaggtggccgccacccaggaccagtacgccgacgccagcatcggcaacgtgaccggcagcaacgccgtgaacgtgttcctgggcatcggcgtggcctggagcatcgccgccatctaccacgccgccaacggcgagcagttcaaggtgagccccggcaccctggccttcagcgtgaccctgttcaccatcttcgccttcatcaacgtgggcgtgctgctgtacagaagaagacccgagatcggcggcgagctgggcggccccagaaccgccaagctgctgaccagctgcctgttcgtgctgctgtggctgctgtacatcttcttcagcagcctggaggcctactgccacatcaagggcttctag

SEQ ID NO: 100244 - DNA, 2814 bp, synthetic construct; identical to SEQ ID NO: 100240
  misc_feature 1..2814: note = Description of Artificial Sequence: Synthetic coding sequence
  source 1..2814: mol_type = other DNA

SEQ ID NO: 100245 - DNA, 2814 bp, synthetic construct; identical to SEQ ID NO: 100240
  misc_feature 1..2814: note = Description of Artificial Sequence: Synthetic coding sequence
  source 1..2814: mol_type = other DNA

SEQ ID NO: 100246 - DNA, 1995 bp, synthetic construct
  misc_feature 1..1995: note = Description of Artificial Sequence: Synthetic coding sequence
  source 1..1995: mol_type = other DNA
atgagaagactgagcctgagccccaccttcagcatgggcttccacctgctggtgaccgtgagcctgctgttcagccacgtggaccacgtgatcgccgagaccgagatggagggcgagggcaacgagaccggcgagtgcaccggcagctactactgcaagaagggcgtgatcctgcccatctgggagccccaggaccccagcttcggcgacaagatcgccagagccaccgtgtacttcgtggccatggtgtacatgttcctgggcgtgagcatcatcgccgacagattcatgagcagcatcgaggtgatcaccagccaggagaaggagatcaccatcaagaagcccaacggcgagaccaccaagaccaccgtgagaatctggaacgagaccgtgagcaacctgaccctgatggccctgggcagcagcgcccccgagatcctgctgagcgtgatcgaggtgtgcggccacaacttcaccgccggcgacctgggccccagcaccatcgtgggcagcgccgccttcaacatgttcatcatcatcgccctgtgcgtgtacgtggtgcccgacggcgagaccagaaagatcaagcacctgagagtgttcttcgtgaccgccgcctggagcatcttcgcctacacctggctgtacatcatcctgagcgtgatcagccccggcgtggtggaggtgtgggagggcctgctgaccttcttcttcttccccatctgcgtggtgttcgcctgggtggccgacagaagactgctgttctacaagtacgtgtacaagagatacagagccggcaagcagagaggcatgatcatcgagcacgagggcgacagacccagcagcaagaccgagatcgagatggacggcaaggtggtgaacagccacgtggagaacttcctggacggcgccctggtgctggaggtggacgagagagaccaggacgacgaggaggccagaagagagatggccagaatcctgaaggagctgaagcagaagcaccccgacaaggagatcgagcagctgatcgagctggccaactaccaggtgctgagccagcagcagaagagcagagccttctacagaatccaggccaccagactgatgaccggcgccggcaacatcctgaagagacacgccgccgaccaggccagaaaggccgtgagcatgcacgaggtgaacaccgaggtgaccgagaacgaccccgtgagcaagatcttcttcgagcagggcacctaccagtgcctggagaactgcggcaccgtggccctgaccatcatcagaagaggcggcgacctgaccaacaccgtgttcgtggacttcagaaccgaggacggcaccgccaacgccggcagcgactacgagttcaccgagggcaccgtggtgttcaagcccggcgacacccagaaggagatcagagtgggcatcatcgacgacgacatcttcgaggaggacgagaacttcctggtgcacctgagcaacgtgaaggtgagcagcgaggccagcgaggacggcatcctggaggccaaccacgtgagcaccctggcctgcctgggcagccccagcaccgccaccgtgaccatcttcgacgacgaccacgccggcatcttcaccttcgaggagcccgtgacccacgtgagcgagagcatcggcatcatggaggtgaaggtgctgagaaccagcggcgccagaggcaacgtgatcgtgccctacaagaccatcgagggcaccgccagaggcggcggcgaggacttcgaggacacctgcggcgagctggagttccagaacgacgagatcgtgaagaccatcagcgtgaaggtgatcgacgacgaggagtacgagaagaacaagaccttcttcctggagatcggcgagcccagactggtggagatgagcgagaagaagggcagaagcctgcccctggagtacctgaccgtgagaaacatgagaaagagcgccgtgagccccctgtgcctgagaaaccagaacggctag

SEQ ID NO: 100247 - DNA, 2898 bp, synthetic construct
  misc_feature 1..2898: note = Description of Artificial Sequence: Synthetic coding sequence
  source 1..2898: mol_type = other DNA
atgtacaacatgagaagactgagcctgagccccaccttcagcatgggcttccacctgctggtgaccgtgagcctgctgttcagccacgtggaccacgtgatcgccgagaccgagatggagggcgagggcaacgagaccggcgagtgcaccggcagctactactgcaagaagggcgtgatcctgcccatctgggagccccaggaccccagcttcggcgacaagatcgccagagccaccgtgtacttcgtggccatggtgtacatgttcctgggcgtgagcatcatcgccgacagattcatgagcagcatcgaggtgatcaccagccaggagaaggagatcaccatcaagaagcccaacggcgagaccaccaagaccaccgtgagaatctggaacgagaccgtgagcaacctgaccctgatggccctgggcagcagcgcccccgagatcctgctgagcgtgatcgaggtgtgcggccacaacttcaccgccggcgacctgggccccagcaccatcgtgggcagcgccgccttcaacatgttcatcatcatcgccctgtgcgtgtacgtggtgcccgacggcgagaccagaaagatcaagcacctgagagtgttcttcgtgaccgccgcctggagcatcttcgcctacacctggctgtacatcatcctgagcgtgatcagccccggcgtggtggaggtgtgggagggcctgctgaccttcttcttcttccccatctgcgtggtgttcgcctgggtggccgacagaagactgctgttctacaagtacgtgtacaagagatacagagccggcaagcagagaggcatgatcatcgagcacgagggcgacagacccagcagcaagaccgagatcgagatggacggcaaggtggtgaacagccacgtggagaacttcctggacggcgccctggtgctggaggtggacgagagagaccaggacgacgaggaggccagaagagagatggccagaatcctgaaggagctgaagcagaagcaccccgacaaggagatcgagcagctgatcgagctggccaactaccaggtgctgagccagcagcagaagagcagagccttctacagaatccaggccaccagactgatgaccggcgccggcaacatcctgaagagacacgccgccgaccaggccagaaaggccgtgagcatgcacgaggtgaacaccgaggtgaccgagaacgaccccgtgagcaagatcttcttcgagcagggcacctaccagtgcctggagaactgcggcaccgtggccctgaccatcatcagaagaggcggcgacctgaccaacaccgtgttcgtggacttcagaaccgaggacggcaccgccaacgccggcagcgactacgagttcaccgagggcaccgtggtgttcaagcccggcgacacccagaaggagatcagagtgggcatcatcgacgacgacatcttcgaggaggacgagaacttcctggtgcacctgagcaacgtgaaggtgagcagcgaggccagcgaggacggcatcctggaggccaaccacgtgagcaccctggcctgcctgggcagccccagcaccgccaccgtgaccatcttcgacgacgaccacgccggcatcttcaccttcgaggagcccgtgacccacgtgagcgagagcatcggcatcatggaggtgaaggtgctgagaaccagcggcgccagaggcaacgtgatcgtgccctacaagaccatcgagggcaccgccagaggcggcggcgaggacttcgaggacacctgcggcgagctggagttccagaacgacgagatcgtgaagatcatcaccatcagaatcttcgacagagaggagtacgagaaggagtgcagcttcagcctggtgctggaggagcccaagtggatcagaagaggcatgaagggcggcttcaccatcaccggcaagtacctgttcggccagcccgtgttcagaaaggtgcacgccagagagcaccccatcctgagcaccgtgatcaccatcgccgacgagtacgacgacaagcagcccctgaccagcaaggaggaggaggagagaagaatcgccgagatgggcagacccatcctgggcgagcacaccaagctggaggtgatcatcgaggagagctacgagttcaagagcaccgtggacaagctgatcaagaagaccaacctggccctggtggtgggcaccaacagctggagagagcagttcatcgaggccatcaccgtgagcgccggcgaggacgacgacgacgacgagtgcggcgaggagaagctgcccagctgcttcgactacgtgatgcacttcctgaccgtgttctggaaggtgctgttcgccttcgtgccccccaccgagtactggaacggctgggcctgcttcatcgtgagcatcctgatgatcggcctgctgaccgccttcatcggcgacctggccagccacttcggctgcaccatcggcctgaaggacagcgtgaccgccgtggtgttcgtggccctgggcaccagcgtgcccgacaccttcgccagcaaggtggccgccacccaggaccagtacgccgacgccagcatcggcaacgtgaccggcagcaacgccgtgaacgtgttcctgggcatcggcgtggcctggagcatcgccgccatctaccacgccgccaacggcgagcagttcaaggtgagccccggcaccctggccttcagcgtgaccctgttcaccatcttcgccttcatcaacgtgggcgtgctgctgtacagaagaagacccgagatcggcggcgagctgggcggccccagaaccgccaagctgctgaccagctgcctgttcgtgctgctgtggctgctgtacatcttcttcagcagcctggaggcctactgccacatcaagggcttctag

SEQ ID NO: 100248 - DNA, 222 bp, synthetic construct
  misc_feature 1..222: note = Description of Artificial Sequence: Synthetic coding sequence
  source 1..222: mol_type = other DNA
atgtacaacatgagaagactgagcctgagccccaccttcagcatgggcttccacctgctggtgaccgtgagcctgctgttcagccacgtggaccacgtgatcgccgagaccgagatggagggcgagggcaacgagaccggcgagtgcaccggcagctactactgcaagaagggcgtgatcctgcccatctgggagccccaggaccccagcttcggcgactag

SEQ ID NO: 100249 - DNA, 264 bp, synthetic construct
  misc_feature 1..264: note = Description of Artificial Sequence: Synthetic coding sequence
  source 1..264: mol_type = other DNA
atgtacaacatgagaagactgagcctgagccccaccttcagcatgggcttccacctgctggtgaccgtgagcctgctgttcagccacgtggaccacgtgatcgccgagaccgagatggagggcgagggcaacgagaccggcgagtgcaccggcagctactactgcaagaagggcgtgatcctgcccatctgggagccccaggaccccagcttcggcgacaagatcgccagagccaccgtgtacttcgtggccatggtgtactag

SEQ ID NO: 100250 - DNA, 264 bp, synthetic construct; identical to SEQ ID NO: 100249
  misc_feature 1..264: note = Description of Artificial Sequence: Synthetic coding sequence
  source 1..264: mol_type = other DNA

SEQ ID NO: 100251 - DNA, 2883 bp, synthetic construct
  misc_feature 1..2883: note = Description of Artificial Sequence: Synthetic coding sequence
  source 1..2883: mol_type = other DNA
atgtacaacatgagaagactgagcctgagccccaccttcagcatgggcttccacctgctggtgaccgtgagcctgctgttcagccacgtggaccacgtgatcgccgagaccgagatggagggcgagggcaacgagaccggcgagtgcaccggcagctactactgcaagaagggcgtgatcctgcccatctgggagccccaggaccccagcttcggcgacaagatcgccagagccaccgtgtacttcgtggccatggtgtacatgttcctgggcgtgagcatcatcgccgacagattcatgagcagcatcgaggtgatcaccagccaggagaaggagatcaccatcaagaagcccaacggcgagaccaccaagaccaccgtgagaatctggaacgagaccgtgagcaacctgaccctgatggccctgggcagcagcgcccccgagatcctgctgagcgtgatcgaggtgtgcggccacaacttcaccgccggcgacctgggccccagcaccatcgtgggcagcgccgccttcaacatgttcatcatcatcgccctgtgcgtgtacgtggtgcccgacggcgagaccagaaagatcaagcacctgagagtgttcttcgtgaccgccgcctggagcatcttcgcctacacctggctgtacatcatcctgagcgtgatcagccccggcgtggtggaggtgtgggagggcctgctgaccttcttcttcttccccatctgcgtggtgttcgcctgggtggccgacagaagactgctgttctacaagtacgtgtacaagagatacagagccggcaagcagagaggcatgatcatcgagcacgagggcgacagacccagcagcaagaccgagatcgagatggacggcaaggtggtgaacagccacgtggagaacttcctggacggcgccctggtgctggaggtggacgagagagaccaggacgacgaggaggccagaagagagatggccagaatcctgaaggagctgaagcagaagcaccccgacaaggagatcgagcagctgatcgagctggccaactaccaggtgctgagccagcagcagaagagcagagccttctacagaatccaggccaccagactgatgaccggcgccggcaacatcctgaagagacacgccgccgaccaggccagaaaggccgtgagcatgcacgaggtgaacaccgaggtgaccgagaacgaccccgtgagcaagatcttcttcgagcagggcacctaccagtgcctggagaactgcggcaccgtggccctgaccatcatcagaagaggcggcgacctgaccaacaccgtgttcgtggacttcagaaccgaggacggcaccgccaacgccggcagcgactacgagttcaccgagggcaccgtggtgttcaagcccggcgacacccagaaggagatcagagtgggcatcatcgacgacgacatcttcgaggaggacgagaacttcctggtgcacctgagcaacgtgaaggtgagcagcgaggccagcgaggacggcatcctggaggccaaccacgtgagcaccctggcctgcctgggcagccccagcaccgccaccgtgaccatcttcgacgacgaccacgccggcatcttcaccttcgaggagcccgtgacccacgtgagcgagagcatcggcatcatggaggtgaaggtgctgagaaccagcggcgccagaggcaacgtgatcgtgccctacaagaccatcgagggcaccgccagaggcggcggcgaggacttcgaggacacctgcggcgagctggagttccagaacgacgagatcgtgaagatcatcaccatcagaatcttcgacagagaggagtacgagaaggagtgcagcttcagcctggtgctggaggagcccaagtggatcagaagaggcatgaaggagggcttctggctgagcagccagcccgtgttcagaaaggtgcacgccagagagcaccccatcctgagcaccgtgatcaccatcgccgacgagtacgacgacaagcagcccctgaccagcaaggaggaggaggagagaagaatcgccgagatgggcagacccatcctgggcgagcacaccaagctggaggtgatcatcgaggagagctacgagttcaagagcaccgtggacaagctgatcaagaagaccaacctggccctggtggtgggcaccaacagctggagagagcagttcatcgaggccatcaccgtgagcgccggcgaggacgacgacgacgacgagtgcggcgaggagaagctgcccagctgcttcgactacgtgatgcacttcctgaccgtgttctggaaggtgctgttcgccttcgtgccccccaccgagtactggaacggctgggcctgcttcatcgtgagcatcctgatgatcggcctgctgaccgccttcatcggcgacctggccagccacttcggctgcaccatcggcctgaaggacagcgtgaccgccgtggtgttcgtggccctgggcaccagcgtgcccgacaccttcgccagcaaggtggccgccacccaggaccagtacgccgacgccagcatcggcaacgtgaccggcagcaacgccgtgaacgtgttcctgggcatcggcgtggcctggagcatcgccgccatctaccacgccgccaacggcgagcagttcaaggtgagccccggcaccctggccttcagcgtgaccctgttcaccatcttcgccttcatcaacgtgggcgtgctgctgtacagaagaagacccgagatcggcggcgagctgggcggccccagaaccgccaagctgctgaccagctgcctgttcgtgctgctgtggctgctgtacatcttcttcagcagcctggaggcctactgccacatcaagggcttctag

SEQ ID NO: 100252 - DNA, 2814 bp, synthetic construct
  misc_feature 1..2814: note = Description of Artificial Sequence: Synthetic coding sequence
  source 1..2814: mol_type = other DNA
atgtacaacatgagaagactgagcctgagccccaccttcagcatgggcttccacctgctggtgaccgtgagcctgctgttcagccacgtggaccacgtgatcgccgagaccgagatggagggcgagggcaacgagaccggcgagtgcaccggcagctactactgcaagaagggcgtgatcctgcccatctgggagccccaggaccccagcttcggcgacaagatcgccagagccaccgtgtacttcgtggccatggtgtacatgttcctgggcgtgagcatcatcgccgacagattcatgagcagcatcgaggtgatcaccagccaggagaaggagatcaccatcaagaagcccaacggcgagaccaccaagaccaccgtgagaatctggaacgagaccgtgagcaacctgaccctgatggccctgggcagcagcgcccccgagatcctgctgagcgtgatcgaggtgtgcggccacaacttcaccgccggcgacctgggccccagcaccatcgtgggcagcgccgccttcaacatgttcatcatcatcgccctgtgcgtgtacgtggtgcccgacggcgagaccagaaagatcaagcacctgagagtgttcttcgtgaccgccgcctggagcatcttcgcctacacctggctgtacatcatcctgagcgtgatcagccccggcgtggtggaggtgtgggagggcctgctgaccttcttcttcttccccatctgcgtggtgttcgcctgggtggccgacagaagactgctgttctacaagtacgtgtacaagagatacagagccggcaagcagagaggcatgatcatcgagcacgagggcgacagacccagcagcaagaccgagatcgagatggacggcaaggtggtgaacagccacgtggagaacttcctggacggcgccctggtgctggaggtggacgagagagaccaggacgacgaggaggccagaagagagatggccagaatcctgaaggagctgaagcagaagcaccccgacaaggagatcgagcagctgatcgagctggccaactaccaggtgctgagccagcagcagaagagcagagccttctacagaatccaggccaccagactgatgaccggcgccggcaacatcctgaagagacacgccgccgaccaggccagaaaggccgtgagcatgcacgaggtgaacaccgaggtgaccgagaacgaccccgtgagcaagatcttcttcgagcagggcacctaccagtgcctggagaactgcggcaccgtggccctgaccatcatcagaagaggcggcgacctgaccaacaccgtgttcgtggacttcagaaccgaggacggcaccgccaacgccggcagcgactacgagttcaccgagggcaccgtggtgttcaagcccggcgacacccagaaggagatcagagtgggcatcatcgacgacgacatcttcgaggaggacgagaacttcctggtgcacctgagcaacgtgaaggtgagcagcgaggccagcgaggacggcatcctggaggccaaccacgtgagcaccctggcctgcctgggcagccccagcaccgccaccgtgaccatcttcgacgacgaccacgccggcatcttcaccttcgaggagcccgtgacccacgtgagcgagagcatcggcatcatggaggtgaaggtgctgagaaccagcggcgccagaggcaacgtgatcgtgccctacaagaccatcgagggcaccgccagaggcggcggcgaggacttcgaggacacctgcggcgagctggagttccagaacgacgagatcgtgaagatcatcaccatcagaatcttcgacagagaggagtacgagaaggagtgcagcttcagcctggtgctggaggagcccaagtggatcagaagaggcatgaaggagggcttctgcttcaccgacgagtacgacgacaagcagcccctgaccagcaaggaggaggaggagagaagaatcgccgagatgggcagacccatcctgggcgagcacaccaagctggaggtgatcatcgaggagagctacgagttcaagagcaccgtggacaagctgatcaagaagaccaacctggccctggtggtgggcaccaacagctggagagagcagttcatcgaggccatcaccgtgagcgccggcgaggacgacgacgacgacgagtgcggcgaggagaagctgcccagctgcttcgactacgtgatgcacttcctgaccgtgttctggaaggtgctgttcgccttcgtgccccccaccgagtactggaacggctgggcctgcttcatcgtgagcatcctgatgatcggcctgctgaccgccttcatcggcgacctggccagccacttcggctgcaccatcggcctgaaggacagcgtgaccgccgtggtgttcgtggccctgggcaccagcgtgcccgacaccttcgccagcaaggtggccgccacccaggaccagtacgccgacgccagcatcggcaacgtgaccggcagcaacgccgtgaacgtgttcctgggcatcggcgtggcctggagcatcgccgccatctaccacgccgccaacggcgagcagttcaaggtgagccccggcaccctggccttcagcgtgaccctgttcaccatcttcgccttcatcaacgtgggcgtgctgctgtacagaagaagacccgagatcggcggcgagctgggcggccccagaaccgccaagctgctgaccagctgcctgttcgtgctgctgtggctgctgtacatcttcttcagcagcctggaggcctactgccacatcaagggcttctag

SEQ ID NO: 100253 - DNA, 417 bp, synthetic construct
  misc_feature 1..417: note = Description of Artificial Sequence: Synthetic coding sequence
  source 1..417: mol_type = other DNA
atgtacaacatgagaagactgagcctgagccccaccttcagcatgggcttccacctgctggtgaccgtgagcctgctgttcagccacgtggaccacgtgatcgccgagaccgagatggagggcgagggcaacgagaccggcgagtgcaccggcagctactactgcaagaagggcgtgatcctgcccatctgggagccccaggaccccagcttcggcgacaagatcgccagagccaccgtgtacttcgtggccatggtgtacatgttcctgggcgtgagcatcatcgccgacagattcatgagcagcatcgaggtgatcaccagccaggagaaggagatcaccatcaagaagcccaacggcgagaccaccaagaccaccgtgagaatctggaacgagaccgtgagcaacctgacctag

SEQ ID NO: 100254 - DNA, 2907 bp, synthetic construct; identical to SEQ ID NO: 100243
  misc_feature 1..2907: note = Description of Artificial Sequence: Synthetic coding sequence
  source 1..2907: mol_type = other DNA

SEQ ID NO: 100255 - DNA, 2766 bp, synthetic construct
  misc_feature 1..2766: note = Description of Artificial Sequence: Synthetic coding sequence
  source 1..2766: mol_type = other DNA
atggcccccctggccctggtgggcgtgaccctgctgctggccgcccccccctgcagcggcgccgccacccccacccccagcctgccccccccccccgccaacgacagcgacaccagcaccggcggctgccagggcagctacagatgccagcccggcgtgctgctgcccgtgtgggagcccgacgaccccagcctgggcgacaaggccgccagagccgtggtgtacttcgtggccatggtgtacatgttcctgggcgtgagcatcatcgccgacagattcatggccgccatcgaggtgatcaccagcaaggagaaggagatcaccatcaccaaggccaacggcgagaccagcgtgggcaccgtgagaatctggaacgagaccgtgagcaacctgaccctgatggccctgggcagcagcgcccccgagatcctgctgagcgtgatcgaggtgtgcggccacaacttccaggccggcgagctgggccccggcaccatcgtgggcagcgccgccttcaacatgttcgtggtgatcgccgtgtgcatctacgtgatccccgccggcgagagcagaaagatcaagcacctgagagtgttcttcgtgaccgccagctggagcatcttcgcctacgtgtggctgtacctgatcctggccgtgttcagccccggcgtggtgcaggtgtgggaggccctgctgaccctggtgttcttccccgtgtgcgtggtgttcgcctggatggccgacaagagactgctgttctacaagtacgtgtacaagagatacagaaccgaccccagaagcggcatcatcatcggcgccgagggcgacccccccaagagcatcgagctggacggcaccttcgtgggcgccgaggcccccggcgagctgggcggcctgggccccggccccgccgaggccagagagctggacgccagcagaagagaggtgatccagatcctgaaggacctgaagcagaagcaccccgacaaggacctggagcagctggtgggcatcgccaactactacgccctgctgcaccagcagaagagcagagccttctacagaatccaggccaccagactgatgaccggcgccggcaacgtgctgagaagacacgccgccgacgccagcagaagagccgcccccgccgagggcgccggcgaggacgaggacgacggcgccagcagaatcttcttcgagcccagcctgtaccactgcctggagaactgcggcagcgtgctgctgagcgtgacctgccagggcggcgagggcaacagcaccttctacgtggactacagaaccgaggacggcagcgccaaggccggcagcgactacgagtacagcgagggcaccctggtgttcaagcccggcgagacccagaaggagctgagaatcggcatcatcgacgacgacatcttcgaggaggacgagcacttcttcgtgagactgctgaacctgagagtgggcgacgcccagggcatgttcgagcccgacggcggcggcagacccaagggcagactggtggcccccctgctggccaccgtgaccatcctggacgacgaccacgccggcatcttcagcttccaggacagactgctgcacgtgagcgagtgcatgggcaccgtggacgtgagagtggtgagaagcagcggcgccagaggcaccgtgagactgccctacagaaccgtggacggcaccgccagaggcggcggcgtgcactacgaggacgcctgcggcgagctggagttcggcgacgacgagaccatgaagaccctgcaggtgaagatcgtggacgacgaggagtacgagaagaaggacaacttcttcatcgagctgggccagccccagtggctgaagagaggcatcagcgccctgctgctgaaccagggcgacggcgacagaaagctgaccgccgaggaggaggaggccagaagaatcgccgagatgggcaagcccgtgctgggcgagaactgcagactggaggtgatcatcgaggagagctacgacttcaagaacaccgtggacaagctgatcaagaagaccaacctggccctggtgatcggcacccacagctggagagagcagttcctggaggccatcaccgtgagcgccggcgacgaggaggaggaggaggacggcagcagagaggagagactgcccagctgcttcgactacgtgatgcacttcctgaccgtgttctggaaggtgctgttcgcctgcgtgccccccaccgagtactgccacggctgggcctgcttcggcgtgagcatcctggtgatcggcctgctgaccgccctgatcggcgacctggccagccacttcggctgcaccgtgggcctgaaggacagcgtgaacgccgtggtgttcgtggccctgggcaccagcatccccgacaccttcgccagcaaggtggccgccctgcaggaccagtgcgccgacgccagcatcggcaacgtgaccggcagcaacgccgtgaacgtgttcctgggcctgggcgtggcctggagcgtggccgccgtgtactgggccgtgcagggcagacccttcgaggtgagaaccggcaccctggccttcagcgtgaccctgttcaccgtgttcgccttcgtgggcatcgccgtgctgctgtacagaagaagaccccacatcggcggcgagctgggcggccccagaggccccaagctggccaccaccgccctgttcctgggcctgtggctgctgtacatcctgttcgccagcctggaggcctactgccacatcagaggcttctag

SEQ ID NO: 100256 - DNA, 2478 bp, synthetic construct
  misc_feature 1..2478: note = Description of Artificial Sequence: Synthetic coding sequence
  source 1..2478: mol_type = other DNA
atgttcgtggtgatcgccgtgtgcatctacgtgatccccgccggcgagagcagaaagatcaagcacctgagagtgttcttcgtgaccgccagctggagcatcttcgcctacgtgtggctgtacctgatcctggccgtgttcagccccggcgtggtgcaggtgtgggaggccctgctgaccctggtgttcttccccgtgtgcgtggtgttcgcctggatggccgacaagagactgctgttctacaagtacgtgtacaagagatacagaaccgaccccagaagcggcatcatcatcggcgccgagggcgacccccccaagagcatcgagctggacggcaccttcgtgggcgccgaggcccccggcgagctgggcggcctgggccccggccccgccgaggccagagagctggacgccagcagaagagaggtgatccagatcctgaaggacctgaagcagaagcaccccgacaaggacctggagcagctggtgggcatcgccaactactacgccctgctgcaccagcagaagagcagagccttctacagaatccaggccaccagactgatgaccggcgccggcaacgtgctgagaagacacgccgccgacgccagcagaagagccgcccccgccgagggcgccggcgaggacgaggacgacggcgccagcagaatcttcttcgagcccagcctgtaccactgcctggagaactgcggcagcgtgctgctgagcgtgacctgccagggcggcgagggcaacagcaccttctacgtggactacagaaccgaggacggcagcgccaaggccggcagcgactacgagtacagcgagggcaccctggtgttcaagcccggcgagacccagaaggagctgagaatcggcatcatcgacgacgacatcttcgaggaggacgagcacttcttcgtgagactgctgaacctgagagtgggcgacgcccagggcatgttcgagcccgacggcggcggcagacccaagggcagactggtggcccccctgctggccaccgtgaccatcctggacgacgaccacgccggcatcttcagcttccaggacagactgctgcacgtgagcgagtgcatgggcaccgtggacgtgagagtggtgagaagcagcggcgccagaggcaccgtgagactgccctacagaaccgtggacggcaccgccagaggcggcggcgtgcactacgaggacgcctgcggcgagctggagttcggcgacgacgagaccatgaagaccctgcaggtgaagatcgtggacgacgaggagtacgagaagaaggacaacttcttcatcgagctgggccagccccagtggctgaagagaggcatcagcgccctgctgctgaaccagggcgacggcgacagaaagctgaccgccgaggaggaggaggccagaagaatcgccgagatgggcaagcccgtgctgggcgagaactgcagactggaggtgatcatcgaggagagctacgacttcaagaacaccgtggacaagctgatcaagaagaccaacctggccctggtgatcggcacccacagctggagagagcagttcctggaggccatcaccgtgagcgccggcgacgaggaggaggaggaggacggcagcagagaggagagactgcccagctgcttcgactacgtgatgcacttcctgaccgtgttctggaaggtgctgttcgcctgcgtgccccccaccgagtactgccacggctgggcctgcttcggcgtgagcatcctggtgatcggcctgctgaccgccctgatcggcgacctggccagccacttcggctgcaccgtgggcctgaaggacagcgtgaacgccgtggtgttcgtggccctgggcaccagcatccccggcaacaccctgggcgacttcggcggcgtgggcagccagatgagccaggccggcgccacccaggaccccgccaagatgagacacgtgagacagcagggcggcggcgccgccggccccgtgagaagaagagtgcacagacagagagacagactgcagagaggcgagagagtgccctggcccggcagaagactggtgtgcggcagaagagtgctgggcggcgccggcccccccctgagaggcgcccactggcacgccggcctgctgagacacgccctgcacagactgagactgagaggccactgcagagccgccgtgcccgcccccgccgcccacagaagaagagccggcagacccgccagaacccaggccagacaccacagagccctgcccggccccctggcccccgtgcaccccctgagacagcccggcggcgtgctgccccaccccggcctgctgggccccagagccgagaccagaccccacagaccccccggcgccagagacagcgccgcccccgccctgggcccctggagccccttcccccccagactgggcctgctgagctgggacagcgccagcctgctgagacccctgccctggctgtag

SEQ ID NO: 100257 - DNA, 1155 bp, synthetic construct
  misc_feature 1..1155: note = Description of Artificial Sequence: Synthetic coding sequence
  source 1..1155: mol_type = other DNA
atgggcaccgtggacgtgagagtggtgagaagcagcggcgccagaggcaccgtgagactgccctacagaaccgtggacggcaccgccagaggcggcggcgtgcactacgaggacgcctgcggcgagctggagttcggcgacgacgagaccatgaagaccctgcaggtgaagatcgtggacgacgaggagtacgagaagaaggacaacttcttcatcgagctgggccagccccagtggctgaagagaggcatcagcgccctgctgctgaaccagggcgacggcgacagaaagctgaccgccgaggaggaggaggccagaagaatcgccgagatgggcaagcccgtgctgggcgagaactgcagactggaggtgatcatcgaggagagctacgacttcaagaacaccgtggacaagctgatcaagaagaccaacctggccctggtgatcggcacccacagctggagagagcagttcctggaggccatcaccgtgagcgccggcgacgaggaggaggaggaggacggcagcagagaggagagactgcccagctgcttcgactacgtgatgcacttcctgaccgtgttctggaaggtgctgttcgcctgcgtgccccccaccgagtactgccacggctgggcctgcttcggcgtgagcatcctggtgatcggcctgctgaccgccctgatcggcgacctggccagccacttcggctgcaccgtgggcctgaaggacagcgtgaacgccgtggtgttcgtggccctgggcaccagcatccccgacaccttcgccagcaaggtggccgccctgcaggaccagtgcgccgacgccagcatcggcaacgtgaccggcagcaacgccgtgaacgtgttcctgggcctgggcgtggcctggagcgtggccgccgtgtactgggccgtgcagggcagacccttcgaggtgagaaccggcaccctggccttcagcgtgaccctgttcaccgtgttcgccttcgtgggcatcgccgtgctgctgtacagaagaagaccccacatcggcggcgagctgggcggccccagaggccccaagctggccaccaccgccctgttcctgggcctgtggctgctgtacatcctgttcgccagcctggaggcctactgccacatcagaggcttctag

SEQ ID NO: 100258 - DNA, 2034 bp, synthetic construct
  misc_feature 1..2034: note = Description of Artificial Sequence: Synthetic coding sequence
  source 1..2034: mol_type = other DNA
atggccgacaagagactgctgttctacaagtacgtgtacaagagatacagaaccgaccccagaagcggcatcatcatcggcgccgagggcgacccccccaagagcatcgagctggacggcaccttcgtgggcgccgaggcccccggcgagctgggcggcctgggccccggccccgccgaggccagagagctggacgccagcagaagagaggtgatccagatcctgaaggacctgaagcagaagcaccccgacaaggacctggagcagctggtgggcatcgccaactactacgccctgctgcaccagcagaagagcagagccttctacagaatccaggccaccagactgatgaccggcgccggcaacgtgctgagaagacacgccgccgacgccagcagaagagccgcccccgccgagggcgccggcgaggacgaggacgacggcgccagcagaatcttcttcgagcccagcctgtaccactgcctggagaactgcggcagcgtgctgctgagcgtgacctgccagggcggcgagggcaacagcaccttctacgtggactacagaaccgaggacggcagcgccaaggccggcagcgactacgagtacagcgagggcaccctggtgttcaagcccggcgagacccagaaggagctgagaatcggcatcatcgacgacgacatcttcgaggaggacgagcacttcttcgtgagactgctgaacctgagagtgggcgacgcccagggcatgttcgagcccgacggcggcggcagacccaagggcagactggtggcccccctgctggccaccgtgaccatcctggacgacgaccacgccggcatcttcagcttccaggacagactgctgcacgtgagcgagtgcatgggcaccgtggacgtgagagtggtgagaagcagcggcgccagaggcaccgtgagactgccctacagaaccgtggacggcaccgccagaggcggcggcgtgcactacgaggacgcctgcggcgagctggagttcggcgacgacgagaccatgaagaccctgcaggtgaagatcgtggacgacgaggagtacgagaagaaggacaacttcttcatcgagctgggccagccccagtggctgaagagaggcatcagcgccctgctgctgaaccagggcgacggcgacagaaagctgaccgccgaggaggaggaggccagaagaatcgccgagatgggcaagcccgtgctgggcgagaactgcagactggaggtgatcatcgaggagagctacgacttcaagaacaccgtggacaagctgatcaagaagaccaacctggccctggtgatcggcacccacagctggagagagcagttcctggaggccatcaccgtgagcgccggcgacgaggaggaggaggaggacggcagcagagaggagagactgcccagctgcttcgactacgtgatgcacttcctgaccgtgttctggaaggtgctgttcgcctgcgtgccccccaccgagtactgccacggctgggcctgcttcggcgtgagcatcctggtgatcggcctgctgaccgccctgatcggcgacctggccagccacttcggctgcaccgtgggcctgaaggacagcgtgaacgccgtggtgttcgtggccctgggcaccagcatccccgacaccttcgccagcaaggtggccgccctgcaggaccagtgcgccgacgccagcatcggcaacgtgaccggcagcaacgccgtgaacgtgttcctgggcctgggcgtggcctggagcgtggccgccgtgtactgggccgtgcagggcagacccttcgaggtgagaaccggcaccctggccttcagcgtgaccctgttcaccgtgttcgccttcgtgggcatcgccgtgctgctgtacagaagaagaccccacatcggcggcgagctgggcggccccagaggccccaagctggccaccaccgccctgttcctgggcctgtggctgctgtacatcctgttcgccagcctggaggcctactgccacatcagaggcttctag

SEQ ID NO: 100259 - DNA, 2448 bp, synthetic construct
  misc_feature 1..2448: note = Description of Artificial Sequence: Synthetic coding sequence
  source 1..2448: mol_type = other DNA
atggtgctgagaagcggcatctgcggcctgagcccccacagaatcttccccagcctgctggtggtggtggccctggtgggcctgctgcccgtgctgagaagccacggcctgcagctgagccccaccgccagcaccatcagaagcagcgagccccccagagagagaagcatcggcgacgtgaccaccgccccccccgaggtgacccccgagagcagacccgtgaaccacagcgtgaccgaccacggcatgaagcccagaaaggccttccccgtgctgggcatcgactacacccacgtgagaacccccttcgagatcagcctgtggatcctgctggcctgcctgatgaagatcggcttccacgtgatccccaccatcagcagcatcgtgcccgagagctgcctgctgatcgtggtgggcctgctggtgggcggcctgatcaagggcgtgggcgagaccccccccttcctgcagagcgacgtgttcttcctgttcctgctgccccccatcatcctggacgccggctacttcctgcccctgagacagttcaccgagaacctgggcaccatcctgatcttcgccgtggtgggcaccctgtggaacgccttcttcctgggcggcctgatgtacgccgtgtgcctggtgggcggcgagcagatcaacaacatcggcctgctggacaacctgctgttcggcagcatcatcagcgccgtggaccccgtggccgtgctggccgtgttcgaggagatccacatcaacgagctgctgcacatcctggtgttcggcgagagcctgctgaacgacgccgtgaccgtggtgctgtaccacctgttcgaggagttcgccaactacgagcacgtgggcatcgtggacatcttcctgggcttcctgagcttcttcgtggtggccctgggcggcgtgctggtgggcgtggtgtacggcgtgatcgccgccttcaccagcagattcaccagccacatcagagtgatcgagcccctgttcgtgttcctgtacagctacatggcctacctgagcgccgagctgttccacctgagcggcatcatggccctgatcgccagcggcgtggtgatgagaccctacgtggaggccaacatcagccacaagagccacaccaccatcaagtacttcctgaagatgtggagcagcgtgagcgagaccctgatcttcatcttcctgggcgtgagcaccgtggccggcagccaccactggaactggaccttcgtgatcagcaccctgctgttctgcctgatcgccagagtgctgggcgtgctgggcctgacctggttcatcaacaagttcagaatcgtgaagctgacccccaaggaccagttcatcatcgcctacggcggcctgagaggcgccatcgccttcagcctgggctacctgctggacaagaagcacttccccatgtgcgacctgttcctgaccgccatcatcaccgtgatcttcttcaccgtgttcgtgcagggcatgaccatcagacccctggtggacctgctggccgtgaagaagaagcaggagaccaagagaagcatcaacgaggagatccacacccagttcctggaccacctgctgaccggcatcgaggacatctgcggccactacggccaccaccactggaaggacaagctgaacagattcaacaagaagtacgtgaagaagtgcctgatcgccggcgagagaagcaaggagccccagctgatcgccttctaccacaagatggagatgaagcaggccatcgagctggtggagagcggcggcatgggcaagatccccagcgccgtgagcaccgtgagcatgcagaacatccaccccaagagcctgcccagcgagagaatcctgcccgccctgagcaaggacaaggaggaggagatcagaaagatcctgagaaacaacctgcagaagaccagacagagactgagaagctacaacagacacaccctggtggccgacccctacgaggaggcctggaaccagatgctgctgagaagacagaaggccagacagctggagcagaagatcaacaactacctgaccgtgcccgcccacaagctggacagccccaccatgagcagagccagaatcggcagcgaccccctggcctacgagcccaaggaggacctgcccgtgatcaccatcgaccccgccagcccccagagccccgagagcgtggacctggtgaacgaggagctgaagggcaaggtgctgggcctgagcagagaccccgccaaggtggccgaggaggacgaggacgacgacggcggcatcatgatgagaagcaaggagaccagcagccccggcaccgacgacgtgttcacccccgcccccagcgacagccccagcagccagagaatccagagatgcctgagcgaccccggcccccaccccgagcccggcgagggcgagcccttcttccccaagggccagtag

SEQ ID NO: 100260 - DNA, 408 bp, synthetic construct
  misc_feature 1..408: note = Description of Artificial Sequence: Synthetic coding sequence
  source 1..408: mol_type = other DNA
atggtgctgagaagcggcatctgcggcctgagcccccacagaatcttccccagcctgctggtggtggtggccctggtgggcctgctgcccgtgctgagaagccacggcctgcagctgagccccaccgccagcaccatcagaagcagcgagccccccagagagagaagcatcggcgacgtgaccaccgccccccccgaggtgacccccgagagcagacccgtgaaccacagcgtgaccgaccacggcatgaagcccagaaaggccttccccgtgctgggcatcgactacacccacgtgagaacccccttcgagatcagcctgtggatcctgctggcctgcctgatgaagatcggcttcccctgcgacccccactacctgaagcacagacccggcgagctgcccgcctag

SEQ ID NO: 100261 - DNA, 1668 bp, synthetic construct
  misc_feature 1..1668: note = Description of Artificial Sequence: Synthetic coding sequence
  source 1..1668: mol_type = other DNA
atggtgctgagaagcggcatctgcggcctgagcccccacagaatcttccccagcctgctggtggtggtggccctggtgggcctgctgcccgtgctgagaagccacggcctgcagctgagccccaccgccagcaccatcagaagcagcgagccccccagagagagaagcatcggcgacgtgaccaccgccccccccgaggtgacccccgagagcagacccgtgaaccacagcgtgaccgaccacggcatgaagcccagaaaggccttccccgtgctgggcatcgactacacccacgtgagaacccccttcgagatcagcctgtggatcctgctggcctgcctgatgaagatcggcttccacgtgatccccaccatcagcagcatcgtgcccgagagctgcctgctgatcgtggtgggcctgctggtgggcggcctgatcaagggcgtgggcgagaccccccccttcctgcagagcgacgtgttcttcctgttcctgctgccccccatcatcctggacgccggctacttcctgcccctgagacagttcaccgagaacctgggcaccatcctgatcttcgccgtggtgggcaccctgtggaacgccttcttcctgggcggcctgatgtacgccgtgtgcctggtgggcggcgagcagatcaacaacatcggcctgctggacaacctgctgttcggcagcatcatcagcgccgtggaccccgtggccgtgctggccgtgttcgaggagatccacatcaacgagctgctgcacatcctggtgttcggcgagagcctgctgaacgacgccgtgaccgtggtgctgtaccacctgttcgaggagttcgccaactacgagcacgtgggcatcgtggacatcttcctgggcttcctgagcttcttcgtggtggccctgggcggcgtgctggtgggcgtggtgtacggcgtgatcgccgccttcaccagcagattcaccagccacatcagagtgatcgagcccctgttcgtgttcctgtacagctacatggcctacctgagcgccgagctgttccacctgagcggcatcatggccctgatcgccagcggcgtggtgatgagaccctacgtggaggccaacatcagccacaagagccacaccaccatcaagtacttcctgaagatgtggagcagcgtgagcgagaccctgatcttcatcttcctgggcgtgagcaccgtggccggcagccaccactggaactggaccttcgtgatcagcaccctgctgttctgcctgatcgccagagtgctgggcgtgctgggcctgacctggttcatcaacaagttcagaatcgtgaagctgacccccaaggaccagttcatcatcgcctacggcggcctgagaggcgccatcgccttcagcctgggctacctgctggacaagaagcacttccccatgtgcgacctgttcctgaccgccatcatcaccgtgatcttcttcaccgtgttcgtgcaggtgctgggccagggcagagccggcccctgcctgggcgacccccacagactgttcccctggaaggagagaaaggcctgcgacctgaagtgcgacagcagccccagcagcaccaccaacctgctgtgcgacctgggcagagccaccccccccttctgggccagcgtgagcagcatcgtgaagtag

SEQ ID NO: 100262 - DNA, 960 bp, synthetic construct
  misc_feature 1..960: note = Description of Artificial Sequence: Synthetic coding sequence
  source 1..960: mol_type = other DNA
atgaccatcagacccctggtggacctgctggccgtgaagaagaagcaggagaccaagagaagcatcaacgaggagatccacacccagttcctggaccacctgctgaccggcatcgaggacatctgcggccactacggccaccaccactggaaggacaagctgaacagattcaacaagaagtacgtgaagaagtgcctgatcgccggcgagagaagcaaggagccccagctgatcgccttctaccacaagatggagatgaagcaggccatcgagctggtggagagcggcggcatgggcaagatccccagcgccgtgagcaccgtgagcatgcagaacatccaccccaagagcctgcccagcgagagaatcctgcccgccctgagcaaggacaaggaggaggagatcagaaagatcctgagaaacaacctgcagaagaccagacagagactgagaagctacaacagacacaccctggtggccgacccctacgaggaggcctggaaccagatgctgctgagaagacagaaggccagacagctggagcagaagatcaacaactacctgaccgtgcccgcccacaagctggacagccccaccatgagcagagccagaatcggcagcgaccccctggcctacgagcccaaggaggacctgcccgtgatcaccatcgaccccgccagcccccagagccccgagagcgtggacctggtgaacgaggagctgaagggcaaggtgctgggcctgagcagagaccccgccaaggtggccgaggaggacgaggacgacgacggcggcatcatgatgagaagcaaggagaccagcagccccggcaccgacgacgtgttcacccccgcccccagcgacagccccagcagccagagaatccagagatgcctgagcgaccccggcccccaccccgagcccggcgagggcgagcccttcttccccaagggccagtag

SEQ ID NO: 100263 - DNA, 675 bp, synthetic construct
  misc_feature 1..675: note = Description of Artificial Sequence: Synthetic coding sequence
  source 1..675: mol_type = other DNA
atggagatgaagcaggccatcgagctggtggagagcggcggcatgggcaagatccccagcgccgtgagcaccgtgagcatgcagaacatccaccccaagagcctgcccagcgagagaatcctgcccgccctgagcaaggacaaggaggaggagatcagaaagatcctgagaaacaacctgcagaagaccagacagagactgagaagctacaacagacacaccctggtggccgacccctacgaggaggcctggaaccagatgctgctgagaagacagaaggccagacagctggagcagaagatcaacaactacctgaccgtgcccgcccacaagctggacagccccaccatgagcagagccagaatcggcagcgaccccctggcctacgagcccaaggaggacctgcccgtgatcaccatcgaccccgccagcccccagagccccgagagcgtggacctggtgaacgaggagctgaagggcaaggtgctgggcctgagcagagaccccgccaaggtggccgaggaggacgaggacgacgacggcggcatcatgatgagaagcaaggagaccagcagccccggcaccgacgacgtgttcacccccgcccccagcgacagccccagcagccagagaatccagagatgcctgagcgaccccggcccccaccccgagtag

SEQ ID NO: 100264 - DNA, 1431 bp, synthetic construct
  misc_feature 1..1431: note = Description of Artificial Sequence: Synthetic coding sequence
  source 1..1431: mol_type = other DNA
atggcctacctgagcgccgagctgttccacctgagcggcatcatggccctgatcgccagcggcgtggtgatgagaccctacgtggaggccaacatcagccacaagagccacaccaccatcaagtacttcctgaagatgtggagcagcgtgagcgagaccctgatcttcatcttcctgggcgtgagcaccgtggccggcagccaccactggaactggaccttcgtgatcagcaccctgctgttctgcctgatcgccagagtgctgggcgtgctgggcctgacctggttcatcaacaagttcagaatcgtgaagctgacccccaaggaccagttcatcatcgcctacggcggcctgagaggcgccatcgccttcagcctgggctacctgctggacaagaagcacttccccatgtgcgacctgttcctgaccgccatcatcaccgtgatcttcttcaccgtgttcgtgcagggcatgaccatcagacccctggtggacctgctggccgtgaagaagaagcaggagaccaagagaagcatcaacgaggagatccacacccagttcctggaccacctgctgaccggcatcgaggacatctgcggccactacggccaccaccactggaaggacaagctgaacagattcaacaagaagtacgtgaagaagtgcctgatcgccggcgagagaagcaaggagccccagctgatcgccttctaccacaagatggagatgaagcaggccatcgagctggtggagagcggcggcatgggcaagatccccagcgccgtgagcaccgtgagcatgcagaacatccaccccaagagcctgcccagcgagagaatcctgcccgccctgagcaaggacaaggaggaggagatcagaaagatcctgagaaacaacctgcagaagaccagacagagactgagaagctacaacagacacaccctggtggccgacccctacgaggaggcctggaaccagatgctgctgagaagacagaaggccagacagctggagcagaagatcaacaactacctgaccgtgcccgcccacaagctggacagccccaccatgagcagagccagaatcggcagcgaccccctggcctacgagcccaaggaggacctgcccgtgatcaccatcgaccccgccagcccccagagccccgagagcgtggacctggtgaacgaggagctgaagggcaaggtgctgggcctgagcagagaccccgccaaggtggccgaggaggacgaggacgacgacggcggcatcatgatgagaagcaaggagaccagcagccccggcaccgacgacgtgttcacccccgcccccagcgacagccccagcagccagagaatccagagatgcctgagcgaccccggcccccaccccgagcccggcgagggcgagcccttcttccccaagggccagtag

SEQ ID NO: 100265 - DNA, 1626 bp, synthetic construct; identical to SEQ ID NO: 85598
  misc_feature 1..1626: note = Description of Artificial Sequence: Synthetic coding sequence
  source 1..1626: mol_type = other DNA

SEQ ID NO: 100266 - DNA, 2505 bp, synthetic construct
  misc_feature 1..2505: note = Description of Artificial Sequence: Synthetic coding sequence
  source 1..2505: mol_type = other DNA
atgtggggcctgggcgccagaggccccgacagaggcctgctgctggccctggccctgggcggcctggccagagccggcggcgtggaggtggagcccggcggcgcccacggcgagagcggcggcttccaggtggtgaccttcgagtgggcccacgtgcaggacccctacgtgatcgccctgtggatcctggtggccagcctggccaagatcggcttccacctgagccacaaggtgaccagcgtggtgcccgagagcgccctgctgatcgtgctgggcctggtgctgggcggcatcgtgtgggccgccgaccacatcgccagcttcaccctgacccccaccgtgttcttcttctacctgctgccccccatcgtgctggacgccggctacttcatgcccaacagactgttcttcggcaacctgggcaccatcctgctgtacgccgtggtgggcaccgtgtggaacgccgccaccaccggcctgagcctgtacggcgtgttcctgagcggcctgatgggcgacctgcagatcggcctgctggacttcctgctgttcggcagcctgatggccgccgtggaccccgtggccgtgctggccgtgttcgaggaggtgcacgtgaacgaggtgctgttcatcatcgtgttcggcgagagcctgctgaacgacgccgtgaccgtggtgctgtacaacgtgttcgagagcttcgtggccctgggcggcgacaacgtgaccggcgtggactgcgtgaagggcatcgtgagcttcttcgtggtgagcctgggcggcaccctggtgggcgtggtgttcgccttcctgctgagcctggtgaccagattcaccaagcacgtgagaatcatcgagcccggcttcgtgttcatcatcagctacctgagctacctgaccagcgagatgctgagcctgagcgccatcctggccatcaccttctgcggcatctgctgccagaagtacgtgaaggccaacatcagcgagcagagcgccaccaccgtgagatacaccatgaagatgctggccagcagcgccgagaccatcatcttcatgttcctgggcatcagcgccgtgaaccccttcatctggacctggaacaccgccttcgtgctgctgaccctggtgttcatcagcgtgtacagagccatcggcgtggtgctgcagacctggctgctgaacagatacagaatggtgcagctggagcccatcgaccaggtggtgctgagctacggcggcctgagaggcgccgtggccttcgccctggtggtgctgctggacggcgacaaggtgaaggagaagaacctgttcgtgagcaccaccatcatcgtggtgttcttcaccgtgatcttccagggcctgaccatcaagcccctggtgcagtggctgaaggtgaagagaagcgagcacagagagcccagactgaacgagaagctgcacggcagagccttcgaccacatcctgagcgccatcgaggacatcagcggccagatcggccacaactacctgagagacaagtggagccacttcgacagaaagttcctgagcagagtgctgatgagaagaagcgcccagaagagcagagacagaatcctgaacgtgttccacgagctgaacctgaaggacgccatcagctacgtggccgagggcgagagaagaggcagcctggccttcatcagaagccccagcaccgacaacgtggtgaacgtggacttcacccccagaagcagcaccgtggaggccagcgtgagctacctgctgagagagaacgtgagcgccgtgtgcctggacatgcagagcctggagcagagaagaagaagcatcagagacgccgaggacatggtgacccaccacaccctgcagcagtacctgtacaagcccagacaggagtacaagcacctgtacagcagacacgagctgacccccaccgaggacgagaagcaggacagagagatcttccacagaaccatgagaaagagactggagagcttcaagagcaccaagctgggcctgaaccagaacaagaaggccgccaagctgtacaagagagagagagcccagaagagaagaaacagcagcatccccaacggcaagctgcccatggagagccccgcccagaacttcaccatcaaggagaaggacctggagctgagcgacaccgaggagccccccaactacgacgaggagatgagcggcggcatcgagttcctggccagcgtgaccaaggacaccgccagcgacagccccgccggcatcgacaaccccgtgttcagccccgacgaggccctggacagaagcctgctggccagactgcccccctggctgagccccggcgagaccgtggtgcccagccagagagccagaacccagatcccctacagccccggcaccttctgcagactgatgcccttcagactgagcagcaagagcgtggacagcttcctgcaggccgacggccccgaggagagaccccccgccgccctgcccgagagcacccacatgtag

SEQ ID NO: 100267 - DNA, 1077 bp, synthetic construct
  misc_feature 1..1077: note = Description of Artificial Sequence: Synthetic coding sequence
  source 1..1077: mol_type = other DNA
atgagcgccgacgccgccgccggcgcccccctgcccagactgtgctgcctggagaagggccccaacggctacggcttccacctgcacggcgagaagggcaagctgggccagtacatcagactggtggagcccggcagccccgccgagaaggccggcctgctggccggcgacagactggtggaggtgaacggcgagaacgtggagaaggagacccaccagcaggtggtgagcagaatcagagccgccctgaacgccgtgagactgctggtggtggaccccgagaccgacgagcagctgcagaagctgggcgtgcaggtgagagaggagctgctgagagcccaggaggcccccggccaggccgagccccccgccgccgccgaggtgcagggcgccggcaacgagaacgagcccagagaggccgacaagagccaccccgagcagagagagctgagacccagactgtgcaccatgaagaagggccccagcggctacggcttcaacctgcacagcgacaagagcaagcccggccagttcatcagaagcgtggaccccgacagccccgccgaggccagcggcctgagagcccaggacagaatcgtggaggtgaacggcgtgtgcatggagggcaagcagcacggcgacgtggtgagcgccatcagagccggcggcgacgagaccaagctgctggtggtggacagagagaccgacgagttcttcaagaagtgcagagtgatccccagccaggagcacctgaacggccccctgcccgtgcccttcaccaacggcgagatccagaaggagaacagcagagaggccctggccgaggccgccctggagagccccagacccgccctggtgagaagcgccagcagcgacaccagcgaggagctgaacagccaggacagcccccccaagcaggacagcaccgcccccagcagcaccagcagcagcgaccccatcctggacttcaacatcagcctggccatggccaaggagagagcccaccagaagagaagcagcaagagagccccccagatggactggagcaagaagaacgagctgttcagcaacctgtag

SEQ ID NO: 100268 - DNA, 822 bp, synthetic construct
  misc_feature 1..822: note = Description of Artificial Sequence: Synthetic coding sequence
  source 1..822: mol_type = other DNA
atgagcgccgacgccgccgccggcgcccccctgcccagactgtgctgcctggagaaggagacccaccagcaggtggtgagcagaatcagagccgccctgaacgccgtgagactgctggtggtggaccccgagaccgacgagcagctgcagaagctgggcgtgcaggtgagagaggagctgctgagagcccaggaggcccccggccaggccgagccccccgccgccgccgaggtgcagggcgccggcaacgagaacgagcccagagaggccgacaagagccaccccgagcagagagagctgagacccagactgtgcaccatgaagaagggccccagcggctacggcttcaacctgcacagcgacaagagcaagcccggccagttcatcagaagcgtggaccccgacagccccgccgaggccagcggcctgagagcccaggacagaatcgtggaggtgaacggcgtgtgcatggagggcaagcagcacggcgacgtggtgagcgccatcagagccggcggcgacggcagcggcggcggcaaccagagaggcgccgagttccccagacagccccccaagaccggcctgcacagcgccctggtgtacctgctgctgagaccccaccccagactgcagcacctgcccggccacggccagagagagggcccccccgagacccagcagcagaccggccccgccgacggcctggagcaggagaagagaaccctgcagcagcccctgagcgccctgctgccccccagcgactggcagggcagagccagcatccccccccacctgttccccagcccccagctgctgccctag

SEQ ID NO: 100269 - DNA, 1014 bp, synthetic construct
  misc_feature 1..1014: note = Description of Artificial Sequence: Synthetic coding sequence
  source 1..1014: mol_type = other DNA
atggccgcccccgagcccctgagacccagactgtgcagactggtgagaggcgagcagggctacggcttccacctgcacggcgagaagggcagaagaggccagttcatcagaagagtggagcccggcagccccgccgaggccgccgccctgagagccggcgacagactggtggaggtgaacggcgtgaacgtggagggcgagacccaccaccaggtggtgcagagaatcaaggccgtggagggccagaccagactgctggtggtggaccaggagaccgacgaggagctgagaagaagacagctgacctgcaccgaggagatggcccagagaggcctgccccccgcccacgacccctgggagcccaagcccgactgggcccacaccggcagccacagcagcgaggccggcaagaaggacgtgagcggccccctgagagagctgagacccagactgtgccacctgagaaagggcccccagggctacggcttcaacctgcacagcgacaagagcagacccggccagtacatcagaagcgtggaccccggcagccccgccgccagaagcggcctgagagcccaggacagactgatcgaggtgaacggccagaacgtggagggcctgagacacgccgaggtggtggccagcatcaaggccagagaggacgaggccagactgctggtggtggaccccgagaccgacgagcacttcaagagactgagagtgacccccaccgaggagcacgtggagggccccctgcccagccccgtgaccaacggcaccagccccgcccagctgaacggcggcagcgcctgcagcagcagaagcgacctgcccggcagcgacaaggacaccgaggacggcagcgcctggaagcaggaccccttccaggagagcggcctgcacctgagccccaccgccgccgaggccaaggagaaggccagagccatgagagtgaacaagagagccccccagatggactggaacagaaagagagagatcttcagcaacttctag

SEQ ID NO: 100270 - DNA, 981 bp, synthetic construct
  misc_feature 1..981: note = Description of Artificial Sequence: Synthetic coding sequence
  source 1..981: mol_type = other DNA
atggccgcccccgagcccctgagacccagactgtgcagactggtgagaggcgagcagggctacggcttccacctgcacggcgagaagggcagaagaggccagttcatcagaagagtggagcccggcagccccgccgaggccgccgccctgagagccggcgacagactggtggaggtgaacggcgtgaacgtggagggcgagacccaccaccaggtggtgcagagaatcaaggccgtggagggccagaccagactgctggtggtggaccaggagaccgacgaggagctgagaagaagacagctgacctgcaccgaggagatggcccagagaggcctgccccccgcccacgacccctgggagcccaagcccgactgggcccacaccggcagccacagcagcgaggccggcaagaaggacgtgagcggccccctgagagagctgagacccagactgtgccacctgagaaagggcccccagggctacggcttcaacctgcacagcgacaagagcagacccggccagtacatcagaagcgtggaccccggcagccccgccgccagaagcggcctgagagcccaggacagactgatcgaggtgaacggccagaacgtggagggcctgagacacgccgaggtggtggccagcatcaaggccagagaggacgaggccagactgctggtggtggaccccgagaccgacgagcacttcaagagactgagagtgacccccaccgaggagcacgtggagggccccctgcccagccccgtgaccaacggcaccagccccgcccagctgaacggcggcagcgcctgcagcagcagaagcgacctgcccggcagcgacaaggacaccgaggagagcggcctgcacctgagccccaccgccgccgaggccaaggagaaggccagagccatgagagtgaacaagagagccccccagatggactggaacagaaagagagagatcttcagcaacttctag

SEQ ID NO: 100271 - DNA, 2397 bp, synthetic construct
  misc_feature 1..2397: note = Description of Artificial Sequence: Synthetic coding sequence
  source 1..2397: mol_type = other DNA
atggccctgcagatgttcgtgacctacagcccctggaactgcctgctgctgctggtggccctggagtgcagcgaggccagcagcgacctgaacgagagcgccaacagcaccgcccagtacgccagcaacgcctggttcgccgccgccagcagcgagcccgaggagggcatcagcgtgttcgagctggactacgactacgtgcagatcccctacgaggtgaccctgtggatcctgctggccagcctggccaagatcggcttccacctgtaccacagactgcccggcctgatgcccgagagctgcctgctgatcctggtgggcgccctggtgggcggcatcatcttcggcaccgaccacaagagcccccccgtgatggacagcagcatctacttcctgtacctgctgccccccatcgtgctggagggcggctacttcatgcccaccagacccttcttcgagaacatcggcagcatcctgtggtgggccgtgctgggcgccctgatcaacgccctgggcatcggcctgagcctgtacctgatctgccaggtgaaggccttcggcctgggcgacgtgaacctgctgcagaacctgctgttcggcagcctgatcagcgccgtggaccccgtggccgtgctggccgtgttcgaggaggccagagtgaacgagcagctgtacatgatgatcttcggcgaggccctgctgaacgacggcatcaccgtggtgctgtacaacatgctgatcgccttcaccaagatgcacaagttcgaggacatcgagaccgtggacatcctggccggctgcgccagattcatcgtggtgggcctgggcggcgtgctgttcggcatcgtgttcggcttcatcagcgccttcatcaccagattcacccagaacatcagcgccatcgagcccctgatcgtgttcatgttcagctacctgagctacctggccgccgagaccctgtacctgagcggcatcctggccatcaccgcctgcgccgtgaccatgaagaagtacgtggaggagaacgtgagccagaccagctacaccaccatcaagtacttcatgaagatgctgagcagcgtgagcgagaccctgatcttcatcttcatgggcgtgagcaccgtgggcaagaaccacgagtggaactgggccttcatctgcttcaccctggccttctgccagatctggagagccatcagcgtgttcgccctgttctacatcagcaaccagttcagaaccttccccttcagcatcaaggaccagtgcatcatcttctacagcggcgtgagaggcgccggcagcttcagcctggccttcctgctgcccctgagcctgttccccagaaagaagatgttcgtgaccgccaccctggtggtgatctacttcaccgtgttcatccagggcatcaccgtgggccccctggtgagatacctggacgtgaagaagaccaacaagaaggagagcatcaacgaggagctgcacatcagactgatggaccacctgaaggccggcatcgaggacgtgtgcggccactggagccactaccaggtgagagacaagttcaagaagttcgaccacagatacctgagaaagatcctgatcagaaagaacctgcccaagagcagcatcgtgagcctgtacaagaagctggagatgaagcaggccatcgagatggtggagaccggcatcctgagcagcaccgccttcagcatcccccaccaggcccagagaatccagggcatcaagagactgagccccgaggacgtggagagcatcagagacatcctgaccagcaacatgtaccaggtgagacagagaaccctgagctacaacaagtacaacctgaagccccagaccagcgagaagcaggccaaggagatcctgatcagaagacagaacaccctgagagagagcatgagaaagggccacagcctgccctggggcaagcccgccggcaccaagaacatcagatacctgagctacccctacggcaacccccagagcgccggcagagacaccagagccgccggcttcagcgacgacgacagcagcgaccccggcagccccagcatcaccttcagcgcctgcagcagaatcggcagcctgcagaagcaggaggcccaggagatcatccccatgaagagcctgcacagaggcagaaaggccttcagcttcggctaccagagaaacaccagccaggaggagtacctgggcggcgtgagaagagtggccctgagacccaagcccctgttccacgccgtggacgaggagggcgagagcggcggcgagagcgagggcaaggccagcctggtggaggtgagaagcagatggaccgccgaccacggccacggcagagaccaccacagaagccacagccccctgctgcagaagaagtag

SEQ ID NO: 100272 - DNA, 2691 bp, synthetic construct
  misc_feature 1..2691: note = Description of Artificial Sequence: Synthetic coding sequence
  source 1..2691: mol_type = other DNA
atgctgagagccgccctgagcctgctggccctgcccctggccggcgccgccgaggagcccacccagaagcccgagagccccggcgagcccccccccggcctggagctgttcagatggcagtggcacgaggtggaggccccctacctggtggccctgtggatcctggtggccagcctggccaagatcgtgttccacctgagcagaaaggtgaccagcctggtgcccgagagctgcctgctgatcctgctgggcctggtgctgggcggcatcgtgctggccgtggccaagaaggccgagtaccagctggagcccggcaccttcttcctgttcctgctgccccccatcgtgctggacagcggctacttcatgcccagcagactgttcttcgacaacctgggcgccatcctgacctacgccgtggtgggcaccctgtggaacgccttcaccaccggcgccgccctgtggggcctgcagcaggccggcctggtggcccccagagtgcaggccggcctgctggacttcctgctgttcggcagcctgatcagcgccgtggaccccgtggccgtgctggccgtgttcgaggaggtgcacgtgaacgagaccctgttcatcatcgtgttcggcgagagcctgctgaacgacgccgtgaccgtggtgctgtacaaggtgtgcaacagcttcgtggagatgggcagcgccaacgtgcaggccaccgactacctgaagggcgtggccagcctgttcgtggtgagcctgggcggcgccgccgtgggcctggtgttcgccttcctgctggccctgaccaccagattcaccaagagagtgagaatcatcgagcccctgctggtgttcctgctggcctacgccgcctacctgaccgccgagatggccagcctgagcgccatcctggccgtgaccatgtgcggcctgggctgcaagaagtacgtggaggccaacatcagccacaagagcagaaccaccgtgaagtacaccatgaagaccctggccagctgcgccgagaccgtgatcttcatgctgctgggcatcagcgccgtggacagcagcaagtgggcctgggacagcggcctggtgctgggcaccctgatcttcatcctgttcttcagagccctgggcgtggtgctgcagacctgggtgctgaaccagttcagactggtgcccctggacaagatcgaccaggtggtgatgagctacggcggcctgagaggcgccgtggccttcgccctggtgatcctgctggacagaaccaaggtgcccgccaaggactacttcgtggccaccaccatcgtggtggtgttcttcaccgtgatcgtgcagggcctgaccatcaagcccctggtgaagtggctgaaggtgaagagaagcgagcaccacaagcccaccctgaaccaggagctgcacgagcacaccttcgaccacatcctggccgccgtggaggacgtggtgggccaccacggctaccactactggagagacagatgggagcagttcgacaagaagtacctgagccagctgctgatgagaagaagcgcctacagaatcagagaccagatctgggacgtgtactacagactgaacatcagagacgccatcagcttcgtggaccagggcggccacgtgctgagcagcaccggcctgaccctgcccagcatgcccagcagaaacagcgtggccgagaccagcgtgaccaacctgctgagagagagcggcagcggcgcctgcctggacctgcaggtgatcgacaccgtgagaagcggcagagacagagaggacgccgtgatgcaccacctgctgtgcggcggcctgtacaagcccagaagaagatacaaggccagctgcagcagacacttcatcagcgaggacgcccaggagagacaggacaaggaggtgttccagcagaacatgaagagaagactggagagcttcaagagcaccaagcacaacatctgcttcaccaagagcaagcccagacccagaaagaccggcagaagaaagaaggacggcgtggccaacgccgaggccaccaacggcaagcacagaggcctgggcttccaggacaccgccgccgtgatcctgaccgtggagagcgaggaggaggaggaggagagcgacagcagcgagaccgagaaggaggacgacgagggcatcatcttcgtggccagagccaccagcgaggtgctgcaggagggcaaggtgagcggcagcctggaggtgtgccccagccccagaatcatcccccccagccccacctgcgccgagaaggagctgccctggaagagcggccagggcgacctggccgtgtacgtgagcagcgagaccaccaagatcgtgcccgtggacatgcagaccggctggaaccagagcatcagcagcctggagagcctggccagccccccctgcaaccaggcccccatcctgacctgcctgcccccccaccccagaggcaccgaggagccccaggtgcccctgcacctgcccagcgaccccagaagcagcttcgccttcccccccagcctggccaaggccggcagaagcagaagcgagagcagcgccgacctgccccagcagcaggagctgcagcccctgatgggccacaaggaccacacccacctgagccccggcaccgccaccagccactggtgcatccagttcaacagaggcagcagactgtag

SEQ ID NO: 100273 - DNA, 1308 bp, synthetic construct
  misc_feature 1..1308: note = Description of Artificial Sequence: Synthetic coding sequence
  source 1..1308: mol_type = other DNA
atgagaagaagcgcctacagaatcagagaccagatctgggacgtgtactacagactgaacatcagagacgccatcagcttcgtggaccagggcggccacgtgctgagcagcaccggcctgaccctgcccagcatgcccagcagaaacagcgtggccgagaccagcgtgaccaacctgctgagagagagcggcagcggcgcctgcctggacctgcaggtgatcgacaccgtgagaagcggcagagacagagaggacgccgtgatgcaccacctgctgtgcggcggcctgtacaagcccagaagaagaatcgagctgagaaccgagccctgcggcatgctgctgaagaccttcctgcagaccgacatggaccaggccttcctgggcaccaagcccgccgccgtggccaccagcagccagagaatgagaagaagcggcagaaccagaagaagcagcagcagaatgaagagaagactggagagcttcaagagcaccaagcacaacatctgcttcaccaagagcaagcccagacccagaaagaccggcagaagaaagaaggacggcgtggccaacgccgaggccaccaacggcaagcacagaggcctgggcttccaggacaccgccgccgtgatcctgaccgtggagagcgaggaggaggaggaggagagcgacagcagcgagaccgagaaggaggacgacgagggcatcatcttcgtggccagagccaccagcgaggtgctgcaggagggcaaggtgagcggcagcctggaggtgtgccccagccccagaatcatcccccccagccccacctgcgccgagaaggagctgccctggaagagcggccagggcgacctggccgtgtacgtgagcagcgagaccaccaagatcgtgcccgtggacatgcagaccggctggaaccagagcatcagcagcctggagagcctggccagccccccctgcaaccaggcccccatcctgacctgcctgcccccccaccccagaggcaccgaggagccccaggtgcccctgcacctgcccagcgaccccagaagcagcttcgccttcccccccagcctggccaaggccggcctggccgtgagagccgccctgaccagccccagcagcagaagctgcagccccagctgggccaccagaaccacccccatcagcgcccaggcccccctgccccccaccggcgccagcagcagcaccgaggccgccggctgcagcagcagacccagaggcggcgccggcggcggcatccccgtgggcagcgccccctgggtgatgggcagagccctggagacctag

SEQ ID NO: 100274 - DNA, 2106 bp, synthetic construct
  misc_feature 1..2106: note = Description of Artificial Sequence: Synthetic coding sequence
  source 1..2106: mol_type = other DNA
atggccagaagaggctggagaagagcccccctgagaagaggcgtgggcagcagccccagagccagaagactgatgagacccctgtggctgctgctggccgtgggcgtgttcgactgggccggcgccagcgacggcggcggcggcgaggccagagccatggacgaggagatcgtgagcgagaagcaggccgaggagagccacagacaggacagcgccaacctgctgatcttcatcctgctgctgaccctgaccatcctgaccatctggctgttcaagcacagaagagccagattcctgcacgagaccggcctggccatgatctacggcctgctggtgggcctggtgctgagatacggcatccacgtgcccagcgacgtgaacaacgtgaccctgagctgcgaggtgcagagcagccccaccaccctgctggtgaacgtgagcggcaagttctacgagtacatgctgaagggcgagatcagcagccacgagctgaacaacgtgcaggacaacgagatgctgagaaaggtgaccttcgaccccgaggtgttcttcaacatcctgctgccccccatcatcttctacgccggctacagcctgaagagaagacacttcttcagaaacctgggcagcatcctggcctacgccttcctgggcaccgccatcagctgcttcgtgatcggcagcatcatgtacggctgcgtgaccctgatgaaggtgaccggccagctggccggcgacttctacttcaccgactgcctgctgttcggcgccatcgtgagcgccaccgaccccgtgaccgtgctggccatcttccacgagctgcaggtggacgtggagctgtacgccctgctgttcggcgagagcgtgctgaacgacgccgtggccatcgtgctgagcagcagcatcgtggcctaccagcccgccggcgacaacagccacaccttcgacgtgaccgccatgttcaagagcatcggcatcttcctgggcatcttcagcggcagcttcgccatgggcgccgccaccggcgtggtgaccgccctggtgaccaagttcaccaagctgagagagttccagctgctggagaccggcctgttcttcctgatgagctggagcaccttcctgctggccgaggcctggggcttcaccggcgtggtggccgtgctgttctgcggcatcacccaggcccactacacctacaacaacctgagcaccgagagccagcacagaaccaagcagctgttcgagctgctgaacttcctggccgagaacttcatcttcagctacatgggcctgaccctgttcaccttccagaaccacgtgttcaaccccaccttcgtggtgggcgccttcgtggccatcttcctgggcagagccgccaacatctaccccctgagcctgctgctgaacctgggcagaagaagcaagatcggcagcaacttccagcacatgatgatgttcgccggcctgagaggcgccatggccttcgccctggccatcagagacaccgccacctacgccagacagatgatgttcagcaccaccctgctgatcgtgttcttcaccgtgtgggtgttcggcggcggcaccaccgccatgctgagctgcctgcacatcagagtgggcgtggacagcgaccaggagcacctgggcgtgcccgagaacgagagaagaaccaccaaggccgagagcgcctggctgttcagaatgtggtacaacttcgaccacaactacctgaagcccctgctgacccacagcggcccccccctgaccaccaccctgcccgcctgctgcggccccatcgccagatgcctgaccagcccccaggcctacgagaaccaggagcagctgaaggacgacgacagcgacctgatcctgaacgacggcgacatcagcctgacctacggcgacagcaccgtgaacaccgagcccgccaccagcagcgcccccagaagattcatgggcaacagcagcgaggacgccctggacagagagctggccttcggcgaccacgagctggtgatcagaggcaccagactggtgctgcccatggacgacagcgagccccccctgaacctgctggacaacaccagacacggccccgcctag

SEQ ID NO: 100275 - DNA, 2010 bp, synthetic construct
  misc_feature 1..2010: note = Description of Artificial Sequence: Synthetic coding sequence
  source 1..2010: mol_type = other DNA
atggccagaagaggctggagaagagcccccctgagaagaggcgtgggcagcagccccagagccagaagactgatgagacccctgtggctgctgctggccgtgggcgtgttcgactgggccggcgccagcgacggcggcggcggcgaggccagagccatggacgaggagatcgtgagcgagaagcaggccgaggagagccacagacaggacagcgccaacctgctgatcttcatcctgctgctgaccctgaccatcctgaccatctggctgttcaagcacagaagagccagattcctgcacgagaccggcctggccatgatctacggcctgctggtgggcctggtgctgagatacggcatccacgtgcccagcgacgtgaacaacgtgaccctgagctgcgaggtgcagagcagccccaccaccctgctggtgaccttcgaccccgaggtgttcttcaacatcctgctgccccccatcatcttctacgccggctacagcctgaagagaagacacttcttcagaaacctgggcagcatcctggcctacgccttcctgggcaccgccatcagctgcttcgtgatcggcagcatcatgtacggctgcgtgaccctgatgaaggtgaccggccagctggccggcgacttctacttcaccgactgcctgctgttcggcgccatcgtgagcgccaccgaccccgtgaccgtgctggccatcttccacgagctgcaggtggacgtggagctgtacgccctgctgttcggcgagagcgtgctgaacgacgccgtggccatcgtgctgagcagcagcatcgtggcctaccagcccgccggcgacaacagccacaccttcgacgtgaccgccatgttcaagagcatcggcatcttcctgggcatcttcagcggcagcttcgccatgggcgccgccaccggcgtggtgaccgccctggtgaccaagttcaccaagctgagagagttccagctgctggagaccggcctgttcttcctgatgagctggagcaccttcctgctggccgaggcctggggcttcaccggcgtggtggccgtgctgttctgcggcatcacccaggcccactacacctacaacaacctgagcaccgagagccagcacagaaccaagcagctgttcgagctgctgaacttcctggccgagaacttcatcttcagctacatgggcctgaccctgttcaccttccagaaccacgtgttcaaccccaccttcgtggtgggcgccttcgtggccatcttcctgggcagagccgccaacatctaccccctgagcctgctgctgaacctgggcagaagaagcaagatcggcagcaacttccagcacatgatgatgttcgccggcctgagaggcgccatggccttcgccctggccatcagagacaccgccacctacgccagacagatgatgttcagcaccaccctgctgatcgtgttcttcaccgtgtgggtgttcggcggcggcaccaccgccatgctgagctgcctgcacatcagagtgggcgtggacagcgaccaggagcacctgggcgtgcccgagaacgagagaagaaccaccaaggccgagagcgcctggctgttcagaatgtggtacaacttcgaccacaactacctgaagcccctgctgacccacagcggcccccccctgaccaccaccctgcccgcctgctgcggccccatcgccagatgcctgaccagcccccaggcctacgagaaccaggagcagctgaaggacgacgacagcgacctgatcctgaacgacggcgacatcagcctgacctacggcgacagcaccgtgaacaccgagcccgccaccagcagcgcccccagaagattcatgggcaacagcagcgaggacgccctggacagagagctggccttcggcgaccacgagctggtgatcagaggcaccagactggtgctgcccatggacgacagcgagccccccctgaacctgctggacaacaccagacacggccccgcctag

SEQ ID NO: 100276 - DNA, 1950 bp, synthetic construct
  misc_feature 1..1950: note = Description of Artificial Sequence: Synthetic coding sequence
  source 1..1950: mol_type = other DNA
atggacgaggagatcgtgagcgagaagcaggccgaggagagccacagacaggacagcgccaacctgctgatcttcatcctgctgctgaccctgaccatcctgaccatctggctgttcaagcacagaagagccagattcctgcacgagaccggcctggccatgatctacggcctgctggtgggcctggtgctgagatacggcatccacgtgcccagcgacgtgaacaacgtgaccctgagctgcgaggtgcagagcagccccaccaccctgctggtgaacgtgagcggcaagttctacgagtacatgctgaagggcgagatcagcagccacgagctgaacaacgtgcaggacaacgagatgctgagaaaggtgaccttcgaccccgaggtgttcttcaacatcctgctgccccccatcatcttctacgccggctacagcctgaagagaagacacttcttcagaaacctgggcagcatcctggcctacgccttcctgggcaccgccatcagctgcttcgtgatcggcagcatcatgtacggctgcgtgaccctgatgaaggtgaccggccagctggccggcgacttctacttcaccgactgcctgctgttcggcgccatcgtgagcgccaccgaccccgtgaccgtgctggccatcttccacgagctgcaggtggacgtggagctgtacgccctgctgttcggcgagagcgtgctgaacgacgccgtggccatcgtgctgagcagcagcatcgtggcctaccagcccgccggcgacaacagccacaccttcgacgtgaccgccatgttcaagagcatcggcatcttcctgggcatcttcagcggcagcttcgccatgggcgccgccaccggcgtggtgaccgccctggtgaccaagttcaccaagctgagagagttccagctgctggagaccggcctgttcttcctgatgagctggagcaccttcctgctggccgaggcctggggcttcaccggcgtggtggccgtgctgttctgcggcatcacccaggcccactacacctacaacaacctgagcaccgagagccagcacagaaccaagcagctgttcgagctgctgaacttcctggccgagaacttcatcttcagctacatgggcctgaccctgttcaccttccagaaccacgtgttcaaccccaccttcgtggtgggcgccttcgtggccatcttcctgggcagagccgccaacatctaccccctgagcctgctgctgaacctgggcagaagaagcaagatcggcagcaacttccagcacatgatgatgttcgccggcctgagaggcgccatggccttcgccctggccatcagagacaccgccacctacgccagacagatgatgttcagcaccaccctgctgatcgtgttcttcaccgtgtgggtgttcggcggcggcaccaccgccatgctgagctgcctgcacatcagagtgggcgtggacagcgaccaggagcacctgggcgtgcccgagaacgagagaagaaccaccaaggccgagagcgcctggctgttcagaatgtggtacaacttcgaccacaactacctgaagcccctgctgacccacagcggcccccccctgaccaccaccctgcccgcctgctgcggccccatcgccagatgcctgaccagcccccaggcctacgagaaccaggagcagctgaaggacgacgacagcgacctgatcctgaacgacggcgacatcagcctgacctacggcgacagcaccgtgaacaccgagcccgccaccagcagcgcccccagaagattcatgggcaacagcagcgaggacgccctggacagagagctggccttcggcgaccacgagctggtgatcagaggcaccagactggtgctgcccatggacgacagcgagccccccctgaacctgctggacaacaccagacacggccccgcctag

SEQ ID NO: 100277 - DNA, 2178 bp, synthetic construct
  misc_feature 1..2178: note = Description of Artificial Sequence: Synthetic coding sequence
  source 1..2178: mol_type = other DNA
atggagcccggcgacgccgccagacccggcagcggcagagccaccggcgcccccccccccagactgctgctgctgcccctgctgctgggctggggcctgagagtggccgccgccgccagcgccagcagcagcggcgccgccgccgaggacagcagcgccatggaggagctggccaccgagaaggaggccgaggagagccacagacaggacagcgtgagcctgctgaccttcatcctgctgctgaccctgaccatcctgaccatctggctgttcaagcacagaagagtgagattcctgcacgagaccggcctggccatgatctacggcctgatcgtgggcgtgatcctgagatacggcacccccgccaccagcggcagagacaagagcctgagctgcacccaggaggacagagccttcagcaccctgctggtgaacgtgagcggcaagttcttcgagtacaccctgaagggcgagatcagccccggcaagatcaacagcgtggagcagaacgacatgctgagaaaggtgaccttcgaccccgaggtgttcttcaacatcctgctgccccccatcatcttccacgccggctacagcctgaagaagagacacttcttcagaaacctgggcagcatcctggcctacgccttcctgggcaccgccgtgagctgcttcatcatcggcaacctgatgtacggcgtggtgaagctgatgaagatcatgggccagctgagcgacaagttctactacaccgactgcctgttcttcggcgccatcatcagcgccaccgaccccgtgaccgtgctggccatcttcaacgagctgcacgccgacgtggacctgtacgccctgctgttcggcgagagcgtgctgaacgacgccgtggccatcgtgctgagcagcagcatcgtggcctaccagcccgccggcctgaacacccacgccttcgacgccgccgccttcttcaagagcgtgggcatcttcctgggcatcttcagcggcagcttcaccatgggcgccgtgaccggcgtgaacgccaacgtgaccaagttcaccaagctgcactgcttccccctgctggagaccgccctgttcttcctgatgagctggagcaccttcctgctggccgaggcctgcggcttcaccggcgtggtggccgtgctgttctgcggcatcacccaggcccactacacctacaacaacctgagcgtggagagcagaagcagaaccaagcagctgttcgaggtgctgcacttcctggccgagaacttcatcttcagctacatgggcctggccctgttcaccttccagaagcacgtgttcagccccatcttcatcatcggcgccttcgtggccatcttcctgggcagagccgcccacatctaccccctgagcttcttcctgaacctgggcagaagacacaagatcggctggaacttccagcacatgatgatgttcagcggcctgagaggcgccatggccttcgccctggccatcagagacaccgccagctacgccagacagatgatgttcaccaccaccctgctgatcgtgttcttcaccgtgtggatcatcggcggcggcaccacccccatgctgagctggctgaacatcagagtgggcgtggaggagcccagcgaggaggaccagaacgagcaccactggcagtacttcagagtgggcgtggaccccgaccaggaccccccccccaacaacgacagcttccaggtgctgcagggcgacggccccgacagcgccagaggcaacagaaccaagcaggagagcgcctggatcttcagactgtggtacagcttcgaccacaactacctgaagcccatcctgacccacagcggcccccccctgaccaccaccctgcccgcctggtgcggcctgctggccagatgcctgaccagcccccaggtgtacgacaaccaggagcccctgagagaggaggacagcgacttcatcctgaccgagggcgacctgaccctgacctacggcgacagcaccgtgaccgccaacggcagcagcagcagccacaccgccagcaccagcctggagggcagcagaagaaccaagagcagcagcgaggaggtgctggagagagacctgggcatgggcgaccagaaggtgagcagcagaggcaccagactggtgttccccctggaggacaacgcctag

SEQ ID NO: 100278 - DNA, 1746 bp, synthetic construct
  misc_feature 1..1746: note = Description of Artificial Sequence: Synthetic coding sequence
  source 1..1746: mol_type = other DNA
atgggcgagaagatggccgaggaggagagattccccaacaccacccacgagggcttcaacgtgaccctgcacaccaccctggtggtgaccaccaagctggtgctgcccacccccggcaagcccatcctgcccgtgcagaccggcgagcaggcccagcaggaggagcagagcagcggcatgaccatcttcttcagcctgctggtgctggccatctgcatcatcctggtgcacctgctgatcagatacagactgcacttcctgcccgagagcgtggccgtggtgagcctgggcatcctgatgggcgccgtgatcaagatcatcgagttcaagaagctggccaactggaaggaggaggagatgttcagacccaacatgttcttcctgctgctgctgccccccatcatcttcgagagcggctacagcctgcacaagggcaacttcttccagaacatcggcagcatcaccctgttcgccgtgttcggcaccgccatcagcgccttcgtggtgggcggcggcatctacttcctgggccaggccgacgtgatcagcaagctgaacatgaccgacagcttcgccttcggcagcctgatcagcgccgtggaccccgtggccaccatcgccatcttcaacgccctgcacgtggaccccgtgctgaacatgctggtgttcggcgagagcatcctgaacgacgccgtgagcatcgtgctgaccaacaccgccgagggcctgaccagaaagaacatgagcgacgtgagcggctggcagaccttcctgcaggccctggactacttcctgaagatgttcttcggcagcgccgccctgggcaccctgaccggcctgatcagcgccctggtgctgaagcacatcgacctgagaaagacccccagcctggagttcggcatgatgatcatcttcgcctacctgccctacggcctggccgagggcatcagcctgagcggcatcatggccatcctgttcagcggcatcgtgatgagccactacacccaccacaacctgagccccgtgacccagatcctgatgcagcagaccctgagaaccgtggccttcctgtgcgagacctgcgtgttcgccttcctgggcctgagcatcttcagcttcccccacaagttcgagatcagcttcgtgatctggtgcatcgtgctggtgctgttcggcagagccgtgaacatcttccccctgagctacctgctgaacttcttcagagaccacaagatcacccccaagatgatgttcatcatgtggttcagcggcctgagaggcgccatcccctacgccctgagcctgcacctggacctggagcccatggagaagagacagctgatcggcaccaccaccatcgtgatcgtgctgttcaccatcctgctgctgggcggcagcaccatgcccctgatcagactgatggacatcgaggacgccaaggcccacagaagaaacaagaaggacgtgaacctgagcaagaccgagaagatgggcaacaccgtggagagcgagcacctgagcgagctgaccgaggaggagtacgaggcccactacatcagaagacaggacctgaagggcttcgtgtggctggacgccaagtacctgaaccccttcttcaccagaagactgacccaggaggacctgcaccacggcagaatccagatgaagaccctgaccaacaagtggtacgaggaggtgagacagggccccagcggcagcgaggacgacgagcaggagctgctgtag

SEQ ID NO: 100279 - DNA, 1794 bp, synthetic construct
  misc_feature 1..1794: note = Description of Artificial Sequence: Synthetic coding sequence
  source 1..1794: mol_type = other DNA
atgggcgagaagatggccgaggaggagagattccccaacaccacccacgagggcttcaacgtgaccctgcacaccaccctggtggtgaccaccaagctggtgctgcccacccccggcaagcccatcctgcccgtgcagaccggcgagcaggcccagcaggaggagcagagcagcggcatgaccatcttcttcagcctgctggtgctggccatctgcatcatcctggtgcacctgctgatcagatacagactgcacttcctgcccgagagcgtggccgtggtgagcctgggcatcctgatgggcgccgtgatcaagatcatcgagttcaagaagctggccaactggaaggaggaggagatgttcagacccaacatgttcttcctgctgctgctgccccccatcatcttcgagagcggctacagcctgcacaagggcaacttcttccagaacatcggcagcatcaccctgttcgccgtgttcggcaccgccatcagcgccttcgtggtgggcggcggcatctacttcctgggccagggcttcttcttcgtgtgcgtgtgcgtgttcgtgtgcttcatcctgcaggccgacgtgatcagcaagctgaacatgaccgacagcttcgccttcggcagcctgatcagcgccgtggaccccgtggccaccatcgccatcttcaacgccctgcacgtggaccccgtgctgaacatgctggtgttcggcgagagcatcctgaacgacgccgtgagcatcgtgctgaccaacaccgccgagggcctgaccagaaagaacatgagcgacgtgagcggctggcagaccttcctgcaggccctggactacttcctgaagatgttcttcggcagcgccgccctgggcaccctgaccggcctgatcagcgccctggtgctgaagcacatcgacctgagaaagacccccagcctggagttcggcatgatgatcatcttcgcctacctgccctacggcctggccgagggcatcagcctgagcggcatcatggccatcctgttcagcggcatcgtgatgagccactacacccaccacaacctgagccccgtgacccagatcctgatgcagcagaccctgagaaccgtggccttcctgtgcgagacctgcgtgttcgccttcctgggcctgagcatcttcagcttcccccacaagttcgagatcagcttcgtgatctggtgcatcgtgctggtgctgttcggcagagccgtgaacatcttccccctgagctacctgctgaacttcttcagagaccacaagatcacccccaagatgatgttcatcatgtggttcagcggcctgagaggcgccatcccctacgccctgagcctgcacctggacctggagcccatggagaagagacagctgatcggcaccaccaccatcgtgatcgtgctgttcaccatcctgctgctgggcggcagcaccatgcccctgatcagactgatggacatcgaggacgccaaggcccacagaagaaacaagaaggacgtgaacctgagcaagaccgagaagatgggcaacaccgtggagagcgagcacctgagcgagctgaccgaggaggagtacgaggcccactacatcagaagacaggacctgaagggcttcgtgtggctggacgccaagtacctgaaccccttcttcaccagaagactgacccaggaggacctgcaccacggcagaatccagatgaagaccctgaccaacaagtggtacgaggaggtgagacagggccccagcggcagcgaggacgacgagcaggagctgctgtag

SEQ ID NO: 100280 - DNA, 1089 bp, synthetic construct
  misc_feature 1..1089: note = Description of Artificial Sequence: Synthetic coding sequence
  source 1..1089: mol_type = other DNA
atgctggtgttcggcgagagcatcctgaacgacgccgtgagcatcgtgctgaccaacaccgccgagggcctgaccagaaagaacatgagcgacgtgagcggctggcagaccttcctgcaggccctggactacttcctgaagatgttcttcggcagcgccgccctgggcaccctgaccggcctgatcagcgccctggtgctgaagcacatcgacctgagaaagacccccagcctggagttcggcatgatgatcatcttcgcctacctgccctacggcctggccgagggcatcagcctgagcggcatcatggccatcctgttcagcggcatcgtgatgagccactacacccaccacaacctgagccccgtgacccagatcctgatgcagcagaccctgagaaccgtggccttcctgtgcgagacctgcgtgttcgccttcctgggcctgagcatcttcagcttcccccacaagttcgagatcagcttcgtgatctggtgcatcgtgctggtgctgttcggcagagccgtgaacatcttccccctgagctacctgctgaacttcttcagagaccacaagatcacccccaagatgatgttcatcatgtggttcagcggcctgagaggcgccatcccctacgccctgagcctgcacctggacctggagcccatggagaagagacagctgatcggcaccaccaccatcgtgatcgtgctgttcaccatcctgctgctgggcggcagcaccatgcccctgatcagactgatggacatcgaggacgccaaggcccacagaagaaacaagaaggacgtgaacctgagcaagaccgagaagatgggcaacaccgtggagagcgagcacctgagcgagctgaccgaggaggagtacgaggcccactacatcagaagacaggacctgaagggcttcgtgtggctggacgccaagtacctgaaccccttcttcaccagaagactgacccaggaggacctgcaccacggcagaatccagatgaagaccctgaccaacaagtggtacgaggaggtgagacagggccccagcggcagcgaggacgacgagcaggagctgctgtag

SEQ ID NO: 100281 - DNA, 846 bp, synthetic construct
  misc_feature 1..846: note = Description of Artificial Sequence: Synthetic coding sequence
  source 1..846: mol_type = other DNA
atgatgatcatcttcgcctacctgccctacggcctggccgagggcatcagcctgagcggcatcatggccatcctgttcagcggcatcgtgatgagccactacacccaccacaacctgagccccgtgacccagatcctgatgcagcagaccctgagaaccgtggccttcctgtgcgagacctgcgtgttcgccttcctgggcctgagcatcttcagcttcccccacaagttcgagatcagcttcgtgatctggtgcatcgtgctggtgctgttcggcagagccgtgaacatcttccccctgagctacctgctgaacttcttcagagaccacaagatcacccccaagatgatgttcatcatgtggttcagcggcctgagaggcgccatcccctacgccctgagcctgcacctggacctggagcccatggagaagagacagctgatcggcaccaccaccatcgtgatcgtgctgttcaccatcctgctgctgggcggcagcaccatgcccctgatcagactgatggacatcgaggacgccaaggcccacagaagaaacaagaaggacgtgaacctgagcaagaccgagaagatgggcaacaccgtggagagcgagcacctgagcgagctgaccgaggaggagtacgaggcccactacatcagaagacaggacctgaagggcttcgtgtggctggacgccaagtacctgaaccccttcttcaccagaagactgacccaggaggacctgcaccacggcagaatccagatgaagaccctgaccaacaagtggtacgaggaggtgagacagggccccagcggcagcgaggacgacgagcaggagctgctgtag

SEQ ID NO: 100282 - DNA, 1938 bp, synthetic construct
  misc_feature 1..1938: note = Description of Artificial Sequence: Synthetic coding sequence
  source 1..1938: mol_type = other DNA
atggagagacagagcagagtgatgagcgagaaggacgagtaccagttccagcaccagggcgccgtggagctgctggtgttcaacttcctgctgatcctgaccatcctgaccatctggctgttcaagaaccacagattcagattcctgcacgagaccggcggcgccatggtgtacggcctgatcatgggcctgatcctgagatacgccaccgcccccaccgacatcgagagcggcaccgtgtacgactgcgtgaagctgaccttcagccccagcaccctgctggtgaacatcaccgaccaggtgtacgagtacaagtacaagagagagatcagccagcacaacatcaacccccaccagggcaacgccatcctggagaagatgaccttcgaccccgagatcttcttcaacgtgctgctgccccccatcatcttccacgccggctacagcctgaagaagagacacttcttccagaacctgggcagcatcctgacctacgccttcctgggcaccgccatcagctgcatcgtgatcggcctgatcatgtacggcttcgtgaaggccatgatccacgccggccagctgaagaacggcgacttccacttcaccgactgcctgttcttcggcagcctgatgagcgccaccgaccccgtgaccgtgctggccatcttccacgagctgcacgtggaccccgacctgtacaccctgctgttcggcgagagcgtgctgaacgacgccgtggccatcgtgctgacctacagcatcagcatctacagccccaaggagaaccccaacgccttcgacgccgccgccttcttccagagcgtgggcaacttcctgggcatcttcgccggcagcttcgccatgggcagcgcctacgccatcatcaccgccctgctgaccaagttcaccaagctgtgcgagttccccatgctggagaccggcctgttcttcctgctgagctggagcgccttcctgagcgccgaggccgccggcctgaccggcatcgtggccgtgctgttctgcggcgtgacccaggcccactacacctacaacaacctgagcagcgacagcaagatcagaaccaagcagctgttcgagttcatgaacttcctggccgagaacgtgatcttctgctacatgggcctggccctgttcaccttccagaaccacatcttcaacgccctgttcatcctgggcgccttcctggccatcttcgtggccagagcctgcaacatctaccccctgagcttcctgctgaacctgggcagaaagcagaagatcccctggaacttccagcacatgatgatgttcagcggcctgagaggcgccatcgccttcgccctggccatcagaaacaccgagagccagcccaagcagatgatgttcaccaccaccctgctgctggtgttcttcaccgtgtgggtgttcggcggcggcaccacccccatgctgacctggctgcagatcagagtgggcgtggacctggacgagaacctgaaggaggaccccagcagccagcaccaggaggccaacaacctggacaagaacatgaccaaggccgagagcgccagactgttcagaatgtggtacagcttcgaccacaagtacctgaagcccatcctgacccacagcggcccccccctgaccaccaccctgcccgagtggtgcggccccatcagcagactgctgaccagcccccaggcctacggcgagcagctgaaggaggacgacgtggagtgcatcgtgaaccaggacgagctggccatcaactaccaggagcaggccagcagcccctgcagcccccccgccagactgggcctggaccagaaggccagcccccagacccccggcaaggagaacatctacgagggcgacctgggcctgggcggctacgagctgaagctggagcagaccctgggccagagccagctgaactag

SEQ ID NO: 100283 - DNA, 978 bp, synthetic construct
  misc_feature 1..978: note = Description of Artificial Sequence: Synthetic coding sequence
  source 1..978: mol_type = other DNA
ctgagactgcagagcagctgggagcagatgaccttcgaccccgagatcttcttcaacgtgctgctgccccccatcatcttccacgccggctacagcctgaagaagagacacttcttccagaacctgggcagcatcctgacctacgccttcctgggcaccgccatcagctgcatcgtgatcggcctgatcatgtacggcttcgtgaaggccatgatccacgccggccagctgaagaacggcgacttccacttcaccgactgcctgttcttcggcagcctgatgagcgccaccgaccccgtgaccgtgctggccatcttccacgagctgcacgtggaccccgacctgtacaccctgctgttcggcgagagcgtgctgaacgacgccgtggccatcgtgctgacctacagcatcagcatctacagccccaaggagaaccccaacgccttcgacgccgccgccttcttccagagcgtgggcaacttcctgggcatcttcgccggcagcttcgccatgggcagcgcctacgccatcatcaccgccctgctgaccaagttcaccaagctgtgcgagttccccatgctggagaccggcctgttcttcctgctgagctggagcgccttcctgagcgccgaggccgccggcctgaccggcatcgtggccgtgctgttctgcggcgtgacccaggcccactacacctacaacaacctgagcagcgacagcaagatcagaaccaagcagctgttcgagttcatgaacttcctggccgagaacgtgatcttctgctacatgggcctggccctgttcaccttccagaaccacatcttcaacgccctgttcatcctgggcgccttcgtgagcatcttcctggccagagcccacaccgagctgaagaacctgctgttcttcctggccagcttcctgtgctacttcagccacagaagcaagggcctgcccatggccggctgcgccctgccctag

SEQ ID NO: 100284 - DNA, 3534 bp, synthetic construct
  misc_feature 1..3534: note = Description of Artificial Sequence: Synthetic coding sequence
  source 1..3534: mol_type = other DNA
atggccggcatcttcaaggagttcttcttcagcaccgaggacctgcccgaggtgatcctgaccctgagcctgatcagcagcatcggcgccttcctgaacagacacctggaggacttccccatccccgtgcccgtgatcctgttcctgctgggctgcagcttcgaggtgctgagcttcaccagcagccaggtgcagagatacgccaacgccatccagtggatgagccccgacctgttcttcagaatcttcacccccgtggtgttcttcaccaccgccttcgacatggacacctacatgctgcagaagctgttctggcagatcctgctgatcagcatccccggcttcctggtgaactacatcctggtgctgtggcacctggccagcgtgaaccagctgctgctgaagcccacccagtggctgctgttcagcgccatcctggtgagcagcgaccccatgctgaccgccgccgccatcagagacctgggcctgagcagaagcctgatcagcctgatcaacggcgagagcctgatgaccagcgtgatcagcctgatcaccttcaccagcatcatggacttcgaccagagactgcagagcaagagaaaccacaccctggccgaggagatcgtgggcggcatctgcagctacatcatcgccagcttcctgttcggcatcctgagcagcaagctgatccagttctggatgagcaccgtgttcggcgacgacgtgaaccacatcagcctgatcttcagcatcctgtacctgatcttctacatctgcgagctggtgggcatgagcggcatcttcaccctggccatcgtgggcctgctgctgaacagcaccagcttcaaggccgccatcgaggagaccctgctgctggagttctggaccttcctgagcagaatcgccttcctgatggtgttcaccttcttcggcctgctgatccccgcccacacctacctgtacatcgagttcgtggacatctactacagcctgaacatctacctgaccctgatcgtgctgagattcctgaccctgctgctgatcagccccgtgctgagcagagtgggccacgagttcagctggagatggatcttcatcatggtgtgcagcgagatgaagggcatgcccaacatcaacatggccctgctgctggcctacagcgacctgtacttcggcagcgacaaggagaagagccagatcctgttccacggcgtgctggtgtgcctgatcaccctggtggtgaacagattcatcctgcccgtggccgtgaccatcctgggcctgagagacgccaccagcaccaagtacaagagcgtgtgctgcaccttccagcacttccaggagctgaccaagagcgccgccagcgccctgaagttcgacaaggacctggccaacgccgactggaacatgatcgagaaggccatcaccctggagaacccctacatgctgaacgaggaggagaccaccgagcaccagaaggtgaagtgcccccactgcaacaaggagatcgacgagatcttcaacaccgaggccatggagctggccaacagaagactgctgagcgcccagatcgccagctaccagagacagtacagaaacgagatcctgagccagagcgccgtgcaggtgctggtgggcgccgccgagagcttcggcgagaagaagggcaagtgcatgagcctggacaccatcaagaactacagcgagagccagaagaccgtgaccttcgccagaaagctgctgctgaactgggtgtacaacaccagaaaggagaaggagggccccagcaagtacttcttcttcagaatctgccacaccatcgtgttcaccgaggagttcgagcacgtgggctacctggtgatcctgatgaacatcttccccttcatcatcagctggatcagccagctgaacgtgatctaccacagcgagctgaagcacaccaactactgcttcctgaccctgtacatcctggaggccctgctgaagatcgccgccatgagaaaggacttcttcagccacgcctggaacatcttcgagctggccatcaccctgatcggcatcctgcacgtgatcctgatcgagatcgacaccatcaagtacatcttcaacgagaccgaggtgatcgtgttcatcaaggtggtgcagttcttcagaatcctgagaatcttcaagctgatcgcccccaagctgctgcagatcatcgacaagagaatgagccaccagaagaccttctggtacggcatcctgaagggctacgtgcagggcgaggccgacatcatgaccatcatcgaccagatcaccagcagcaagcagatcaagcagatgctgctgaagcaggtgatcagaaacatggagcacgccatcaaggagctgggctacctggagtacgaccaccccgagatcgccgtgaccgtgaagaccaaggaggagatcaacgtgatgctgaacatggccaccgagatcctgaaggccttcggcctgaagggcatcatcagcaagaccgagggcgccggcatcaacaagctgatcatggccaagaagaaggaggtgctggacagccagagcatcatcagacccctgaccgtggaggaggtgctgtaccacatcccctggctggacaagaacaaggactacatcaacttcatccaggagaaggccaaggtggtgaccttcgactgcggcaacgacatcttcgaggagggcgacgagcccaagggcatctacatcatcatcagcggcatggtgaagctggagaagagcaagcccggcctgggcatcgaccagatggtggagagcaaggagaaggacttccccatcatcgacaccgactacatgctgagcggcgagatcatcggcgagatcaactgcctgaccaacgagcccatgaagtacagcgccacctgcaagaccgtggtggagacctgcttcatccccaagacccacctgtacgacgccttcgagcagtgcagccccctgatcaagcagaagatgtggctgaagctgggcctggccatcaccgccagaaagatcagagagcacctgagctacgaggactggaactacaacatgcagctgaagctgagcaacatctacgtggtggacatccccatgagcaccaagaccgacatctacgacgagaacctgatctacgtgatcctgatccacggcgccgtggaggactgcctgctgagaaagacctacagagcccccttcctgatccccatcacctgccaccagatccagagcatcgaggacttcaccaaggtggtgatcatccagacccccatcaacatgaagaccttcagaagaaacatcagaaagttcgtgcccaagcacaagagctacctgacccccggcctgatcggcagcgtgggcaccctggaggagggcatccaggaggagagaaacgtgaaggaggacggcgcccacagcgccgccaccgccagaagcccccagccctgcagcctgctgggcaccaagttcaactgcaaggagagccccagaatcaacctgagaaaggtgagaaaggagtag

SEQ ID NO: 100285 - DNA, 3390 bp, synthetic construct
  misc_feature 1..3390: note = Description of Artificial Sequence: Synthetic coding sequence
  source 1..3390: mol_type = other DNA
atggccggcatcttcaaggagttcttcttcagcaccgaggacctgcccgaggtgatcctgaccctgagcctgatcagcagcatcggcgccttcctgaacagacacctggaggacttccccatccccgtgcccgtgatcctgttcctgctgggctgcagcttcgaggtgctgagcttcaccagcagccaggtgcagagatacgccaacgccatccagtggatgagccccgacctgttcttcagaatcttcacccccgtggtgttcttcaccaccgccttcgacatggacacctacatgctgcagaagctgttctggcagatcctgctgatcagcatccccggcttcctggtgaactacatcctggtgctgtggcacctggccagcgtgaaccagctgctgctgaagcccacccagtggctgctgttcagcgccatcctggtgagcagcgaccccatgctgaccgccgccgccatcagagacctgggcctgagcagaagcctgatcagcctgatcaacggcgagagcctgatgaccagcgtgatcagcctgatcaccttcaccagcatcatggacttcgaccagagactgcagagcaagagaaaccacaccctggccgaggagatcgtgggcggcatctgcagctacatcatcgccagcttcctgttcggcatcctgagcagcaagctgatccagttctggatgagcaccgtgttcggcgacgacgtgaaccacatcagcctgatcttcagcatcctgtacctgatcttctacatctgcgagctggtgggcatgagcggcatcttcaccctggccatcgtgggcctgctgctgaacagcaccagcttcaaggccgccatcgaggagaccctgctgctggagttcctgaccctgctgctgatcagccccgtgctgagcagagtgggccacgagttcagctggagatggatcttcatcatggtgtgcagcgagatgaagggcatgcccaacatcaacatggccctgctgctggcctacagcgacctgtacttcggcagcgacaaggagaagagccagatcctgttccacggcgtgctggtgtgcctgatcaccctggtggtgaacagattcatcctgcccgtggccgtgaccatcctgggcctgagagacgccaccagcaccaagtacaagagcgtgtgctgcaccttccagcacttccaggagctgaccaagagcgccgccagcgccctgaagttcgacaaggacctggccaacgccgactggaacatgatcgagaaggccatcaccctggagaacccctacatgctgaacgaggaggagaccaccgagcaccagaaggtgaagtgcccccactgcaacaaggagatcgacgagatcttcaacaccgaggccatggagctggccaacagaagactgctgagcgcccagatcgccagctaccagagacagtacagaaacgagatcctgagccagagcgccgtgcaggtgctggtgggcgccgccgagagcttcggcgagaagaagggcaagtgcatgagcctggacaccatcaagaactacagcgagagccagaagaccgtgaccttcgccagaaagctgctgctgaactgggtgtacaacaccagaaaggagaaggagggccccagcaagtacttcttcttcagaatctgccacaccatcgtgttcaccgaggagttcgagcacgtgggctacctggtgatcctgatgaacatcttccccttcatcatcagctggatcagccagctgaacgtgatctaccacagcgagctgaagcacaccaactactgcttcctgaccctgtacatcctggaggccctgctgaagatcgccgccatgagaaaggacttcttcagccacgcctggaacatcttcgagctggccatcaccctgatcggcatcctgcacgtgatcctgatcgagatcgacaccatcaagtacatcttcaacgagaccgaggtgatcgtgttcatcaaggtggtgcagttcttcagaatcctgagaatcttcaagctgatcgcccccaagctgctgcagatcatcgacaagagaatgagccaccagaagaccttctggtacggcatcctgaagggctacgtgcagggcgaggccgacatcatgaccatcatcgaccagatcaccagcagcaagcagatcaagcagatgctgctgaagcaggtgatcagaaacatggagcacgccatcaaggagctgggctacctggagtacgaccaccccgagatcgccgtgaccgtgaagaccaaggaggagatcaacgtgatgctgaacatggccaccgagatcctgaaggccttcggcctgaagggcatcatcagcaagaccgagggcgccggcatcaacaagctgatcatggccaagaagaaggaggtgctggacagccagagcatcatcagacccctgaccgtggaggaggtgctgtaccacatcccctggctggacaagaacaaggactacatcaacttcatccaggagaaggccaaggtggtgaccttcgactgcggcaacgacatcttcgaggagggcgacgagcccaagggcatctacatcatcatcagcggcatggtgaagctggagaagagcaagcccggcctgggcatcgaccagatggtggagagcaaggagaaggacttccccatcatcgacaccgactacatgctgagcggcgagatcatcggcgagatcaactgcctgaccaacgagcccatgaagtacagcgccacctgcaagaccgtggtggagacctgcttcatccccaagacccacctgtacgacgccttcgagcagtgcagccccctgatcaagcagaagatgtggctgaagctgggcctggccatcaccgccagaaagatcagagagcacctgagctacgaggactggaactacaacatgcagctgaagctgagcaacatctacgtggtggacatccccatgagcaccaagaccgacatctacgacgagaacctgatctacgtgatcctgatccacggcgccgtggaggactgcctgctgagaaagacctacagagcccccttcctgatccccatcacctgccaccagatccagagcatcgaggacttcaccaaggtggtgatcatccagacccccatcaacatgaagaccttcagaagaaacatcagaaagttcgtgcccaagcacaagagctacctgacccccggcctgatcggcagcgtgggcaccctggaggagggcatccaggaggagagaaacgtgaaggaggacggcgcccacagcgccgccaccgccagaagcccccagccctgcagcctgctgggcaccaagttcaactgcaaggagagccccagaatcaacctgagaaaggtgagaaaggagtag

SEQ ID NO: 100286 - DNA, 2079 bp, synthetic construct
  misc_feature 1..2079: note = Description of Artificial Sequence: Synthetic coding sequence
  source 1..2079: mol_type = other DNA
atgcagggcaagaagcccggcggcagcagcggcggcggcagaagcggcgagctgcagggcgacgaggcccagagaaacaagaagaagaagaagaaggtgagctgcttcagcaacatcaagatcttcctggtgagcgagtgcgccctgatgctggcccagggcaccgtgggcgcctacctggtgagcgtgctgaccaccctggagagaagattcaacctgcagagcgccgacgtgggcgtgatcgccagcagcttcgagatcggcaacctggccctgatcctgttcgtgagctacttcggcgccagaggccacagacccagactgatcggctgcggcggcatcgtgatggccctgggcgccctgctgagcgccctgcccgagttcctgacccaccagtacaagtacgaggccggcgagatcagatggggcgccgagggcagagacgtgtgcgccgccaacggcagcggcggcgacgagggccccgaccccgacctgatctgcagaaacagaaccgccaccaacatgatgtacctgctgctgatcggcgcccaggtgctgctgggcatcggcgccacccccgtgcagcccctgggcgtgagctacatcgacgaccacgtgagaagaaaggacagcagcctgtacatcggcatcctgttcaccatgctggtgttcggccccgcctgcggcttcatcctgggcagcttctgcaccaagatctacgtggacgccgtgttcatcgacaccagcaacctggacatcacccccgacgaccccagatggatcggcgcctggtggggcggcttcctgctgtgcggcgccctgctgttcttcagcagcctgctgatgttcggcttcccccagagcctgcccccccacagcgagcccgccatggagagcgagcaggccatgctgagcgagagagagtacgagagacccaagcccagcaacggcgtgctgagacaccccctggagcccgacagcagcgccagctgcttccagcagctgagagtgatccccaaggtgaccaagcacctgctgagcaaccccgtgttcacctgcatcatcctggccgcctgcatggagatcgccgtggtggccggcttcgccgccttcctgggcaagtacctggagcagcagttcaacctgaccaccagcagcgccaaccagctgctgggcatgaccgccatcccctgcgcctgcctgggcatcttcctgggcggcctgctggtgaagaagctgagcctgagcgccctgggcgccatcagaatggccatgctggtgaacctggtgagcaccgcctgctacgtgagcttcctgttcctgggctgcgacaccggccccgtggccggcgtgaccgtgccctacggcaacagcaccgcccccggcagcgccctggacccctacagcccctgcaacaacaactgcgagtgccagaccgacagcttcacccccgtgtgcggcgccgacggcatcacctacctgagcgcctgcttcgccggctgcaacagcaccaacctgaccggctgcgcctgcctgaccaccgtgcccgccgagaacgccaccgtggtgcccggcaagtgccccagccccggctgccaggaggccttcctgaccttcctgtgcgtgatgtgcatctgcagcctgatcggcgccatggcccagacccccagcgtgatcatcctgatcagaaccgtgagccccgagctgaagagctacgccctgggcgtgctgttcctgctgctgagactgctgggcttcatccccccccccctgatcttcggcgccggcatcgacagcacctgcctgttctggagcaccttctgcggcgagcagggcgcctgcgtgctgtacgacaacgtggtgtacagatacctgtacgtgagcatcgccatcgccctgaagagcttcgccttcatcctgtacaccaccacctggcagtgcctgagaaagaactacaagagatacatcaagaaccacgagggcggcctgagcaccagcaccgagtaccaggacatcgagaccgagaagacctgccccgagagccacagccccagcgaggacagcttcgtgagaagctag

SEQ ID NO: 100287 - DNA, 2076 bp, synthetic construct
  misc_feature 1..2076: note = Description of Artificial Sequence: Synthetic coding sequence
  source 1..2076: mol_type = other DNA
atggaccagaaccagcacctgaacaagaccgccgaggcccagcccagcgagaacaagaagaccagatactgcaacggcctgaagatgttcctggccgccctgagcctgagcttcatcgccaagaccctgggcgccatcatcatgaagagcagcatcatccacatcgagagaagattcgagatcagcagcagcctggtgggcttcatcgacggcagcttcgagatcggcaacctgctggtgatcgtgttcgtgagctacttcggcagcaagctgcacagacccaagctgatcggcatcggctgcttcatcatgggcatcggcggcgtgctgaccgccctgccccacttcttcatgggctactacagatacagcaaggagaccaacatcaacagcagcgagaacagcaccagcaccctgagcacctgcctgatcaaccagatcctgagcctgaacagagccagccccgagatcgtgggcaagggctgcctgaaggagagcggcagctacatgtggatctacgtgttcatgggcaacatgctgagaggcatcggcgagacccccatcgtgcccctgggcctgagctacatcgacgacttcgccaaggagggccacagcagcctgtacctgggcatcctgaacgccatcgccatgatcggccccatcatcggcttcaccctgggcagcctgttcagcaagatgtacgtggacatcggctacgtggacctgagcaccatcagaatcacccccaccgacagcagatgggtgggcgcctggtggctgaacttcctggtgagcggcctgttcagcatcatcagcagcatccccttcttcttcctgccccagacccccaacaagccccagaaggagagaaaggccagcctgagcctgcacgtgctggagaccaacgacgagaaggaccagaccgccaacctgaccaaccagggcaagaacatcaccaagaacgtgaccggcttcttccagagcttcaagagcatcctgaccaaccccctgtacgtgatgttcgtgctgctgaccctgctgcaggtgagcagctacatcggcgccttcacctacgtgttcaagtacgtggagcagcagtacggccagcccagcagcaaggccaacatcctgctgggcgtgatcaccatccccatcttcgccagcggcatgttcctgggcggctacatcatcaagaagttcaagctgaacaccgtgggcatcgccaagttcagctgcttcaccgccgtgatgagcctgagcttctacctgctgtacttcttcatcctgtgcgagaacaagagcgtggccggcctgaccatgacctacgacggcaacaaccccgtgaccagccacagagacgtgcccctgagctactgcaacagcgactgcaactgcgacgagagccagtgggagcccgtgtgcggcaacaacggcatcacctacatcagcccctgcctggccggctgcaagagcagcagcggcaacaagaagcccatcgtgttctacaactgcagctgcctggaggtgaccggcctgcagaacagaaactacagcgcccacctgggcgagtgccccagagacgacgcctgcaccagaaagttctacttcttcgtggccatccaggtgctgaacctgttcttcagcgccctgggcggcaccagccacgtgatgctgatcgtgaagatcgtgcagcccgagctgaagagcctggccctgggcttccacagcatggtgatcagagccctgggcggcatcctggcccccatctacttcggcgccctgatcgacaccacctgcatcaagtggagcaccaacaactgcggcaccagaggcagctgcagaacctacaacagcaccagcttcagcagagtgtacctgggcctgagcagcatgctgagagtgagcagcctggtgctgtacatcatcctgatctacgccatgaagaagaagtaccaggagaaggacatcaacgccagcgagaacggcagcgtgatggacgaggccaacctggagagcctgaacaagaacaagcacttcgtgcccagcgccggcgccgacagcgagacccactgctag

SEQ ID NO: 100288 - DNA, 2109 bp, synthetic construct
  misc_feature 1..2109: note = Description of Artificial Sequence: Synthetic coding sequence
  source 1..2109: mol_type = other DNA
atggaccagcaccagcacctgaacaagaccgccgagagcgccagcagcgagaagaagaagaccagaagatgcaacggcttcaagatgttcctggccgccctgagcttcagctacatcgccaaggccctgggcggcatcatcatgaagatcagcatcacccagatcgagagaagattcgacatcagcagcagcctggccggcctgatcgacggcagcttcgagatcggcaacctgctggtgatcgtgttcgtgagctacttcggcagcaagctgcacagacccaagctgatcggcatcggctgcctgctgatgggcaccggcagcatcctgaccagcctgccccacttcttcatgggctactacagatacagcaaggagacccacatcaaccccagcgagaacagcaccagcagcctgagcacctgcctgatcaaccagaccctgagcttcaacggcaccagccccgagatcgtggagaaggactgcgtgaaggagagcggcagccacatgtggatctacgtgttcatgggcaacatgctgagaggcatcggcgagacccccatcgtgcccctgggcatcagctacatcgacgacttcgccaaggagggccacagcagcctgtacctgggcagcctgaacgccatcggcatgatcggccccgtgatcggcttcgccctgggcagcctgttcgccaagatgtacgtggacatcggctacgtggacctgagcaccatcagaatcacccccaaggacagcagatgggtgggcgcctggtggctgggcttcctggtgagcggcctgttcagcatcatcagcagcatccccttcttcttcctgcccaagaaccccaacaagccccagaaggagagaaagatcagcctgagcctgcacgtgctgaagaccaacgacgacagaaaccagaccgccaacctgaccaaccagggcaagaacgtgaccaagaacgtgaccggcttcttccagagcctgaagagcatcctgaccaaccccctgtacgtgatcttcctgctgctgaccctgctgcaggtgagcagcttcatcggcagcttcacctacgtgttcaagtacatggagcagcagtacggccagagcgccagccacgccaacttcctgctgggcatcatcaccatccccaccgtggccaccggcatgttcctgggcggcttcatcatcaagaagttcaagctgagcctggtgggcatcgccaagttcagcttcctgaccagcatgatcagcttcctgttccagctgctgtacttccccctgatctgcgagagcaagagcgtggccggcctgaccctgacctacgacggcaacaacagcgtggccagccacgtggacgtgcccctgagctactgcaacagcgagtgcaactgcgacgagagccagtgggagcccgtgtgcggcaacaacggcatcacctacctgagcccctgcctggccggctgcaagagcagcagcggcatcaagaagcacaccgtgttctacaactgcagctgcgtggaggtgaccggcctgcagaacagaaactacagcgcccacctgggcgagtgccccagagacaacacctgcaccagaaagttcttcatctacgtggccatccaggtgatcaacagcctgttcagcgccaccggcggcaccaccttcatcctgctgaccgtgaagatcgtgcagcccgagctgaaggccctggccatgggcttccagagcatggtgatcagaaccctgggcggcatcctggcccccatctacttcggcgccctgatcgacaagacctgcatgaagtggagcaccaacagctgcggcgcccagggcgcctgcagaatctacaacagcgtgttcttcggcagagtgtacctgggcctgagcatcgccctgagattccccgccctggtgctgtacatcgtgttcatcttcgccatgaagaagaagttccagggcaaggacaccaaggccagcgacaacgagagaaaggtgatggacgaggccaacctggagttcctgaacaacggcgagcacttcgtgcccagcgccggcaccgacagcaagacctgcaacctggacatgcaggacaacgccgccgccaactag

SEQ ID NO: 100289 - DNA, 2109 bp, synthetic construct; identical to SEQ ID NO: 100288
  misc_feature 1..2109: note = Description of Artificial Sequence: Synthetic coding sequence
  source 1..2109: mol_type = other DNA

SEQ ID NO: 100290 - DNA, 2247 bp, synthetic construct
  misc_feature 1..2247: note = Description of Artificial Sequence: Synthetic coding sequence
  source 1..2247: mol_type = other DNA
atggaccagcaccagcacctgaacaagaccgccgagagcgccagcagcgagaagaagaagaccagaagatgcaacggcttcaagatgttcctggccgccctgagcttcagctacatcgccaaggccctgggcggcatcatcatgaagatcagcatcacccagatcgagagaagattcgacatcagcagcagcctggccggcctgatcgacggcagcttcgagatcggcaacctgctggtgatcgtgttcgtgagctacttcggcagcaagctgcacagacccaagctgatcggcatcggctgcctgctgatgggcaccggcagcatcctgaccagcctgccccacttcttcatgggctactacagatacagcaaggagacccacatcaaccccagcgagaacagcaccagcagcctgagcacctgcctgatcaaccagaccctgagcttcaacggcaccagccccgagatcgtggagaaggactgcgtgaaggagagcggcagccacatgtggatctacgtgttcatgggcaacatgctgagaggcatcggcgagacccccatcgtgcccctgggcatcagctacatcgacgacttcgccaaggagggccacagcagcctgtacctgggcagcctgaacgccatcggcatgatcggccccgtgatcggcttcgccctgggcagcctgttcgccaagatgtacgtggacatcggctacgtggacctgagcaccatcagaatcacccccaaggacagcagatgggtgggcgcctggtggctgggcttcctggtgagcggcctgttcagcatcatcagcagcatccccttcttcttcctgcccaagaaccccaacaagccccagaaggagagaaagatcagcctgagcctgcacgtgctgaagaccaacgacgacagaaaccagaccgccaacctgaccaaccagggcaagaacgtgaccaagaacgtgaccggcttcttccagagcctgaagagcatcctgaccaaccccctgtacgtgatcttcctgctgctgaccctgctgcaggtgagcagcttcatcggcagcttcacctacgtgttcaagtacatggagcagcagtacggccagagcgccagccacgccaacttcctgctgggcatcatcaccatccccaccgtggccaccggcatgttcctgggcggcttcatcatcaagaagttcaagctgagcctggtgggcatcgccaagttcagcttcctgaccagcatgatcagcttcctgttccagctgctgtacttccccctgatctgcgagagcaagagcgtggccggcctgaccctgacctacgacggcaacaacagcgtggccagccacgtggacgtgcccctgagctactgcaacagcgagtgcaactgcgacgagagccagtgggagcccgtgtgcggcaacaacggcatcacctacctgagcccctgcctggccggctgcaagagcagcagcggcatcaagaagcacaccgtgttctacaactgcagctgcgtggaggtgaccggcctgcagaacagaaactacagcgcccacctgggcgagtgccccagagacaacacctgcaccagaaagttcttcatctacgtggccatccaggtgatcaacagcctgttcagcgccaccggcggcaccaccttcatcctgctgaccgtgaagatcgtgcagcccgagctgaaggccctggccatgggcttccagagcatggtgatcagaaccctgggcggcatcctggcccccatctacttcggcgccctgatcgacaagacctgcatgaagtggagcaccaacagctgcggcgcccagggcgcctgcagaatctacaacagcgtgttcttcggcatcgtgcagcccgagctgaaggccctggccatcggcttccacagcatgatcatgagaagcctgggcggcatcctggtgcccatctacttcggcgccctgatcgacaccacctgcatgaagtggagcaccaacagctgcggcgccagaggcgcctgcagaatctacaacagcacctacctgggcagagccttcttcggcctgaaggtggccctgatcttccccgtgctggtgctgctgaccgtgttcatcttcgtggtgagaaagaagagccacggcaaggacaccaaggtgctggagaacgagagacaggtgatggacgaggccaacctggagttcctgaacgacagcgagcacttcgtgcccagcgccgaggagcagtag

SEQ ID NO: 100291 - DNA, 2139 bp, synthetic construct
  misc_feature 1..2139: note = Description of Artificial Sequence: Synthetic coding sequence
  source 1..2139: mol_type = other DNA
atggacaccagcagcaaggagaacatccagctgttctgcaagaccagcgtgcagcccgtgggcagacccagcttcaagaccgagtaccccagcagcgaggagaagcagccctgctgcggcgagctgaaggtgttcctgtgcgccctgagcttcgtgtacttcgccaaggccctggccgagggctacctgaagagcaccatcacccagatcgagagaagattcgacatccccagcagcctggtgggcgtgatcgacggcagcttcgagatcggcaacctgctggtgatcaccttcgtgagctacttcggcgccaagctgcacagacccaagatcatcggcgccggctgcgtgatcatgggcgtgggcaccctgctgatcgccatgccccagttcttcatggagcagtacaagtacgagagatacagccccagcagcaacagcaccctgagcatcagcccctgcctgctggagagcagcagccagctgcccgtgagcgtgatggagaagagcaagagcaagatcagcaacgagtgcgaggtggacaccagcagcagcatgtggatctacgtgttcctgggcaacctgctgagaggcatcggcgagacccccatccagcccctgggcatcgcctacctggacgacttcgccagcgaggacaacgccgccttctacatcggctgcgtgcagaccgtggccatcatcggccccatcttcggcttcctgctgggcagcctgtgcgccaagctgtacgtggacatcggcttcgtgaacctggaccacatcaccatcacccccaaggacccccagtgggtgggcgcctggtggctgggctacctgatcgccggcatcatcagcctgctggccgccgtgcccttctggtacctgcccaagagcctgcccagaagccagagcagagaggacagcaacagcagcagcgagaagagcaagttcatcatcgacgaccacaccgactaccagaccccccagggcgagaacgccaagatcatggagatggccagagacttcctgcccagcctgaagaacctgttcggcaaccccgtgtacttcctgtacctgtgcaccagcaccgtgcagttcaacagcctgttcggcatggtgacctacaagcccaagtacatcgagcagcagtacggccagagcagcagcagagccaacttcgtgatcggcctgatcaacatccccgccgtggccctgggcatcttcagcggcggcatcgtgatgaagaagttcagaatcagcgtgtgcggcgccgccaagctgtacctgggcagcagcgtgttcggctacctgctgttcctgagcctgttcgccctgggctgcgagaacagcgacgtggccggcctgaccgtgagctaccagggcaccaagcccgtgagctaccacgagagagccctgttcagcgactgcaacagcagatgcaagtgcagcgagaccaagtgggagcccatgtgcggcgagaacggcatcacctacgtgagcgcctgcctggccggctgccagaccagcaacagaagcggcaagaacatcatcttctacaactgcacctgcgtgggcatcgccgccagcaagagcggcaacagcagcggcatcgtgggcagatgccagaaggacaacggctgcccccagatgttcctgtacttcctggtgatcagcgtgatcaccagctacaccctgagcctgggcggcatccccggctacatcctgctgctgagatgcatcaagccccagctgaagagcttcgccctgggcatctacaccctggccatcagagtgctggccggcatccccgcccccgtgtacttcggcgtgctgatcgacaccagctgcctgaagtggggcttcaagagatgcggcagcagaggcagctgcagactgtacgacagcaacgtgttcagacacatctacctgggcctgaccgtgatcctgggcaccgtgagcatcctgctgagcatcgccgtgctgttcatcctgaagaagaactacgtgagcaagcacagaagcttcatcaccaagagagagagaaccatggtgagcaccagattccagaaggagaactacaccaccagcgaccacctgctgcagcccaactactggcccggcaaggagacccagctgtag

SEQ ID NO: 100292 - DNA, 2193 bp, synthetic construct
  misc_feature 1..2193: note = Description of Artificial Sequence: Synthetic coding sequence
  source 1..2193: mol_type = other DNA
atggacaccagcagcaaggagaacatccagctgttctgcaagaccagcgtgcagcccgtgggcagacccagcttcaagaccgagtaccccagcagcgaggagaagcagccctgctgcggcgagctgaaggtgttcctgtgcgccctgagcttcgtgtacttcgccaaggccctggccgagggctacctgaagagcaccatcacccagatcgagagaagattcgacatccccagcagcctggtgggcgtgatcgacggcagcttcgagatcggcaacctgctggtgatcaccttcgtgagctacttcggcgccaagctgcacagacccaagatcatcggcgccggctgcgtgatcatgggcgtgggcaccctgctgatcgccatgccccagttcttcatggagcagtacaagtacgagagatacagccccagcagcaacagcaccctgagcatcagcccctgcctgctggagagcagcagccagctgcccgtgagcgtgatggagaagagcaagagcaagatcagcaacgagtgcgaggtggacaccagcagcagcatgtggatctacgtgttcctgggcaacctgctgagaggcatcggcgagacccccatccagcccctgggcatcgcctacctggacgacttcgccagcgaggacaacgccgccttctacatcggctgcgtgcagaccgtggccatcatcggccccatcttcggcttcctgctgggcagcctgtgcgccaagctgtacgtggacatcggcttcgtgaacctggaccacatcaccatcacccccaaggacccccagtgggtgggcgcctggtggctgggctacctgatcgccggcatcatcagcctgctggccgccgtgcccttctggtacctgcccaagagcctgcccagaagccagagcagagaggacagcaacagcagcagcgagaagagcaagttcatcatcgacgaccacaccgactaccagaccccccagggcgagaacgccaagatcatggagatggccagagacttcctgcccagcctgaagaacctgttcggcaaccccgtgtacttcctgtacctgtgcaccagcaccgtgcagttcaacagcctgttcggcatggtgacctacaagcccaagtacatcgagcagcagtacggccagagcagcagcagagccaacttcgtgatcggcctgatcaacatccccgccgtggccctgggcatcttcagcggcggcatcgtgatgaagaagttcagaatcagcgtgtgcggcgccgccaagctgtacctgggcagcagcgtgttcggctacctgctgttcctgagcctgttcgccctgggctgcgagaacagcgacgtggccggcctgaccgtgagctaccagggcaccaagcccgtgagctaccacgagagagccctgttcagcgactgcaacagcagatgcaagtgcagcgagaccaagtgggagcccatgtgcggcgagaacggcatcacctacgtgagcgcctgcctggccggctgccagaccagcaacagaagcggcaagaacatcatcttctacaactgcacctgcgtgggcatcgccgccagcaagagcggcaacagcagcggcatcgtgggcagatgccagaaggacaacggctgcccccagatgttcctgtacttcctggtgatcagcgtgatcaccagctacaccctgagcctgggcggcatccccggctacatcctgctgctgagatgcatcaagccccagctgaagagcttcgccctgggcatctacaccctggccatcagagtgctggccggcatccccgcccccgtgtacttcggcgtgctgatcgacaccagctgcctgaagtggggcttcaagagatgcggcagcagaggcagctgcagactgtacgacagcaacgtgttcagataccagatcaagagcatccccgccagccactgctacagcatccccgacctgcacaacgccaccgacaccaacaagttcagctgccacttcaccgcctgcaagacctacatcagcggcaccaactgcgacaccggccacagcgtgaacagccccaagcactgcagcaccttccacttcaaggagaagctgtgcttcaagacccagaagttctacaaccaggagagaaagaacaacggcgtgtacaagatccccaagggcaagctgcactacaagtag

SEQ ID NO: 100293 - DNA, 1992 bp, synthetic construct
  misc_feature 1..1992: note = Description of Artificial Sequence: Synthetic coding sequence
  source 1..1992: mol_type = other DNA
atggacaccagcagcaaggagaacatccagctgttctgcaagaccagcgtgcagcccgtgggcagacccagcttcaagaccgagtaccccagcagcgaggagaagcagccctgctgcggcgagctgaaggtgttcctgtgcgccctgagcttcgtgtacttcgccaaggccctggccgagggctacctgaagagcaccatcacccagatcgagagaagattcgacatccccagcagcctggtgggcgtgatcgacggcagcttcgagatcggcaacctgctggtgatcaccttcgtgagctacttcggcgccaagctgcacagacccaagatcatcggcgccggctgcgtgatcatgggcgtgggcaccctgctgatcgccatgccccagttcttcatggagcagtacaagtacgagagatacagccccagcagcaacagcaccctgagcatcagcccctgcctgctggagagcagcagccagctgcccgtgagcgtgatggagaagagcaagagcaagatcagcaacggctgcgtgcagaccgtggccatcatcggccccatcttcggcttcctgctgggcagcctgtgcgccaagctgtacgtggacatcggcttcgtgaacctggaccacatcaccatcacccccaaggacccccagtgggtgggcgcctggtggctgggctacctgatcgccggcatcatcagcctgctggccgccgtgcccttctggtacctgcccaagagcctgcccagaagccagagcagagaggacagcaacagcagcagcgagaagagcaagttcatcatcgacgaccacaccgactaccagaccccccagggcgagaacgccaagatcatggagatggccagagacttcctgcccagcctgaagaacctgttcggcaaccccgtgtacttcctgtacctgtgcaccagcaccgtgcagttcaacagcctgttcggcatggtgacctacaagcccaagtacatcgagcagcagtacggccagagcagcagcagagccaacttcgtgatcggcctgatcaacatccccgccgtggccctgggcatcttcagcggcggcatcgtgatgaagaagttcagaatcagcgtgtgcggcgccgccaagctgtacctgggcagcagcgtgttcggctacctgctgttcctgagcctgttcgccctgggctgcgagaacagcgacgtggccggcctgaccgtgagctaccagggcaccaagcccgtgagctaccacgagagagccctgttcagcgactgcaacagcagatgcaagtgcagcgagaccaagtgggagcccatgtgcggcgagaacggcatcacctacgtgagcgcctgcctggccggctgccagaccagcaacagaagcggcaagaacatcatcttctacaactgcacctgcgtgggcatcgccgccagcaagagcggcaacagcagcggcatcgtgggcagatgccagaaggacaacggctgcccccagatgttcctgtacttcctggtgatcagcgtgatcaccagctacaccctgagcctgggcggcatccccggctacatcctgctgctgagatgcatcaagccccagctgaagagcttcgccctgggcatctacaccctggccatcagagtgctggccggcatccccgcccccgtgtacttcggcgtgctgatcgacaccagctgcctgaagtggggcttcaagagatgcggcagcagaggcagctgcagactgtacgacagcaacgtgttcagacacatctacctgggcctgaccgtgatcctgggcaccgtgagcatcctgctgagcatcgccgtgctgttcatcctgaagaagaactacgtgagcaagcacagaagcttcatcaccaagagagagagaaccatggtgagcaccagattccagaaggagaactacaccaccagcgaccacctgctgcagcccaactactggcccggcaaggagacccagctgtag

SEQ ID NO: 100294 - DNA, 1839 bp, synthetic construct
  misc_feature 1..1839: note = Description of Artificial Sequence: Synthetic coding sequence
  source 1..1839: mol_type = other DNA
atgggcgtgggcaccctgctgatcgccatgccccagttcttcatggagcagtacaagtacgagagatacagccccagcagcaacagcaccctgagcatcagcccctgcctgctggagagcagcagccagctgcccgtgagcgtgatggagaagagcaagagcaagatcagcaacgagtgcgaggtggacaccagcagcagcatgtggatctacgtgttcctgggcaacctgctgagaggcatcggcgagacccccatccagcccctgggcatcgcctacctggacgacttcgccagcgaggacaacgccgccttctacatcggctgcgtgcagaccgtggccatcatcggccccatcttcggcttcctgctgggcagcctgtgcgccaagctgtacgtggacatcggcttcgtgaacctggaccacatcaccatcacccccaaggacccccagtgggtgggcgcctggtggctgggctacctgatcgccggcatcatcagcctgctggccgccgtgcccttctggtacctgcccaagagcctgcccagaagccagagcagagaggacagcaacagcagcagcgagaagagcaagttcatcatcgacgaccacaccgactaccagaccccccagggcgagaacgccaagatcatggagatggccagagacttcctgcccagcctgaagaacctgttcggcaaccccgtgtacttcctgtacctgtgcaccagcaccgtgcagttcaacagcctgttcggcatggtgacctacaagcccaagtacatcgagcagcagtacggccagagcagcagcagagccaacttcgtgatcggcctgatcaacatccccgccgtggccctgggcatcttcagcggcggcatcgtgatgaagaagttcagaatcagcgtgtgcggcgccgccaagctgtacctgggcagcagcgtgttcggctacctgctgttcctgagcctgttcgccctgggctgcgagaacagcgacgtggccggcctgaccgtgagctaccagggcaccaagcccgtgagctaccacgagagagccctgttcagcgactgcaacagcagatgcaagtgcagcgagaccaagtgggagcccatgtgcggcgagaacggcatcacctacgtgagcgcctgcctggccggctgccagaccagcaacagaagcggcaagaacatcatcttctacaactgcacctgcgtgggcatcgccgccagcaagagcggcaacagcagcggcatcgtgggcagatgccagaaggacaacggctgcccccagatgttcctgtacttcctggtgatcagcgtgatcaccagctacaccctgagcctgggcggcatccccggctacatcctgctgctgagatgcatcaagccccagctgaagagcttcgccctgggcatctacaccctggccatcagagtgctggccggcatccccgcccccgtgtacttcggcgtgctgatcgacaccagctgcctgaagtggggcttcaagagatgcggcagcagaggcagctgcagactgtacgacagcaacgtgttcagataccagatcaagagcatccccgccagccactgctacagcatccccgacctgcacaacgccaccgacaccaacaagttcagctgccacttcaccgcctgcaagacctacatcagcggcaccaactgcgacaccggccacagcgtgaacagccccaagcactgcagcaccttccacttcaaggagaagctgtgcttcaagacccagaagttctacaaccaggagagaaagaacaacggcgtgtacaagatccccaagggcaagctgcactacaagtag

SEQ ID NO: 100295 - DNA, 2193 bp, synthetic construct; identical to SEQ ID NO: 100292
  misc_feature 1..2193: note = Description of Artificial Sequence: Synthetic coding sequence
  source 1..2193: mol_type = other DNA

SEQ ID NO: 100296 - DNA, 1932 bp, synthetic construct
  misc_feature 1..1932: note = Description of Artificial Sequence: Synthetic coding sequence
  source 1..1932: mol_type = other DNA
atgggcctgctgcccaagctgggcgccagccagggcagcgacaccagcaccagcagagccggcagatgcgccagaagcgtgttcggcaacatcaaggtgttcgtgctgtgccagggcctgctgcagctgtgccagctgctgtacagcgcctacttcaagagcagcctgaccaccatcgagaagagattcggcctgagcagcagcagcagcggcctgatcagcagcctgaacgagatcagcaacgccatcctgatcatcttcgtgagctacttcggcagcagagtgcacagacccagactgatcggcatcggcggcctgttcctggccgccggcgccttcatcctgaccctgccccacttcctgagcgagccctaccagtacaccctggccagcaccggcaacaacagcagactgcaggccgagctgtgccagaagcactggcaggacctgccccccagcaagtgccacagcaccacccagaacccccagaaggagaccagcagcatgtggggcctgatggtggtggcccagctgctggccggcatcggcaccgtgcccatccagcccttcggcatcagctacgtggacgacttcagcgagcccagcaacagccccctgtacatcagcatcctgttcgccatcagcgtgttcggccccgccttcggctacctgctgggcagcgtgatgctgcagatcttcgtggactacggcagagtgaacaccgccgccgtgaacctggtgcccggcgaccccagatggatcggcgcctggtggctgggcctgctgatcagcagcgccctgctggtgctgaccagcttccccttcttcttcttccccagagccatgcccatcggcgccaagagagcccccgccaccgccgacgaggccagaaagctggaggaggccaagagcagaggcagcctggtggacttcatcaagagattcccctgcatcttcctgagactgctgatgaacagcctgttcgtgctggtggtgctggcccagtgcaccttcagcagcgtgatcgccggcctgagcaccttcctgaacaagttcctggagaagcagtacggcaccagcgccgcctacgccaacttcctgatcggcgccgtgaacctgcccgccgccgccctgggcatgctgttcggcggcatcctgatgaagagattcgtgttcagcctgcaggccatccccagaatcgccaccaccatcatcaccatcagcatgatcctgtgcgtgcccctgttcttcatgggctgcagcacccccaccgtggccgaggtgtacccccccagcaccagcagcagcatccacccccagagccccgcctgcagaagagactgcagctgccccgacagcatcttccaccccgtgtgcggcgacaacggcatcgagtacctgagcccctgccacgccggctgcagcaacatcaacatgagcagcgccaccagcaagcagctgatctacctgaactgcagctgcgtgaccggcggcagcgccagcgccaagaccggcagctgccccgtgccctgcgcccacttcctgctgcccgccatcttcctgatcagcttcgtgagcctgatcgcctgcatcagccacaaccccctgtacatgatggtgctgagagtggtgaaccaggaggagaagagcttcgccatcggcgtgcagttcctgctgatgagactgctggcctggctgcccagccccgccctgtacggcctgaccatcgaccacagctgcatcagatggaacagcctgtgcctgggcagaagaggcgcctgcgcctactacgacaacgacgccctgagagacagatacctgggcctgcagatgggctacaaggccctgggcatgctgctgctgtgcttcatcagctggagagtgaagaagaacaaggagtacaacgtgcagaaggccgccggcctgatctag

SEQ ID NO: 100297 - DNA, 1248 bp, synthetic construct
  misc_feature 1..1248: note = Description of Artificial Sequence: Synthetic coding sequence
  source 1..1248: mol_type = other DNA
atgggcctgctgcccaagctgggcgccagccagggcagcgacaccagcaccagcagagccggcagatgcgccagaagcgtgttcggcaacatcaaggtgttcgtgctgtgccagggcctgctgcagctgtgccagctgctgtacagcgcctacttcaagagcagcctgaccaccatcgagaagagattcggcctgagcagcagcagcagcggcctgatcagcagcctgaacgagatcagcaacgccatcctgatcatcttcgtgagctacttcggcagcagagtgcacagacccagactgatcggcatcggcggcctgttcctggccgccggcgccttcatcctgaccctgccccacttcctgagcgagccctaccagtacaccctggccagcaccggcaacaacagcagactgcaggccgagctgtgccagaagcactggcaggacctgccccccagcaagtgccacagcaccacccagaacccccagaaggagaccagcagcatgtggggcctgatggtggtggcccagctgctggccggcatcggcaccgtgcccatccagcccttcggcatcagctacgtggacgacttcagcgagcccagcaacagccccctgtacatcagcatcctgttcgccatcagcgtgttcggccccgccttcggctacctgctgggcagcgtgatgctgcagatcttcgtggactacggcagagtgaacaccgccgccgtgaacctggtgcccggcgaccccagatggatcggcgcctggtggctgggcctgctgatcagcagcgccctgctggtgctgaccagcttccccttcttcttcttccccagagccatgcccatcggcgccaagagagcccccgccaccgccgacgaggccagaaagctggaggaggccaagagcagaggcagcctggtggacttcatcaagagattcccctgcatcttcctgagactgctgatgaacagcctgttcgtgctggtggtgctggcccagtgcaccttcagcagcgtgatcgccggcctgagcaccttcctgaacaagttcctggagaagcagtacggcaccagcgccgcctacgccaacttcctgatcgcccaccaggtgctgtacatcagaagcctgctgcccgccgccggcaccgccagagcccagatcctgagcagcaccagaagcgtggagaccatggagagcagcaccagccccctggccatgcccgccgccgccaccagcacctag

SEQ ID NO: 100298 - DNA, 2133 bp, synthetic construct
  misc_feature 1..2133: note = Description of Artificial Sequence: Synthetic coding sequence
  source 1..2133: mol_type = other DNA
atgcagggcaagaagcccggcggcagcagcggcggcggcagaagcggcgagctgcagggcgacgaggcccagagaaacaagaagaagaagaagaaggtgagctgcttcagcaacatcaagatcttcctggtgagcgagtgcgccctgatgctggcccagggcaccgtgggcgcctacctggtgagcgtgctgaccaccctggagagaagattcaacctgcagagcgccgacgtgggcgtgatcgccagcagcttcgagatcggcaacctggccctgatcctgttcgtgagctacttcggcgccagaggccacagacccagactgatcggctgcggcggcatcgtgatggccctgggcgccctgctgagcgccctgcccgagttcctgacccaccagtacaagtacgaggccggcgagatcagatggggcgccgagggcagagacgtgtgcgccgccaacggcagcggcggcgacgagggccccgaccccgacctgatctgcagaaacagaaccgccaccaacatgatgtacctgctgctgatcggcgcccaggtgctgctgggcatcggcgccacccccgtgcagcccctgggcgtgagctacatcgacgaccacgtgagaagaaaggacagcagcctgtacatcggcatcctgttcaccatgctggtgttcggccccgcctgcggcttcatcctgggcagcttctgcaccaagatctacgtggacgccgtgttcatcgacaccagcaacctggacatcacccccgacgaccccagatggatcggcgcctggtggggcggcttcctgctgtgcggcgccctgctgttcttcagcagcctgctgatgttcggcttcccccagagcctgcccccccacagcgagcccgccatggagagcgagcaggccatgctgagcgagagagagtacgagagacccaagcccagcaacggcgtgctgagacaccccctggagcccgacagcagcgccagctgcttccagcagctgagagtgatccccaaggtgaccaagcacctgctgagcaaccccgtgttcacctgcatcatcctggccgcctgcatggagatcgccgtggtggccggcttcgccgccttcctgggcaagtacctggagcagcagttcaacctgaccaccagcagcgccaaccagctgctgggcatgaccgccatcccctgcgcctgcctgggcatcttcctgggcggcctgctggtgaagaagctgagcctgagcgccctgggcgccatcagaatggccatgctggtgaacctggtgagcaccgcctgctacgtgagcttcctgttcctgggctgcgacaccggccccgtggccggcgtgaccgtgccctacggcaacagcaccgcccccggcagcgccctggacccctacagcccctgcaacaacaactgcgagtgccagaccgacagcttcacccccgtgtgcggcgccgacggcatcacctacctgagcgcctgcttcgccggctgcaacagcaccaacctgaccggctgcgcctgcctgaccaccgtgcccgccgagaacgccaccgtggtgcccggcaagtgccccagccccggctgccaggaggccttcctgaccttcctgtgcgtgatgtgcatctgcagcctgatcggcgccatggcccagacccccagcgtgatcatcctgatcagaaccgtgagccccgagctgaagagctacgccctgggcgtgctgttcctgctgctgagactgctgggcttcatccccccccccctgatcttcggcgccggcatcgacagcacctgcctgttctggagcaccttctgcggcgagcagggcgcctgcgtgctgtacgacaacgtggtgtacagatacctgtacgtgagcatcgccatcgccctgaagagcttcgccttcatcctgtacaccaccacctggcagtgcctgagaaagaactacaagagatacatcaagaaccacgagggcggcctgagcaccagcgagttcttcgccagcaccctgaccctggacaacctgggcagagaccccgtgcccgccaaccagacccacagaaccaagttcatctacaacctggaggaccacgagtggtgcgagaacatggagagcgtgctgtag

SEQ ID NO: 100299 - DNA, 1356 bp, synthetic construct
  misc_feature 1..1356: note = Description of Artificial Sequence: Synthetic coding sequence
  source 1..1356: mol_type = other DNA
atgagagagatcgtgcacatccagatcggccagtgcggcaaccagatcggcgccaagttctgggagatgatcggcgaggagcacggcatcgacctggccggcagcgacagaggcgccagcgccctgcagctggagagaatcagcgtgtactacaacgaggcctacggcagaaagtacgtgcccagagccgtgctggtggacctggagcccggcaccatggacagcatcagaagcagcaagctgggcgccctgttccagcccgacagcttcgtgcacggcaacagcggcgccggcaacaactgggccaagggccactacaccgagggcgccgagctgatcgagaacgtgctggaggtggtgagacacgagagcgagagctgcgactgcctgcagggcttccagatcgtgcacagcctgggcggcggcaccggcagcggcatgggcaccctgctgatgaacaagatcagagaggagtaccccgacagaatcatgaacagcttcagcgtgatgcccagccccaaggtgagcgacaccgtggtggagccctacaacgccgtgctgagcatccaccagctgatcgagaacgccgacgcctgcttctgcatcgacaacgaggccctgtacgacatctgcttcagaaccctgaagctgaccacccccacctacggcgacctgaaccacctggtgagcctgaccatgagcggcatcaccaccagcctgagattccccggccagctgaacgccgacctgagaaagctggccgtgaacatggtgcccttccccagactgcacttcttcatgcccggcttcgcccccctgaccgcccagggcagccagcagtacagagccctgagcgtggccgagctgacccagcagatgttcgacgccagaaacaccatggccgcctgcgacctgagaagaggcagatacctgaccgtggcctgcatcttcagaggcaagatgagcaccaaggaggtggaccagcagctgctgagcgtgcagaccagaaacagcagctgcttcgtggagtggatccccaacaacgtgaaggtggccgtgtgcgacatcccccccagaggcctgagcatggccgccaccttcatcggcaacaacaccgccatccaggagatcttcaacagagtgagcgagcacttcagcgccatgttcaagagaaaggccttcgtgcactggtacaccagcgagggcatggacatcaacgagttcggcgaggccgagaacaacatccacgacctggtgagcgagtaccagcagttccaggacgccaaggccgtgctggaggaggacgaggaggtgaccgaggaggccgagatggagcccgaggacaagggccactag

SEQ ID NO: 100300 - DNA, 1749 bp, synthetic construct
  misc_feature 1..1749: note = Description of Artificial Sequence: Synthetic coding sequence
  source 1..1749: mol_type = other DNA
atgcccctgcaccagctgggcgacaagcccctgaccttccccagccccaacagcgccatggagaacggcctggaccacaccccccccagcagaagagccagccccggcacccccctgagccccggcagcctgagaagcgccgcccacagccccctggacaccagcaagcagcccctgtgccagctgtgggccgagaagcacggcgccagaggcacccacgaggtgagatacgtgagcgccggccagagcgtggcctgcggctggtgggccttcgcccccccctgcctgcaggtgctgaacacccccaagggcatcctgttcttcctgtgcgccgccgccttcctgcagggcatgaccgtgaacggcttcatcaacaccgtgatcaccagcctggagagaagatacgacctgcacagctaccagagcggcctgatcgccagcagctacgacatcgccgcctgcctgtgcctgaccttcgtgagctacttcggcggcagcggccacaagcccagatggctgggctggggcgtgctgctgatgggcaccggcagcctggtgttcgccctgccccacttcaccgccggcagatacgaggtggagctggacgccggcgtgagaacctgccccgccaaccccggcgccgtgtgcgccgacagcaccagcggcctgagcagataccagctggtgttcatgctgggccagttcctgcacggcgtgggcgccacccccctgtacaccctgggcgtgacctacctgggcatgagcaccttcagccccaagttcctggagagccagttcagcctgagcgccagcgaggccgccaccctgttcggctacctggtggtgcccgccggcggcggcggcaccttcctgggcggcttcttcgtgaacaagctgagactgagaggcagcgccgtgatcaagttctgcctgttctgcaccgtggtgagcctgctgggcatcctggtgttcagcctgcactgccccagcgtgcccatggccggcgtgaccgccagctacggcggcagcctgctgcccgagggccacctgaacctgaccgccccctgcaacgccgcctgcagctgccagcccgagcactacagccccgtgtgcggcagcgacggcctgatgtacttcagcctgtgccacgccggctgccccgccgccaccgagaccaacgtggacggccagaaggtgtacagagactgcagctgcatcccccagaacctgagcagcggcttcggccacgccaccgccggcaagtgcaccagcacctgccagagaaagcccctgctgctggtgttcatcttcgtggtgatcttcttcaccttcctgagcagcatccccgccctgaccgccaccctgagatgcgtgagagacccccagagaagcttcgccctgggcatccagtggatcgtggtgagaatcctgggcggcatccccggccccatcgccttcggctgggtgatcgacaaggcctgcctgctgtggcaggaccagtgcggccagcagggcagctgcctggtgtaccagaacagcgccatgagcagatacatcctgatcatgggcctgctgtacaaggtgctgggcgtgctgttcttcgccatcgccagcagcagagccgccagcgaccacagacccagaccccccggccacggcggccacagcgccttccccgacgacagaaccgtgcccctgggcgacgccatcaccagagagctgctgttcgacctgcagcccagcacctag

SEQ ID NO: 100301 - DNA, 2169 bp, synthetic construct
  misc_feature 1..2169: note = Description of Artificial Sequence: Synthetic coding sequence
  source 1..2169: mol_type = other DNA
atgcccctgcaccagctgggcgacaagcccctgaccttccccagccccaacagcgccatggagaacggcctggaccacaccccccccagcagaagagccagccccggcacccccctgagccccggcagcctgagaagcgccgcccacagccccctggacaccagcaagcagcccctgtgccagctgtgggccgagaagcacggcgccagaggcacccacgaggtgagatacgtgagcgccggccagagcgtggcctgcggctggtgggccttcgcccccccctgcctgcaggtgctgaacacccccaagggcatcctgttcttcctgtgcgccgccgccttcctgcagggcatgaccgtgaacggcttcatcaacaccgtgatcaccagcctggagagaagatacgacctgcacagctaccagagcggcctgatcgccagcagctacgacatcgccgcctgcctgtgcctgaccttcgtgagctacttcggcggcagcggccacaagcccagatggctgggctggggcgtgctgctgatgggcaccggcagcctggtgttcgccctgccccacttcaccgccggcagatacgaggtggagctggacgccggcgtgagaacctgccccgccaaccccggcgccgtgtgcgccgacagcaccagcggcctgagcagataccagctggtgttcatgctgggccagttcctgcacggcgtgggcgccacccccctgtacaccctgggcgtgacctacctggacgagaacgtgaagagcagctgcagccccgtgtacatcgccatcttctacaccgccgccatcctgggccccgccgccggctacctgatcggcggcgccctgctgaacatctacaccgagatgggcagaagaaccgagctgaccaccgagagccccctgtgggtgggcgcctggtgggtgggcttcctgggcagcggcgccgccgccttcttcaccgccgtgcccatcctgggctaccccagacagctgcccggcagccagagatacgccgtgatgagagccgccgagatgcaccagctgaaggacagcagcagaggcgaggccagcaaccccgacttcggcaagaccatcagagacctgcccctgagcatctggctgctgctgaagaaccccaccttcatcctgctgtgcctggccggcgccaccgaggccaccctgatcaccggcatgagcaccttcagccccaagttcctggagagccagttcagcctgagcgccagcgaggccgccaccctgttcggctacctggtggtgcccgccggcggcggcggcaccttcctgggcggcttcttcgtgaacaagctgagactgagaggcagcgccgtgatcaagttctgcctgttctgcaccgtggtgagcctgctgggcatcctggtgttcagcctgcactgccccagcgtgcccatggccggcgtgaccgccagctacggcggcagcctgctgcccgagggccacctgaacctgaccgccccctgcaacgccgcctgcagctgccagcccgagcactacagccccgtgtgcggcagcgacggcctgatgtacttcagcctgtgccacgccggctgccccgccgccaccgagaccaacgtggacggccagaaggtgtacagagactgcagctgcatcccccagaacctgagcagcggcttcggccacgccaccgccggcaagtgcaccagcacctgccagagaaagcccctgctgctggtgttcatcttcgtggtgatcttcttcaccttcctgagcagcatccccgccctgaccgccaccctgagatgcgtgagagacccccagagaagcttcgccctgggcatccagtggatcgtggtgagaatcctgggcggcatccccggccccatcgccttcggctgggtgatcgacaaggcctgcctgctgtggcaggaccagtgcggccagcagggcagctgcctggtgtaccagaacagcgccatgagcagatacatcctgatcatgggcctgctgtacaaggtgctgggcgtgctgttcttcgccatcgcctgcttcctgtacaagcccctgagcgagagcagcgacggcctggagacctgcctgcccagccagagcagcgcccccgacagcgccaccgacagccagctgcagagcagcgtgtag

SEQ ID NO: 100302 - DNA, 2169 bp, synthetic construct
  misc_feature 1..2169: note = Description of Artificial Sequence: Synthetic coding sequence
  source 1..2169: mol_type = other DNA
atgcccctgcaccagctgggcgacaagcccctgaccttccccagccccaacagcgccatggagaacggcctggaccacaccccccccagcagaagagccagccccggcacccccctgagccccggcagcctgagaagcgccgcccacagccccctggacaccagcaagcagcccctgtgccagctgtgggccgagaagcacggcgccagaggcacccacgaggtgagatacgtgagcgccggccagagcgtggcctgcggctggtgggccttcgcccccccctgcctgcaggtgctgaacacccccaagggcatcctgttcttcctgtgcgccgccgccttcctgcagggcatgaccgtgaacggcttcatcaacaccgtgatcaccagcctggagagaagatacgacctgcacagctaccagagcggcctgatcgccagcagctacgacatcgccgcctgcctgtgcctgaccttcgtgagctacttcggcggcagcggccacaagcccagatggctgggctggggcgtgctgctgatgggcaccggcagcctggtgttcgccctgccccacttcaccgccggcagatacgaggtggagctggacgccggcgtgagaacctgccccgccaaccccggcgccgtgtgcgccgacagcaccagcggcctgagcagataccagctggtgttcatgctgggccagttcctgcacggcgtgggcgccacccccctgtacaccctgggcgtgacctacctggacgagaacgtgaagagcagctgcagccccgtgtacatcgccatcttctacaccgccgccatcctgggccccgccgccggctacctgatcggcggcgccctgctgaacatctacaccgagatgggcagaagaaccgagctgaccaccgagagccccctgtgggtgggcgcctggtgggtgggcttcctgggcagcggcgccgccgccttcttcaccgccgtgcccatcctgggctaccccagacagctgcccggcagccagagatacgccgtgatgagagccgccgagatgcaccagctgaaggacagcagcagaggcgaggccagcaaccccgacttcggcaagaccatcagagacctgcccctgagcatctggctgctgctgaagaaccccaccttcatcctgctgtgcctggccggcgccaccgaggccaccctgatcaccggcatgagcaccttcagccccaagttcctggagagccagttcagcctgagcgccagcgaggccgccaccctgttcggctacctggtggtgcccgccggcggcggcggcaccttcctgggcggcttcttcgtgaacaagctgagactgagaggcagcgccgtgatcaagttctgcctgttctgcaccgtggtgagcctgctgggcatcctggtgttcagcctgcactgccccagcgtgcccatggccggcgtgaccgccagctacggcggcagcctgctgcccgagggccacctgaacctgaccgccccctgcaacgccgcctgcagctgccagcccgagcactacagccccgtgtgcggcagcgacggcctgatgtacttcagcctgtgccacgccggctgccccgccgccaccgagaccaacgtggacggccagaaggtgtacagagactgcagctgcatcccccagaacctgagcagcggcttcggccacgccaccgccggcaagtgcaccagcaccttcctgtacatcccccagcagcacagctgcaccaacggcaacagcaccaccggcgccctgcaggagacccccagaagcaagagagcctgcagatgcgtgagagacccccagagaagcttcgccctgggcatccagtggatcgtggtgagaatcctgggcggcatccccggccccatcgccttcggctgggtgatcgacaaggcctgcctgctgtggcaggaccagtgcggccagcagggcagctgcctggtgtaccagaacagcgccatgagcagatacatcctgatcatgggcctgctgtacaaggtgctgggcgtgctgttcttcgccatcgcctgcttcctgtacaagcccctgagcgagagcagcgacggcctggagacctgcctgcccagccagagcagcgcccccgacagcgccaccgacagccagctgcagagcagcgtgtag

SEQ ID NO: 100303 - DNA, 456 bp, synthetic construct
  misc_feature 1..456: note = Description of Artificial Sequence: Synthetic coding sequence
  source 1..456: mol_type = other DNA
accaccgccctgtgcgccgccagaaccgccagctgcaccagccactgcgccacccagggcgccctgcagcccagaagaagaatgtggaccgccagaagatgcgtgagagacccccagagaagcttcgccctgggcatccagtggatcgtggtgagaatcctgggcggcatccccggccccatcgccttcggctgggtgatcgacaaggcctgcctgctgtggcaggaccagtgcggccagcagggcagctgcctggtgtaccagaacagcgccatgagcagatacatcctgatcatgggcctgctgtacaaggtgctgggcgtgctgttcttcgccatcgcctgcttcctgtacaagcccctgagcgagagcagcgacggcctggagacctgcctgcccagccagagcagcgcccccgacagcgccaccgacagccagctgcagagcagcgtgtag

SEQ ID NO: 100304 - DNA, 1863 bp, synthetic construct
  misc_feature 1..1863: note = Description of Artificial Sequence: Synthetic coding sequence
  source 1..1863: mol_type = other DNA
atgcccctgcaccagctgggcgacaagcccctgaccttccccagccccaacagcgccatggagaacggcctggaccacaccccccccagcagaagagccagccccggcacccccctgagccccggcagcctgagaagcgccgcccacagccccctggacaccagcaagcagcccctgtgccagctgtgggccgagaagcacggcgccagaggcacccacgaggtgagatacgtgagcgccggccagagcgtggcctgcggctggtgggccttcgcccccccctgcctgcaggtgctgaacacccccaagggcatcctgttcttcctgtgcgccgccgccttcctgcagggcatgaccgtgaacggcttcatcaacaccgtgatcaccagcctggagagaagatacgacctgcacagctaccagagcggcctgatcgccagcagctacgacatcgccgcctgcctgtgcctgaccttcgtgagctacttcggcggcagcggccacaagcccagatggctgggctggggcgtgctgctgatgggcaccggcagcctggtgttcgccctgccccacttcaccgccggcagatacgaggtggagctggacgccggcgtgagaacctgccccgccaaccccggcgccgtgtgcgccgacagcaccagcggcctgagcagataccagctggtgttcatgctgggccagttcctgcacggcgtgggcgccacccccctgtacaccctgggcgtgacctacctggacgagaacgtgaagagcagctgcagccccgtgtacatcgccatcttctacaccgccgccatcctgggccccgccgccggctacctgatcggcggcgccctgctgaacatctacaccgagatgggcagaagaaccgagctgaccaccgagagccccctgtgggtgggcgcctggtgggtgggcttcctgggcagcggcgccgccgccttcttcaccgccgtgcccatcctgggctaccccagacagctgcccggcagccagagatacgccgtgatgagagccgccgagatgcaccagctgaaggacagcagcagaggcgaggccagcaaccccgacttcggcaagaccatcagagacctgcccctgagcatctggctgctgctgaagaaccccaccttcatcctgctgtgcctggccggcgccaccgaggccaccctgatcaccggcatgagcaccttcagccccaagttcctggagagccagttcagcctgagcgccagcgaggccgccaccctgttcggctacctggtggtgcccgccggcggcggcggcaccttcctgggcggcttcttcgtgaacaagctgagactgagaggcagcgccgtgatcaagttctgcctgttctgcaccgtggtgagcctgctgggcatcctggtgttcagcctgcactgccccagcgtgcccatggccggcgtgaccgccagctacggcggcagcctgctgcccgagggccacctgaacctgaccgccccctgcaacgccgcctgcagctgccagcccgagcactacagccccgtgtgcggcagcgacggcctgatgtacttcagcctgtgccacgccggctgccccgccgccaccgagaccaacgtggacggccagaaggtgagcggcgccgccgcctacagaccctgcccccccctggaccccggcaagggccccccctgcctgcccctggtgatcggcgccatcgtgggcctgcccagatgcaccgagaccgtggccgtgagcctgagaatcttccccctggtgctggccatgcccctgcagggcaacgccctgcagctggtgagagagagccccagcttctggttcagctacagcctgtag

SEQ ID NO: 100305 - DNA, 2160 bp, synthetic construct
  misc_feature 1..2160: note = Description of Artificial Sequence: Synthetic coding sequence
  source 1..2160: mol_type = other DNA
atgttcgtgggcgtggccagacacagcggcagccaggacgaggtgagcagaggcgtggagcccctggaggccgccagagcccagcccgccaaggacagaagagccaagggcacccccaagagcagcaagcccggcaagaagcacagatacctgagactgctgcccgaggccctgatcagattcggcggcttcagaaagagaaagaaggccaagagcagcgtgagcaagaagcccggcgaggtggacgacagcctggagcagccctgcggcctgggctgcctggtgagcacctgctgcgagtgctgcaacaacatcagatgcttcatgatcttctactgcatcctgctgatctgccagggcgtggtgttcggcctgatcgacgtgagcatcggcgacttccagaaggagtaccagctgaagaccatcgagaagctggccctggagaagagctacgacatcagcagcggcctggtggccatcttcatcgccttctacggcgacagaaagaaggtgatctggttcgtggccagcagcttcctgatcggcctgggcagcctgctgtgcgccttccccagcatcaacgaggagaacaagcagagcaaggtgggcatcgaggacatctgcgaggagatcaaggtggtgagcggctgccagagcagcggcatcagcttccagagcaagtacctgagcttcttcatcctgggccagaccgtgcagggcatcgccggcatgcccctgtacatcctgggcatcaccttcatcgacgagaacgtggccacccacagcgccggcatctacctgggcatcgccgagtgcaccagcatgatcggctacgccctgggctacgtgctgggcgcccccctggtgaaggtgcccgagaacaccaccagcgccaccaacaccaccgtgaacaacggcagccccgagtggctgtggacctggtggatcaacttcctgttcgccgccgtggtggcctggtgcaccctgatccccctgagctgcttccccaacaacatgcccggcagcaccagaatcaaggccagaaagagaaagcagctgcacttcttcgacagcagactgaaggacctgaagctgggcaccaacatcaaggacctgtgcgccgccctgtggatcctgatgaagaaccccgtgctgatctgcctggccctgagcaaggccaccgagtacctggtgatcatcggcgccagcgagttcctgcccatctacctggagaaccagttcatcctgacccccaccgtggccaccaccctggccggcctggtgctgatccccggcggcgccctgggccagctgctgggcggcgtgatcgtgagcaccctggagatgagctgcaaggccctgatgagattcatcatggtgaccagcgtgatcagcctgatcctgctggtgttcatcatcttcgtgagatgcaaccccgtgcagttcgccggcatcaacgaggactacgacggcaccggcaagctgggcaacctgaccgccccctgcaacgagaagtgcagatgcagcagcagcatctacagcagcatctgcggcagagacgacatcgagtacttcagcccctgcttcgccggctgcacctacagcaaggcccagaaccagaagaagatgtactacaactgcagctgcatcaaggagggcctgatcaccgccgacgccgagggcgacttcatcgacgccagacccggcaagtgcgacgccaagtgctacaagctgcccctgttcatcgccttcatcttcagcaccctgatcttcagcggcttcagcggcgtgcccatcgtgctggccatgaccagagtggtgcccgacaagctgagaagcctggccctgggcgtgagctacgtgatcctgagaatcttcggcaccatccccggccccagcatcttcaagatgagcggcgagaccagctgcatcctgagagacgtgaacaagtgcggccacaccggcagatgctggatctacaacaagaccaagatggccttcctgctggtgggcatctgcttcctgtgcaagctgtgcaccatcatcttcaccaccatcgccttcttcatctacaagagaagactgaacgagaacaccgacttccccgacgtgaccgtgaagaaccccaaggtgaagaagaaggaggagaccgacctgtag

SEQ ID NO: 100306 - DNA, 1401 bp, synthetic construct
  misc_feature 1..1401: note = Description of Artificial Sequence: Synthetic coding sequence
  source 1..1401: mol_type = other DNA
atgttcgtgggcgtggccagacacagcggcagccaggacgaggtgagcagaggcgtggagcccctggaggccgccagagcccagcccgccaaggacagaagagccaagggcacccccaagagcagcaagcccggcaagaagcacagatacctgagactgctgcccgaggccctgatcagattcggcggcttcagaaagagaaagaaggccaagagcagcgtgagcaagaagcccggcgaggtggacgacagcctggagcagccctgcggcctgggctgcctggtgagcacctgctgcgagtgctgcaacaacatcagatgcttcatgatcttctactgcatcctgctgatctgccagggcgtggtgttcggcctgatcgacgtgagcatcggcgacttccagaaggagtaccagctgaagaccatcgagaagctggccctggagaagagctacgacatcagcagcggcctggtggccatcttcatcgccttctacggcgacagaaagaaggtgatctggttcgtggccagcagcttcctgatcggcctgggcagcctgctgtgcgccttccccagcatcaacgaggagaacaagcagagcaaggtgggcatcgagggcatcgccgagtgcaccagcatgatcggctacgccctgggctacgtgctgggcgcccccctggtgaaggtgcccgagaacaccaccagcgccaccaagaccggcaagctgggcaacctgaccgccccctgcaacgagaagtgcagatgcagcagcagcatctacagcagcatctgcggcagagacgacatcgagtacttcagcccctgcttcgccggctgcacctacagcaaggcccagaaccagaagaagatgtactacaactgcagctgcatcaaggagggcctgatcaccgccgacgccgagggcgacttcatcgacgccagacccggcaagtgcgacgccaagtgctacaagctgcccctgttcatcgccttcatcttcagcaccctgatcttcagcggcttcagcggcgtgcccatcgtgctggccatgaccagagtggtgcccgacaagctgagaagcctggccctgggcgtgagctacgtgatcctgagaatcttcggcaccatccccggccccagcatcttcaagatgagcggcgagaccagctgcatcctgagagacgtgaacaagtgcggccacaccggcagatgctggatctacaacaagaccaagatggccttcctgctggtgggcatctgcttcctgtgcaagctgtgcaccatcatcttcaccaccatcgccttcttcatctacaagagaagactgaacgagaacaccgacttccccgacgtgaccgtgaagaaccccaaggtgaagaagaaggaggagaccgacctgtag

SEQ ID NO: 100307 - DNA, 1974 bp, synthetic construct
  misc_feature 1..1974: note = Description of Artificial Sequence: Synthetic coding sequence
  source 1..1974: mol_type = other DNA
atgttcgtgggcgtggccagacacagcggcagccaggacgaggtgagcagaggcgtggagcccctggaggccgccagagcccagcccgccaaggacagaagagccaagggcacccccaagagcagcaagcccggcaagaagcacagatacctgagactgctgcccgaggccctgatcagattcggcggcttcagaaagagaaagaaggccaagagcagcgtgagcaagaagcccggcgaggtggacgacagcctggagcagccctgcggcctgggctgcctggtgagcacctgctgcgagtgctgcaacaacatcagatgcttcatgatcttctactgcatcctgctgatctgccagggcgtggtgttcggcctgatcgacgtgagcatcggcgacttccagaaggagtaccagctgaagaccatcgagaagctggccctggagaagagctacgacatcagcagcggcctggtggccatcttcatcgccttctacggcgacagaaagaaggtgatctggttcgtggccagcagcttcctgatcggcctgggcagcctgctgtgcgccttccccagcatcaacgaggagaacaagcagagcaaggtgggcatcgagggcatcgccgagtgcaccagcatgatcggctacgccctgggctacgtgctgggcgcccccctggtgaaggtgcccgagaacaccaccagcgccaccaacaccaccgtgaacaacggcagccccgagtggctgtggacctggtggatcaacttcctgttcgccgccgtggtggcctggtgcaccctgatccccctgagctgcttccccaacaacatgcccggcagcaccagaatcaaggccagaaagagaaagcagctgcacttcttcgacagcagactgaaggacctgaagctgggcaccaacatcaaggacctgtgcgccgccctgtggatcctgatgaagaaccccgtgctgatctgcctggccctgagcaaggccaccgagtacctggtgatcatcggcgccagcgagttcctgcccatctacctggagaaccagttcatcctgacccccaccgtggccaccaccctggccggcctggtgctgatccccggcggcgccctgggccagctgctgggcggcgtgatcgtgagcaccctggagatgagctgcaaggccctgatgagattcatcatggtgaccagcgtgatcagcctgatcctgctggtgttcatcatcttcgtgagatgcaaccccgtgcagttcgccggcatcaacgaggactacgacggcaccggcaagctgggcaacctgaccgccccctgcaacgagaagtgcagatgcagcagcagcatctacagcagcatctgcggcagagacgacatcgagtacttcagcccctgcttcgccggctgcacctacagcaaggcccagaaccagaagaagatgtactacaactgcagctgcatcaaggagggcctgatcaccgccgacgccgagggcgacttcatcgacgccagacccggcaagtgcgacgccaagtgctacaagctgcccctgttcatcgccttcatcttcagcaccctgatcttcagcggcttcagcggcgtgcccatcgtgctggccatgaccagagtggtgcccgacaagctgagaagcctggccctgggcgtgagctacgtgatcctgagaatcttcggcaccatccccggccccagcatcttcaagatgagcggcgagaccagctgcatcctgagagacgtgaacaagtgcggccacaccggcagatgctggatctacaacaagaccaagatggccttcctgctggtgggcatctgcttcctgtgcaagctgtgcaccatcatcttcaccaccatcgccttcttcatctacaagagaagactgaacgagaacaccgacttccccgacgtgaccgtgaagaaccccaaggtgaagaagaaggaggagaccgacctgtag

SEQ ID NO: 100308 - DNA, 2160 bp, synthetic construct; identical to SEQ ID NO: 100305
  misc_feature 1..2160: note = Description of Artificial Sequence: Synthetic coding sequence
  source 1..2160: mol_type = other DNA

SEQ ID NO: 100309 - DNA, 78 bp, synthetic construct
  misc_feature 1..78: note = Description of Artificial Sequence: Synthetic coding sequence
  source 1..78: mol_type = other DNA
ctgaacgagaacaccgacttccccgacgtgaccgtgaagaaccccaaggtgaagaagaaggaggagaccgacctgtag

SEQ ID NO: 100310 - DNA, 1401 bp, synthetic construct; identical to SEQ ID NO: 100306
  misc_feature 1..1401: note = Description of Artificial Sequence: Synthetic coding sequence
  source 1..1401: mol_type = other DNA

SEQ ID NO: 100311 - DNA, 351 bp, synthetic construct
  misc_feature 1..351: note = Description of Artificial Sequence: Synthetic coding sequence
  source 1..351: mol_type = other DNA
atgctgagctgcagactgcagtgcgccctggccgccctgagcatcgtgctggccctgggctgcgtgaccggcgcccccagcgaccccagactgagacagttcctgcagaagagcctggccgccgccgccggcaagcaggagctggccaagtacttcctggccgagctgctgagcgagcccaaccagaccgagaacgacgccctggagcccgaggacctgagccaggccgccgagcaggacgagatgagactggagctgcagagaagcgccaacagcaaccccgccatggcccccagagagagaaaggccggctgcaagaacttcttctggaagaccttcaccagctgctag

SEQ ID NO: 100312 - DNA, 1176 bp, synthetic construct
  misc_feature 1..1176: note = Description of Artificial Sequence: Synthetic coding sequence
  source 1..1176: mol_type = other DNA
atgttccccaacggcaccgccagcagccccagcagcagccccagccccagccccggcagctgcggcgagggcggcggcagcagaggccccggcgccggcgccgccgacggcatggaggagcccggcagaaacgccagccagaacggcaccctgagcgagggccagggcagcgccatcctgatcagcttcatctacagcgtggtgtgcctggtgggcctgtgcggcaacagcatggtgatctacgtgatcctgagatacgccaagatgaagaccgccaccaacatctacatcctgaacctggccatcgccgacgagctgctgatgctgagcgtgcccttcctggtgaccagcaccctgctgagacactggcccttcggcgccctgctgtgcagactggtgctgagcgtggacgccgtgaacatgttcaccagcatctactgcctgaccgtgctgagcgtggacagatacgtggccgtggtgcaccccatcaaggccgccagatacagaagacccaccgtggccaaggtggtgaacctgggcgtgtgggtgctgagcctgctggtgatcctgcccatcgtggtgttcagcagaaccgccgccaacagcgacggcaccgtggcctgcaacatgctgatgcccgagcccgcccagagatggctggtgggcttcgtgctgtacaccttcctgatgggcttcctgctgcccgtgggcgccatctgcctgtgctacgtgctgatcatcgccaagatgagaatggtggccctgaaggccggctggcagcagagaaagagaagcgagagaaagatcaccctgatggtgatgatggtggtgatggtgttcgtgatctgctggatgcccttctacgtggtgcagctggtgaacgtgttcgccgagcaggacgacgccaccgtgagccagctgagcgtgatcctgggctacgccaacagctgcgccaaccccatcctgtacggcttcctgagcgacaacttcaagagaagcttccagagaatcctgtgcctgagctggatggacaacgccgccgaggagcccgtggactactacgccaccgccctgaagagcagagcctacagcgtggaggacttccagcccgagaacctggagagcggcggcgtgttcagaaacggcacctgcaccagcagaatcaccaccctgtag

SEQ ID NO: 100313 - DNA, 1257 bp, synthetic construct
  misc_feature 1..1257: note = Description of Artificial Sequence: Synthetic coding sequence
  source 1..1257: mol_type = other DNA
atggacatgctgcaccccagcagcgtgagcaccaccagcgagcccgagaacgccagcagcgcctggccccccgacgccaccctgggcaacgtgagcgccggccccagccccgccggcctggccgtgagcggcgtgctgatccccctggtgtacctggtggtgtgcgtggtgggcctgctgggcaacagcctggtgatctacgtggtgctgagacacaccgccagccccagcgtgaccaacgtgtacatcctgaacctggccctggccgacgagctgttcatgctgggcctgcccttcctggccgcccagaacgccctgagctactggcccttcggcagcctgatgtgcagactggtgatggccgtggacggcatcaaccagttcaccagcatcttctgcctgaccgtgatgagcgtggacagatacctggccgtggtgcaccccaccagaagcgccagatggagaaccgcccccgtggccagaaccgtgagcgccgccgtgtgggtggccagcgccgtggtggtgctgcccgtggtggtgttcagcggcgtgcccagaggcatgagcacctgccacatgcagtggcccgagcccgccgccgcctggagagccggcttcatcatctacaccgccgccctgggcttcttcggccccctgctggtgatctgcctgtgctacctgctgatcgtggtgaaggtgagaagcgccggcagaagagtgtgggcccccagctgccagagaagaagaagaagcgagagaagagtgaccagaatggtggtggccgtggtggccctgttcgtgctgtgctggatgcccttctacgtgctgaacatcgtgaacgtggtgtgccccctgcccgaggagcccgccttcttcggcctgtacttcctggtggtggccctgccctacgccaacagctgcgccaaccccatcctgtacggcttcctgagctacagattcaagcagggcttcagaagagtgctgctgagacccagcagaagagtgagaagccaggagcccaccgtgggcccccccgagaagaccgaggaggaggacgaggaggaggaggacggcgaggagagcagagagggcggcaagggcaaggagatgaacggcagagtgagccagatcacccagcccggcaccagcggccaggagagaccccccagcagagtggccagcaaggagcagcagctgctgccccaggaggccagcaccggcgagaagagcagcaccatgagaatcagctacctgtag

SEQ ID NO: 100314 - DNA, 1257 bp, synthetic construct; identical to SEQ ID NO: 100313
  misc_feature 1..1257: note = Description of Artificial Sequence: Synthetic coding sequence
  source 1..1257: mol_type = other DNA

SEQ ID NO: 100315 - DNA, 1167 bp, synthetic construct
  misc_feature 1..1167: note = Description of Artificial Sequence: Synthetic coding sequence
  source 1..1167: mol_type = other DNA
atgagcgcccccagcaccctgccccccggcggcgaggagggcctgggcaccgcctggcccagcgccgccaacgccagcagcgcccccgccgaggccgaggaggccgtggccggccccggcgacgccagagccgccggcatggtggccatccagtgcatctacgccctggtgtgcctggtgggcctggtgggcaacgccctggtgatcttcgtgatcctgagatacgccaagatgaagaccgccaccaacatctacctgctgaacctggccgtggccgacgagctgttcatgctgagcgtgcccttcgtggccagcagcgccgccctgagacactggcccttcggcagcgtgctgtgcagagccgtgctgagcgtggacggcctgaacatgttcaccagcgtgttctgcctgaccgtgctgagcgtggacagatacgtggccgtggtgcaccccctgagagccgccacctacagaagacccagcgtggccaagctgatcaacctgggcgtgtggctggccagcctgctggtgaccctgcccatcgccatcttcgccgacaccagacccgccagaggcggccaggccgtggcctgcaacctgcagtggccccaccccgcctggagcgccgtgttcgtggtgtacaccttcctgctgggcttcctgctgcccgtgctggccatcggcctgtgctacctgctgatcgtgggcaagatgagagccgtggccctgagagccggctggcagcagagaagaagaagcgagaagaagatcaccagactggtgctgatggtggtggtggtgttcgtgctgtgctggatgcccttctacgtggtgcagctgctgaacctgttcgtgaccagcctggacgccaccgtgaaccacgtgagcctgatcctgagctacgccaacagctgcgccaaccccatcctgtacggcttcctgagcgacaacttcagaagattcttccagagagtgctgtgcctgagatgctgcctgctggagggcgccggcggcgccgaggaggagcccctggactactacgccaccgccctgaagagcaagggcggcgccggctgcatgtgcccccccctgccctgccagcaggaggccctgcagcccgagcccggcagaaagagaatccccctgaccagaaccaccaccttctag

SEQ ID NO: 100316 - DNA, 1095 bp, synthetic construct
  misc_feature 1..1095: note = Description of Artificial Sequence: Synthetic coding sequence
  source 1..1095: mol_type = other DNA
atggagcccctgttccccgccagcacccccagctggaacgccagcagccccggcgccgccagcggcggcggcgacaacagaaccctggtgggccccgcccccagcgccggcgccagagccgtgctggtgcccgtgctgtacctgctggtgtgcgccgccggcctgggcggcaacaccctggtgatctacgtggtgctgagattcgccaagatgaagaccgtgaccaacatctacatcctgaacctggccgtggccgacgtgctgtacatgctgggcctgcccttcctggccacccagaacgccgccagcttctggcccttcggccccgtgctgtgcagactggtgatgaccctggacggcgtgaaccagttcaccagcgtgttctgcctgaccgtgatgagcgtggacagatacctggccgtggtgcaccccctgagcagcgccagatggagaagacccagagtggccaagctggccagcgccgccgcctgggtgctgagcctgtgcatgagcctgcccctgctggtgttcgccgacgtgcaggagggcggcacctgcaacgccagctggcccgagcccgtgggcctgtggggcgccgtgttcatcatctacaccgccgtgctgggcttcttcgcccccctgctggtgatctgcctgtgctacctgctgatcgtggtgaaggtgagagccgccggcgtgagagtgggctgcgtgagaagaagaagcgagagaaaggtgaccagaatggtgctggtggtggtgctggtgttcgccggctgctggctgcccttcttcaccgtgaacatcgtgaacctggccgtggccctgccccaggagcccgccagcgccggcctgtacttcttcgtggtgatcctgagctacgccaacagctgcgccaaccccgtgctgtacggcttcctgagcgacaacttcagacagagcttccagaaggtgctgtgcctgagaaagggcagcggcgccaaggacgccgacgccaccgagcccagacccgacagaatcagacagcagcaggaggccaccccccccgcccacagagccgccgccaacggcctgatgcagaccagcaagctgtag

SEQ ID NO: 100317 - DNA, 1095 bp, synthetic construct; identical to SEQ ID NO: 100316
  misc_feature 1..1095: note = Description of Artificial Sequence: Synthetic coding sequence
  source 1..1095: mol_type = other DNA

SEQ ID NO: 100318 - DNA, 822 bp, synthetic construct
  misc_feature 1..822: note = Description of Artificial Sequence: Synthetic coding sequence
  source 1..822: mol_type = other DNA
atggagcccctgttccccgccagcacccccagctggaacgccagcagccccggcgccgccagcggcggcggcgacaacagaaccctggtgggccccgcccccagcgccggcgccagagccgtgctggtgcccgtgctgtacctgctggtgtgcgccgccggcctgggcggcaacaccctggtgatctacgtggtgctgagattcgccaagatgaagaccgtgaccaacatctacatcctgaacctggccgtggccgacgtgctgtacatgctgggcctgcccttcctggccacccagaacgccgccagcttctggcccttcggccccgtgctgtgcagactggtgatgaccctggacggcgtgaaccagttcaccagcgtgttctgcctgaccgtgatgagcgtggacagatacctggccgtggtgcaccccctgagcagcgccagatggagaagacccagagtggccaagctggccagcgccgccgcctgggtgctgagcctgtgcatgagcctgcccctgctggtgttcgccgacgtgcaggagggcggcacctgcaacgccagctggcccgagcccgtgggcctgtggggcgccgtgttcatcatctacaccgccgtgctgggcttcttcgcccccctgctgagaggcagcggcagagccggcgacgccaacggcagaccctgggagagcagaagactgccccccagaatcgtgctgcccccccccccccagacccccgccttccccggcgcccccggccccgagagaggccccagagagccctgctggggcctgtggggcaccctggccctgctgtag

SEQ ID NO: 100319 - DNA, 6978 bp, synthetic construct
  misc_feature 1..6978: note = Description of Artificial Sequence: Synthetic coding sequence
  source 1..6978: mol_type = other DNA
atggccaccaacatcgagcagatcttcagaagcttcgtggtgagcaagttcagagagatccagcaggagctgagcagcggcagaaacgagggccagctgaacggcgagaccaacacccccatcgagggcaaccaggccggcgacgccgccgccagcgccagaagcctgcccaacgaggagatcgtgcagaagatcgaggaggtgctgagcggcgtgctggacaccgagctgagatacaagcccgacctgaaggagggcagcagaaagagcagatgcgtgagcgtgcagaccgaccccaccgacgagatccccaccaagaagagcaagaagcacaagaagcacaagaacaagaagaagaagaagaagaaggagaaggagaagaagtacaagagacagcccgaggagagcgagagcaagaccaagagccacgacgacggcaacatcgacctggagagcgacagcttcctgaagttcgacagcgagcccagcgccgtggccctggagctgcccaccagagccttcggccccagcgagaccaacgagagccccgccgtggtgctggagccccccgtggtgagcatggaggtgagcgagccccacatcctggagaccctgaagcccgccaccaagaccgccgagctgagcgtggtgagcaccagcgtgatcagcgagcagagcgagcagagcgtggccgtgatgcccgagcccagcatgaccaagatcctggacagcttcgccgccgcccccgtgcccaccaccaccctggtgctgaagagcagcgagcccgtggtgaccatgagcgtggagtaccagatgaagagcgtgctgaagagcgtggagagcaccagccccgagcccagcaagatcatgctggtggagccccccgtggccaaggtgctggagcccagcgagaccctggtggtgagcagcgagacccccaccgaggtgtaccccgagcccagcaccagcaccaccatggacttccccgagagcagcgccatcgaggccctgagactgcccgagcagcccgtggacgtgcccagcgagatcgccgacagcagcatgaccagaccccaggagctgcccgagctgcccaagaccaccgccctggagctgcaggagagcagcgtggccagcgccatggagctgcccggcccccccgccaccagcatgcccgagctgcagggcccccccgtgacccccgtgctggagctgcccggccccagcgccacccccgtgcccgagctgcccggccccctgagcacccccgtgcccgagctgcccggcccccccgccaccgccgtgcccgagctgcccggccccagcgtgacccccgtgccccagctgagccaggagctgcccggcctgcccgcccccagcatgggcctggagcccccccaggaggtgcccgagccccccgtgatggcccaggagctgcccggcctgcccctggtgaccgccgccgtggagctgcccgagcagcccgccgtgaccgtggccatggagctgaccgagcagcccgtgaccaccaccgagctggagcagcccgtgggcatgaccaccgtggagcaccccggccaccccgaggtgaccaccgccaccggcctgctgggccagcccgaggccaccatggtgctggagctgcccggccagcccgtggccaccaccgccctggagctgcccggccagcccagcgtgaccggcgtgcccgagctgcccggcctgcccagcgccaccagagccctggagctgagcggccagcccgtggccaccggcgccctggagctgcccggccccctgatggccgccggcgccctggagttcagcggccagagcggcgccgccggcgccctggagctgctgggccagcccctggccaccggcgtgctggagctgcccggccagcccggcgcccccgagctgcccggccagcccgtggccaccgtggccctggagatcagcgtgcagagcgtggtgaccaccagcgagctgagcaccatgaccgtgagccagagcctggaggtgcccagcaccaccgccctggagagctacaacaccgtggcccaggagctgcccaccaccctggtgggcgagaccagcgtgaccgtgggcgtggaccccctgatggcccccgagagccacatcctggccagcaacaccatggagacccacatcctggccagcaacaccatggacagccagatgctggccagcaacaccatggacagccagatgctggccagcaacaccatggacagccagatgctggccagcagcaccatggacagccagatgctggccaccagcagcatggacagccagatgctggccaccagcagcatggacagccagatgctggccaccagcaccatggacagccagatgctggccaccagcagcatggacagccagatgctggccaccagcagcatggacagccagatgctggccaccagcagcatggacagccagatgctggccaccagcagcatggacagccagatgctggccaccagcaccatggacagccagatgctggccaccagcaccatggacagccagatgctggccaccagcagcatggacagccagatgctggccagcggcaccatggacagccagatgctggccagcggcaccatggacgcccagatgctggccagcggcaccatggacgcccagatgctggccagcagcacccaggacagcgccatgctgggcagcaagagccccgacccctacagactggcccaggacccctacagactggcccaggacccctacagactgggccacgacccctacagactgggccacgacgcctacagactgggccaggacccctacagactgggccacgacccctacagactgacccccgacccctacagaatgagccccagaccctacagaatcgcccccagaagctacagaatcgcccccagaccctacagactggcccccagacccctgatgctggccagcagaagaagcatgatgatgagctacgccgccgagagaagcatgatgagcagctacgagagaagcatgatgagctacgagagaagcatgatgagccccatggccgagagaagcatgatgagcgcctacgagagaagcatgatgagcgcctacgagagaagcatgatgagccccatggccgagagaagcatgatgagcgcctacgagagaagcatgatgagcgcctacgagagaagcatgatgagccccatggccgacagaagcatgatgagcatgggcgccgacagaagcatgatgagcagctacagcgccgccgacagaagcatgatgagcagctacagcgccgccgacagaagcatgatgagcagctacaccgccgacagaagcatgatgagcatggccgccgacagctacaccgacagctacaccgacacctacaccgaggcctacatggtgccccccctgccccccgaggagccccccaccatgccccccctgccccccgaggagccccccatgaccccccccctgccccccgaggagccccccgagggccccgccctgcccaccgagcagagcgccctgaccgccgagaacacctggcccaccgaggtgcccagcagccccagcgaggagagcgtgagccagcccgagccccccgtgagccagagcgagatcagcgagcccagcgccgtgcccaccgactacagcgtgagcgccagcgaccccagcgtgctggtgagcgaggccgccgtgaccgtgcccgagcccccccccgagcccgagagcagcatcaccctgacccccgtggagagcgccgtggtggccgaggagcacgaggtggtgcccgagagacccgtgacctgcatggtgagcgagacccccgccatgagcgccgagcccaccgtgctggccagcgagccccccgtgatgagcgagaccgccgagaccttcgacagcatgagagccagcggccacgtggccagcgaggtgagcaccagcctgctggtgcccgccgtgaccacccccgtgctggccgagagcatcctggagccccccgccatggccgcccccgagagcagcgccatggccgtgctggagagcagcgccgtgaccgtgctggagagcagcaccgtgaccgtgctggagagcagcaccgtgaccgtgctggagcccagcgtggtgaccgtgcccgagccccccgtggtggccgagcccgactacgtgaccatccccgtgcccgtggtgagcgccctggagcccagcgtgcccgtgctggagcccgccgtgagcgtgctgcagcccagcatgatcgtgagcgagcccagcgtgagcgtgcaggagagcaccgtgaccgtgagcgagcccgccgtgaccgtgagcgagcagacccaggtgatccccaccgaggtggccatcgagagcacccccatgatcctggagagcagcatcatgagcagccacgtgatgaagggcatcaacctgagcagcggcgaccagaacctggcccccgagatcggcatgcaggagatcgccctgcacagcggcgaggagccccacgccgaggagcacctgaagggcgacttctacgagagcgagcacggcatcaacatcgacctgaacatcaacaaccacctgatcgccaaggagatggagcacaacaccgtgtgcgccgccggcaccagccccgtgggcgagatcggcgaggagaagatcctgcccaccagcgagaccaagcagagaaccgtgctggacacctaccccggcgtgagcgaggccgacgccggcgagaccctgagcagcaccggccccttcgccctggagcccgacgccaccggcaccagcaagggcatcgagttcaccaccgccagcaccctgagcctggtgaacaagtacgacgtggacctgagcctgaccacccaggacaccgagcacgacatggtgatcagcaccagccccagcggcggcagcgaggccgacatcgagggccccctgcccgccaaggacatccacctggacctgcccagcaacaacaacctggtgagcaaggacaccgaggagcccctgcccgtgaaggagagcgaccagaccctggccgccctgctgagccccaaggagagcagcggcggcgagaaggaggtgccccccccccccaaggagaccctgcccgacagcggcttcagcgccaacatcgaggacatcaacgaggccgacctggtgagacccctgctgcccaaggacatggagagactgaccagcctgagagccggcatcgagggccccctgctggccagcgacgtgggcagagacagaagcgccgccagccccgtggtgagcagcatgcccgagagagccagcgagagcagcagcgaggagaaggacgactacgagatcttcgtgaaggtgaaggacacccacgagaagagcaagaagaacaagaacagagacaagggcgagaaggagaagaagagagacagcagcctgagaagcagaagcaagagaagcaagagcagcgagcacaagagcagaaagagaaccagcgagagcagaagcagagccagaaagagaagcagcaagagcaagagccacagaagccagaccagaagcagaagcagaagcagaagaagaagaagaagcagcagaagcagaagcaagagcagaggcagaagaagcgtgagcaaggagaagagaaagagaagccccaagcacagaagcaagagcagagagagaaagagaaagagaagcagcagcagagacaacagaaagaccgtgagagccagaagcagaacccccagcagaagaagcagaagccacacccccagcagaagaagaagaagcagaagcgtgggcagaagaagaagcttcagcatcagccccagcagaagaagcagaacccccagcagaagaagcagaacccccagcagaagaagcagaacccccagcagaagaagcagaacccccagcagaagaagcagaacccccagcagaagaagcagaacccccagcagaagaagaagaagcagaagcgtggtgagaagaagaagcttcagcatcagccccgtgagactgagaagaagcagaacccccctgagaagaagattcagcagaagccccatcagaagaaagagaagcagaagcagcgagagaggcagaagccccaagagactgaccgacctggacaaggcccagctgctggagatcgccaaggccaacgccgccgccatgtgcgccaaggccggcgtgcccctgccccccaacctgaagcccgcccccccccccaccatcgaggagaaggtggccaagaagagcggcggcgccaccatcgaggagctgaccgagaagtgcaagcagatcgcccagagcaaggaggacgacgacgtgatcgtgaacaagccccacgtgagcgacgaggaggaggaggagccccccttctaccaccaccccttcaagctgagcgagcccaagcccatcttcttcaacctgaacatcgccgccgccaagcccaccccccccaagagccaggtgaccctgaccaaggagttccccgtgagcagcggcagccagcacagaaagaaggaggccgacagcgtgtacggcgagtgggtgcccgtggagaagaacggcgaggagaacaaggacgacgacaacgtgttcagcagcaacctgcccagcgagcccgtggacatcagcaccgccatgagcgagagagccctggcccagaagagactgagcgagaacgccttcgacctggaggccatgagcatgctgaacagagcccaggagagaatcgacgcctgggcccagctgaacagcatccccggccagttcaccggcagcaccggcgtgcaggtgctgacccaggagcagctggccaacaccggcgcccaggcctggatcaagaagggccagatcctggtggccgtgttcctgcccagaagcgtgcccgccgtgctgttcaccaccctgctgctgcccagacccagaatcagcagctag

SEQ ID NO: 100320 - DNA, 6912 bp, synthetic construct
  misc_feature 1..6912: note = Description of Artificial Sequence: Synthetic coding sequence
  source 1..6912: mol_type = other DNA
atggccaccaacatcgagcagatcttcagaagcttcgtggtgagcaagttcagagagatccagcaggagctgagcagcggcagaaacgagggccagctgaacggcgagaccaacacccccatcgagggcaaccaggccggcgacgccgccgccagcgccagaagcctgcccaacgaggagatcgtgcagaagatcgaggaggtgctgagcggcgtgctggacaccgagctgagatacaagcccgacctgaaggagggcagcagaaagagcagatgcgtgagcgtgcagaccgaccccaccgacgagatccccaccaagaagagcaagaagcacaagaagcacaagaacaagaagaagaagaagaagaaggagaaggagaagaagtacaagagacagcccgaggagagcgagagcaagaccaagagccacgacgacggcaacatcgacctggagagcgacagcttcctgaagttcgacagcgagcccagcgccgtggccctggagctgcccaccagagccttcggccccagcgagaccaacgagagccccgccgtggtgctggagccccccgtggtgagcatggaggtgagcgagccccacatcctggagaccctgaagcccgccaccaagaccgccgagctgagcgtggtgagcaccagcgtgatcagcgagcagagcgagcagagcgtggccgtgatgcccgagcccagcatgaccaagatcctggacagcttcgccgccgcccccgtgcccaccaccaccctggtgctgaagagcagcgagcccgtggtgaccatgagcgtggagtaccagatgaagagcgtgctgaagagcgtggagagcaccagccccgagcccagcaagatcatgctggtggagccccccgtggccaaggtgctggagcccagcgagaccctggtggtgagcagcgagacccccaccgaggtgtaccccgagcccagcaccagcaccaccatggacttccccgagagcagcgccatcgaggccctgagactgcccgagcagcccgtggacgtgcccagcgagatcgccgacagcagcatgaccagaccccaggagctgcccgagctgcccaagaccaccgccctggagctgcaggagagcagcgtggccagcgccatggagctgcccggcccccccgccaccagcatgcccgagctgcagggcccccccgtgacccccgtgctggagctgcccggccccagcgccacccccgtgcccgagctgcccggccccctgagcacccccgtgcccgagctgcccggcccccccgccaccgccgtgcccgagctgcccggccccagcgtgacccccgtgccccagctgagccaggagctgcccggcctgcccgcccccagcatgggcctggagcccccccaggaggtgcccgagccccccgtgatggcccaggagctgcccggcctgcccctggtgaccgccgccgtggagctgcccgagcagcccgccgtgaccgtggccatggagctgaccgagcagcccgtgaccaccaccgagctggagcagcccgtgggcatgaccaccgtggagcaccccggccaccccgaggtgaccaccgccaccggcctgctgggccagcccgaggccaccatggtgctggagctgcccggccagcccgtggccaccaccgccctggagctgcccggccagcccagcgtgaccggcgtgcccgagctgcccggcctgcccagcgccaccagagccctggagctgagcggccagcccgtggccaccggcgccctggagctgcccggccccctgatggccgccggcgccctggagttcagcggccagagcggcgccgccggcgccctggagctgctgggccagcccctggccaccggcgtgctggagctgcccggccagcccggcgcccccgagctgcccggccagcccgtggccaccgtggccctggagatcagcgtgcagagcgtggtgaccaccagcgagctgagcaccatgaccgtgagccagagcctggaggtgcccagcaccaccgccctggagagctacaacaccgtggcccaggagctgcccaccaccctggtgggcgagaccagcgtgaccgtgggcgtggaccccctgatggcccccgagagccacatcctggccagcaacaccatggagacccacatcctggccagcaacaccatggacagccagatgctggccagcaacaccatggacagccagatgctggccagcaacaccatggacagccagatgctggccagcagcaccatggacagccagatgctggccaccagcagcatggacagccagatgctggccaccagcagcatggacagccagatgctggccaccagcaccatggacagccagatgctggccaccagcagcatggacagccagatgctggccaccagcagcatggacagccagatgctggccaccagcagcatggacagccagatgctggccaccagcagcatggacagccagatgctggccaccagcaccatggacagccagatgctggccaccagcaccatggacagccagatgctggccaccagcagcatggacagccagatgctggccagcggcaccatggacagccagatgctggccagcggcaccatggacgcccagatgctggccagcggcaccatggacgcccagatgctggccagcagcacccaggacagcgccatgctgggcagcaagagccccgacccctacagactggcccaggacccctacagactggcccaggacccctacagactgggccacgacccctacagactgggccacgacgcctacagactgggccaggacccctacagactgggccacgacccctacagactgacccccgacccctacagaatgagccccagaccctacagaatcgcccccagaagctacagaatcgcccccagaccctacagactggcccccagacccctgatgctggccagcagaagaagcatgatgatgagctacgccgccgagagaagcatgatgagcagctacgagagaagcatgatgagctacgagagaagcatgatgagccccatggccgagagaagcatgatgagcgcctacgagagaagcatgatgagcgcctacgagagaagcatgatgagccccatggccgagagaagcatgatgagcgcctacgagagaagcatgatgagcgcctacgagagaagcatgatgagccccatggccgacagaagcatgatgagcatgggcgccgacagaagcatgatgagcagctacagcgccgccgacagaagcatgatgagcagctacagcgccgccgacagaagcatgatgagcagctacaccgccgacagaagcatgatgagcatggccgccgacagctacaccgacagctacaccgacacctacaccgaggcctacatggtgccccccctgccccccgaggagccccccaccatgccccccctgccccccgaggagccccccatgaccccccccctgccccccgaggagccccccgagggccccgccctgcccaccgagcagagcgccctgaccgccgagaacacctggcccaccgaggtgcccagcagccccagcgaggagagcgtgagccagcccgagccccccgtgagccagagcgagatcagcgagcccagcgccgtgcccaccgactacagcgtgagcgccagcgaccccagcgtgctggtgagcgaggccgccgtgaccgtgcccgagcccccccccgagcccgagagcagcatcaccctgacccccgtggagagcgccgtggtggccgaggagcacgaggtggtgcccgagagacccgtgacctgcatggtgagcgagacccccgccatgagcgccgagcccaccgtgctggccagcgagccccccgtgatgagcgagaccgccgagaccttcgacagcatgagagccagcggccacgtggccagcgaggtgagcaccagcctgctggtgcccgccgtgaccacccccgtgctggccgagagcatcctggagccccccgccatggccgcccccgagagcagcgccatggccgtgctggagagcagcgccgtgaccgtgctggagagcagcaccgtgaccgtgctggagagcagcaccgtgaccgtgctggagcccagcgtggtgaccgtgcccgagccccccgtggtggccgagcccgactacgtgaccatccccgtgcccgtggtgagcgccctggagcccagcgtgcccgtgctggagcccgccgtgagcgtgctgcagcccagcatgatcgtgagcgagcccagcgtgagcgtgcaggagagcaccgtgaccgtgagcgagcccgccgtgaccgtgagcgagcagacccaggtgatccccaccgaggtggccatcgagagcacccccatgatcctggagagcagcatcatgagcagccacgtgatgaagggcatcaacctgagcagcggcgaccagaacctggcccccgagatcggcatgcaggagatcgccctgcacagcggcgaggagccccacgccgaggagcacctgaagggcgacttctacgagagcgagcacggcatcaacatcgacctgaacatcaacaaccacctgatcgccaaggagatggagcacaacaccgtgtgcgccgccggcaccagccccgtgggcgagatcggcgaggagaagatcctgcccaccagcgagaccaagcagagaaccgtgctggacacctaccccggcgtgagcgaggccgacgccggcgagaccctgagcagcaccggccccttcgccctggagcccgacgccaccggcaccagcaagggcatcgagttcaccaccgccagcaccctgagcctggtgaacaagtacgacgtggacctgagcctgaccacccaggacaccgagcacgacatggtgatcagcaccagccccagcggcggcagcgaggccgacatcgagggccccctgcccgccaaggacatccacctggacctgcccagcaacaacaacctggtgagcaaggacaccgaggagcccctgcccgtgaaggagagcgaccagaccctggccgccctgctgagccccaaggagagcagcggcggcgagaaggaggtgccccccccccccaaggagaccctgcccgacagcggcttcagcgccaacatcgaggacatcaacgaggccgacctggtgagacccctgctgcccaaggacatggagagactgaccagcctgagagccggcatcgagggccccctgctggccagcgacgtgggcagagacagaagcgccgccagccccgtggtgagcagcatgcccgagagagccagcgagagcagcagcgaggagaaggacgactacgagatcttcgtgaaggtgaaggacacccacgagaagagcaagaagaacaagaacagagacaagggcgagaaggagaagaagagagacagcagcctgagaagcagaagcaagagaagcaagagcagcgagcacaagagcagaaagagaaccagcgagagcagaagcagagccagaaagagaagcagcaagagcaagagccacagaagccagaccagaagcagaagcagaagcagaagaagaagaagaagcagcagaagcagaagcaagagcagaggcagaagaagcgtgagcaaggagaagagaaagagaagccccaagcacagaagcaagagcagagagagaaagagaaagagaagcagcagcagagacaacagaaagaccgtgagagccagaagcagaacccccagcagaagaagcagaagccacacccccagcagaagaagaagaagcagaagcgtgggcagaagaagaagcttcagcatcagccccagcagaagaagcagaacccccagcagaagaagcagaacccccagcagaagaagcagaacccccagcagaagaagcagaacccccagcagaagaagcagaacccccagcagaagaagcagaacccccagcagaagaagaagaagcagaagcgtggtgagaagaagaagcttcagcatcagccccgtgagactgagaagaagcagaacccccctgagaagaagattcagcagaagccccatcagaagaaagagaagcagaagcagcgagagaggcagaagccccaagagactgaccgacctggacaaggcccagctgctggagatcgccaaggccaacgccgccgccatgtgcgccaaggccggcgtgcccctgccccccaacctgaagcccgcccccccccccaccatcgaggagaaggtggccaagaagagcggcggcgccaccatcgaggagctgaccgagaagtgcaagcagatcgcccagagcaaggaggacgacgacgtgatcgtgaacaagccccacgtgagcgacgaggaggaggaggagccccccttctaccaccaccccttcaagctgagcgagcccaagcccatcttcttcaacctgaacatcgccgccgccaagcccaccccccccaagagccaggtgaccctgaccaaggagttccccgtgagcagcggcagccagcacagaaagaaggaggccgacagcgtgtacggcgagtgggtgcccgtggagaagaacggcgaggagaacaaggacgacgacaacgtgttcagcagcaacctgcccagcgagggcagagtgaagagacagggcagagtgagaagacagatgaagcagcccgccgccagccacctgaccgtgaccagatgcaacagcctgtgcggcaccaagccccagagcgagaagcacagaatcgccgagaacagcgtgatcaccagcctgcccaacatcggccccagcctgcacctgtgggagggcagccccagatacaactacctggccagcagattcgccagcagactgtacagcagcagattctggtggtag

SEQ ID NO: 100321 - DNA, 7281 bp, synthetic construct
  misc_feature 1..7281: note = Description of Artificial Sequence: Synthetic coding sequence
  source 1..7281: mol_type = other DNA
atggccaccaacatcgagcagatcttcagaagcttcgtggtgagcaagttcagagagatccagcaggagctgagcagcggcagaaacgagggccagctgaacggcgagaccaacacccccatcgagggcaaccaggccggcgacgccgccgccagcgccagaagcctgcccaacgaggagatcgtgcagaagatcgaggaggtgctgagcggcgtgctggacaccgagctgagatacaagcccgacctgaaggagggcagcagaaagagcagatgcgtgagcgtgcagaccgaccccaccgacgagatccccaccaagaagagcaagaagcacaagaagcacaagaacaagaagaagaagaagaagaaggagaaggagaagaagtacaagagacagcccgaggagagcgagagcaagaccaagagccacgacgacggcaacatcgacctggagagcgacagcttcctgaagttcgacagcgagcccagcgccgtggccctggagctgcccaccagagccttcggccccagcgagaccaacgagagccccgccgtggtgctggagccccccgtggtgagcatggaggtgagcgagccccacatcctggagaccctgaagcccgccaccaagaccgccgagctgagcgtggtgagcaccagcgtgatcagcgagcagagcgagcagagcgtggccgtgatgcccgagcccagcatgaccaagatcctggacagcttcgccgccgcccccgtgcccaccaccaccctggtgctgaagagcagcgagcccgtggtgaccatgagcgtggagtaccagatgaagagcgtgctgaagagcgtggagagcaccagccccgagcccagcaagatcatgctggtggagccccccgtggccaaggtgctggagcccagcgagaccctggtggtgagcagcgagacccccaccgaggtgtaccccgagcccagcaccagcaccaccatggacttccccgagagcagcgccatcgaggccctgagactgcccgagcagcccgtggacgtgcccagcgagatcgccgacagcagcatgaccagaccccaggagctgcccgagctgcccaagaccaccgccctggagctgcaggagagcagcgtggccagcgccatggagctgcccggcccccccgccaccagcatgcccgagctgcagggcccccccgtgacccccgtgctggagctgcccggccccagcgccacccccgtgcccgagctgcccggccccctgagcacccccgtgcccgagctgcccggcccccccgccaccgccgtgcccgagctgcccggccccagcgtgacccccgtgccccagctgagccaggagctgcccggcctgcccgcccccagcatgggcctggagcccccccaggaggtgcccgagccccccgtgatggcccaggagctgcccggcctgcccctggtgaccgccgccgtggagctgcccgagcagcccgccgtgaccgtggccatggagctgaccgagcagcccgtgaccaccaccgagctggagcagcccgtgggcatgaccaccgtggagcaccccggccaccccgaggtgaccaccgccaccggcctgctgggccagcccgaggccaccatggtgctggagctgcccggccagcccgtggccaccaccgccctggagctgcccggccagcccagcgtgaccggcgtgcccgagctgcccggcctgcccagcgccaccagagccctggagctgagcggccagcccgtggccaccggcgccctggagctgcccggccccctgatggccgccggcgccctggagttcagcggccagagcggcgccgccggcgccctggagctgctgggccagcccctggccaccggcgtgctggagctgcccggccagcccggcgcccccgagctgcccggccagcccgtggccaccgtggccctggagatcagcgtgcagagcgtggtgaccaccagcgagctgagcaccatgaccgtgagccagagcctggaggtgcccagcaccaccgccctggagagctacaacaccgtggcccaggagctgcccaccaccctggtgggcgagaccagcgtgaccgtgggcgtggaccccctgatggcccccgagagccacatcctggccagcaacaccatggagacccacatcctggccagcaacaccatggacagccagatgctggccagcaacaccatggacagccagatgctggccagcaacaccatggacagccagatgctggccagcagcaccatggacagccagatgctggccaccagcagcatggacagccagatgctggccaccagcagcatggacagccagatgctggccaccagcaccatggacagccagatgctggccaccagcagcatggacagccagatgctggccaccagcagcatggacagccagatgctggccaccagcagcatggacagccagatgctggccaccagcagcatggacagccagatgctggccaccagcaccatggacagccagatgctggccaccagcaccatggacagccagatgctggccaccagcagcatggacagccagatgctggccagcggcaccatggacagccagatgctggccagcggcaccatggacgcccagatgctggccagcggcaccatggacgcccagatgctggccagcagcacccaggacagcgccatgctgggcagcaagagccccgacccctacagactggcccaggacccctacagactggcccaggacccctacagactgggccacgacccctacagactgggccacgacgcctacagactgggccaggacccctacagactgggccacgacccctacagactgacccccgacccctacagaatgagccccagaccctacagaatcgcccccagaagctacagaatcgcccccagaccctacagactggcccccagacccctgatgctggccagcagaagaagcatgatgatgagctacgccgccgagagaagcatgatgagcagctacgagagaagcatgatgagctacgagagaagcatgatgagccccatggccgagagaagcatgatgagcgcctacgagagaagcatgatgagcgcctacgagagaagcatgatgagccccatggccgagagaagcatgatgagcgcctacgagagaagcatgatgagcgcctacgagagaagcatgatgagccccatggccgacagaagcatgatgagcatgggcgccgacagaagcatgatgagcagctacagcgccgccgacagaagcatgatgagcagctacagcgccgccgacagaagcatgatgagcagctacaccgccgacagaagcatgatgagcatggccgccgacagctacaccgacagctacaccgacacctacaccgaggcctacatggtgccccccctgccccccgaggagccccccaccatgccccccctgccccccgaggagccccccatgaccccccccctgccccccgaggagccccccgagggccccgccctgcccaccgagcagagcgccctgaccgccgagaacacctggcccaccgaggtgcccagcagccccagcgaggagagcgtgagccagcccgagccccccgtgagccagagcgagatcagcgagcccagcgccgtgcccaccgactacagcgtgagcgccagcgaccccagcgtgctggtgagcgaggccgccgtgaccgtgcccgagcccccccccgagcccgagagcagcatcaccctgacccccgtggagagcgccgtggtggccgaggagcacgaggtggtgcccgagagacccgtgacctgcatggtgagcgagacccccgccatgagcgccgagcccaccgtgctggccagcgagccccccgtgatgagcgagaccgccgagaccttcgacagcatgagagccagcggccacgtggccagcgaggtgagcaccagcctgctggtgcccgccgtgaccacccccgtgctggccgagagcatcctggagccccccgccatggccgcccccgagagcagcgccatggccgtgctggagagcagcgccgtgaccgtgctggagagcagcaccgtgaccgtgctggagagcagcaccgtgaccgtgctggagcccagcgtggtgaccgtgcccgagccccccgtggtggccgagcccgactacgtgaccatccccgtgcccgtggtgagcgccctggagcccagcgtgcccgtgctggagcccgccgtgagcgtgctgcagcccagcatgatcgtgagcgagcccagcgtgagcgtgcaggagagcaccgtgaccgtgagcgagcccgccgtgaccgtgagcgagcagacccaggtgatccccaccgaggtggccatcgagagcacccccatgatcctggagagcagcatcatgagcagccacgtgatgaagggcatcaacctgagcagcggcgaccagaacctggcccccgagatcggcatgcaggagatcgccctgcacagcggcgaggagccccacgccgaggagcacctgaagggcgacttctacgagagcgagcacggcatcaacatcgacctgaacatcaacaaccacctgatcgccaaggagatggagcacaacaccgtgtgcgccgccggcaccagccccgtgggcgagatcggcgaggagaagatcctgcccaccagcgagaccaagcagagaaccgtgctggacacctaccccggcgtgagcgaggccgacgccggcgagaccctgagcagcaccggccccttcgccctggagcccgacgccaccggcaccagcaagggcatcgagttcaccaccgccagcaccctgagcctggtgaacaagtacgacgtggacctgagcctgaccacccaggacaccgagcacgacatggtgatcagcaccagccccagcggcggcagcgaggccgacatcgagggccccctgcccgccaaggacatccacctggacctgcccagcaacaacaacctggtgagcaaggacaccgaggagcccctgcccgtgaaggagagcgaccagaccctggccgccctgctgagccccaaggagagcagcggcggcgagaaggaggtgccccccccccccaaggagaccctgcccgacagcggcttcagcgccaacatcgaggacatcaacgaggccgacctggtgagacccctgctgcccaaggacatggagagactgaccagcctgagagccggcatcgagggccccctgctggccagcgacgtgggcagagacagaagcgccgccagccccgtggtgagcagcatgcccgagagagccagcgagagcagcagcgaggagaaggacgactacgagatcttcgtgaaggtgaaggacacccacgagaagagcaagaagaacaagaacagagacaagggcgagaaggagaagaagagagacagcagcctgagaagcagaagcaagagaagcaagagcagcgagcacaagagcagaaagagaaccagcgagagcagaagcagagccagaaagagaagcagcaagagcaagagccacagaagccagaccagaagcagaagcagaagcagaagaagaagaagaagcagcagaagcagaagcaagagcagaggcagaagaagcgtgagcaaggagaagagaaagagaagccccaagcacagaagcaagagcagagagagaaagagaaagagaagcagcagcagagacaacagaaagaccgtgagagccagaagcagaacccccagcagaagaagcagaagccacacccccagcagaagaagaagaagcagaagcgtgggcagaagaagaagcttcagcatcagccccagcagaagaagcagaacccccagcagaagaagcagaacccccagcagaagaagcagaacccccagcagaagaagcagaacccccagcagaagaagcagaacccccagcagaagaagcagaacccccagcagaagaagaagaagcagaagcgtggtgagaagaagaagcttcagcatcagccccgtgagactgagaagaagcagaacccccctgagaagaagattcagcagaagccccatcagaagaaagagaagcagaagcagcgagagaggcagaagccccaagagactgaccgacctggacaaggcccagctgctggagatcgccaaggccaacgccgccgccatgtgcgccaaggccggcgtgcccctgccccccaacctgaagcccgcccccccccccaccatcgaggagaaggtggccaagaagagcggcggcgccaccatcgaggagctgaccgagaagtgcaagcagatcgcccagagcaaggaggacgacgacgtgatcgtgaacaagccccacgtgagcgacgaggaggaggaggagccccccttctaccaccaccccttcaagctgagcgagcccaagcccatcttcttcaacctgaacatcgccgccgccaagcccaccccccccaagagccaggtgaccctgaccaaggagttccccgtgagcagcggcagccagcacagaaagaaggaggccgacagcgtgtacggcgagtgggtgcccgtggagaagaacggcgaggagaacaaggacgacgacaacgtgttcagcagcaacctgcccagcgagcccgtggacatcagcaccgccatgagcgagagagccctggcccagaagagactgagcgagaacgccttcgacctggaggccatgagcatgctgaacagagcccaggagagaatcgacgcctgggcccagctgaacagcatccccggccagttcaccggcagcaccggcgtgcaggtgctgacccaggagcagctggccaacaccggcgcccaggcctggatcaagaaggaccagttcctgagagccgcccccgtgaccggcggcatgggcgccgtgctgatgagaaagatgggctggagagagggcgagggcctgggcaagaacaaggagggcaacaaggagcccatcctggtggacttcaagaccgacagaaagggcctggtggccgtgggcgagagagcccagaagagaagcggcaacttcagcgccgccatgaaggacctgagcggcaagcaccccgtgagcgccctgatggagatctgcaacaagagaagatggcagccccccgagttcctgctggtgcacgacagcggccccgaccacagaaagcacttcctgttcagagtgctgagaaacggcgccctgaccagacccaactgcatgttcttcctgaacagatactag

SEQ ID NO: 100322 - DNA, 1584 bp, synthetic construct
  misc_feature 1..1584: note = Description of Artificial Sequence: Synthetic coding sequence
  source 1..1584: mol_type = other DNA
atggcccccgagagactgagaagcagagccctgagcgccttcaagctgagaggcctgctgctgagaggcgaggccatcaagtacctgaccgaggccctgcagagcatcagcgagctggagctggaggacaagctggagaagatcatcaacgccgtggagaagcagcccctgagcagcaacatgatcgagagaagcgtggtggaggccgccgtgcaggagtgcagccagagcgtggacgagaccatcgagcacgtgttcaacatcatcggcgccttcgacatccccagattcgtgtacaacagcgagagaaagaagttcctgcccctgctgatgaccaaccaccccgcccccaacctgttcggcacccccagagacaaggccgagatgttcagagagagatacaccatcctgcaccagagaacccacagacacgagctgttcaccccccccgtgatcggcagccaccccgacgagagcggcagcaagttccagctgaagaccatcgagaccctgctgggcagcaccaccaagatcggcgacgccatcgtgctgggcatgatcacccagctgaaggagggcaagttcttcctggaggaccccaccggcaccgtgcagctggacctgagcaaggcccagttccacagcggcctgtacaccgaggcctgcttcgtgctggccgagggctggttcgaggaccaggtgttccacgtgaacgccttcggcttcccccccaccgagcccagcagcaccaccagagcctactacggcaacatcaacttcttcggcggccccagcaacaccagcgtgaagaccagcgccaagctgaagcagctggaggaggagaacaaggacgccatgttcgtgttcctgagcgacgtgtggctggaccaggtggaggtgctggagaagctgagaatcatgttcgccggctacagccccgccccccccacctgcttcatcctgtgcggcaacttcagcagcgccccctacggcaagaaccaggtgcaggccctgaaggacagcctgaagaccctggccgacatcatctgcgagtaccccgacatccaccagagcagcagattcgtgttcgtgcccggccccgaggaccccggcttcggcagcatcctgcccagaccccccctggccgagagcatcaccaacgagttcagacagagagtgcccttcagcgtgttcaccaccaacccctgcagaatccagtactgcacccaggagatcaccgtgttcagagaggacctggtgaacaagatgtgcagaaactgcgtgagattccccagcagcaacctggccatccccaaccacttcgtgaagaccatcctgagccagggccacctgacccccctgcccctgtacgtgtgccccgtgtactgggcctacgactacgccctgagagtgtaccccgtgcccgacctgctggtgatcgccgacaagtacgaccccttcaccaccaccaacaccgagtgcctgtgcatcaaccccggcagcttccccagaagcggcttcagcttcaaggtgttctaccccagcaacaagaccgtggaggacagcaagctgcagggcttctag

SEQ ID NO: 100323 - DNA, 3900 bp, synthetic construct
  misc_feature 1..3900: note = Description of Artificial Sequence: Synthetic coding sequence
  source 1..3900: mol_type = other DNA
atgcagcaggccccccagccctacgagttcttcagcgaggagaacagccccaagtggagaggcctgctggtgagcgccctgagaaaggtgcaggagcaggtgcaccccaccctgagcgccaacgaggagagcctgtactacatcgaggagctgatcttccagctgctgaacaagctgtgcatggcccagcccagaaccgtgcaggacgtggaggagagagtgcagaagaccttcccccaccccatcgacaagtgggccatcgccgacgcccagagcgccatcgagaagagaaagagaagaaaccccctgctgctgcccgtggacaagatccaccccagcctgaaggaggtgctgggctacaaggtggactaccacgtgagcctgtacatcgtggccgtgctggagtacatcagcgccgacatcctgaagctggccggcaactacgtgttcaacatcagacactacgagatcagccagcaggacatcaaggtgagcatgtgcgccgacaaggtgctgatggacatgttcgaccaggacgacatcggcctggtgagcctgtgcgaggacgagcccagcagcagcggcgagctgaactactacgacctggtgagaaccgagatcgccgaggagagacagtacctgagagagctgaacatgatcatcaaggtgttcagagaggccttcctgagcgacagaaagctgttcaagcccagcgacatcgagaagatcttcagcaacatcagcgacatccacgagctgaccgtgaagctgctgggcctgatcgaggacaccgtggagatgaccgacgagagcagcccccaccccctggccggcagctgcttcgaggacctggccgaggagcaggccttcgacccctacgagaccctgagccaggacatcctgagccccgagttccacgagcacttcaacaagctgatggccagacccgccgtggccctgcacttccagcagctgaaggcctgcagcgaggagcaggaggacagagagtgcctgaaccaggccatcaccgccctgatgaacctgcagggcagcatggacagaatctacaagcagtacagccccagaagaagacccggcgaccccgtgtgccccttctacagccaccagctgagaagcaagcacctggccatcaagaagatgaacgagatccagaagaacatcgacggctgggagggcaaggacatcggccagtgctgcaacgagttcatcatggagggccccctgaccagaatcggcgccaagcacgagagacacatcttcctgttcgacggcctgatgatcagctgcaagcccaaccacggccagaccagactgcccggctacagcagcgccgagtacagactgaaggagaagttcgtgatgagaaagatccagatctgcgacaaggaggacacctgcgagcacaagcacgccttcgagctggtgagcaaggacgagaacagcatcatcttcgccgccaagagcgccgaggagaagaacaactggatggccgccctgatcagcctgcactacagaagcaccctggacagaatgctggacagcgtgctgctgaaggaggagaacgagcagcccctgagactgcccagccccgaggtgtacagattcgtggtgaaggacagcgaggagaacatcgtgttcgaggacaacctgcagagcagaagcggcatccccatcatcaagggcggcaccgtggtgaagctgatcgagagactgacctaccacatgtacgccgaccccaacttcgtgagaaccttcctgaccacctacagaagcttctgcaagccccaggagctgctgagcctgctgatcgagagattcgagatccccgagcccgagcccaccgacgccgacaagctggccatcgagaagggcgagcagcccatcagcgccgacctgaagagattcagaaaggagtacgtgcagcccgtgcagctgagaatcctgaacgtgttcagacactgggtggagcaccacttctacgacttcgagagagacctggagctgctggagagactggagagcttcatcagcagcgtgagaggcaaggccatgaagaagtgggtggagagcatcgccaagatcatcagaagaaagaagcaggcccaggccaacggcgtgagccacaacatcaccttcgagagcccccccccccccatcgagtggcacatcagcaagcccggccagttcgagaccttcgacctgatgaccctgcaccccatcgagatcgccagacagctgaccctgctggagagcgacctgtacagaaaggtgcagcccagcgagctggtgggcagcgtgtggaccaaggaggacaaggagatcaacagccccaacctgctgaagatgatcagacacaccaccaacctgaccctgtggttcgagaagtgcatcgtggaggccgagaacttcgaggagagagtggccgtgctgagcagaatcatcgagatcctgcaggtgttccaggacctgaacaacttcaacggcgtgctggagatcgtgagcgccgtgaacagcgtgagcgtgtacagactggaccacaccttcgaggccctgcaggagagaaagagaaagatcctggacgaggccgtggagctgagccaggaccacttcaagaagtacctggtgaagctgaagagcatcaaccccccctgcgtgcccttcttcggcatctacctgaccaacatcctgaagaccgaggagggcaacaacgacttcctgaagaagaagggcaaggacctgatcaacttcagcaagagaagaaaggtggccgagatcaccggcgagatccagcagtaccagaaccagccctactgcctgagaatcgagcccgacatgagaagattcttcgagaacctgaaccccatgggcagcgccagcgagaaggagttcaccgactacctgttcaacaagagcctggagatcgagcccagaaactgcaagcagccccccagattccccagaaagagcaccttcagcctgaagagccccggcatcagacccaacaccggcagacacggcagcaccagcggcaccctgagaggccaccccacccccctggagagagagccctgcaagatcagcttcagcagaatcgccgagaccgagctggagagcaccgtgagcgcccccaccagccccaacacccccagcaccccccccgtgagcgccagcagcgacctgagcgtgttcctggacgtggacctgaacagcagctgcggcagcaacagcatcttcgcccccgtgctgctgccccacagcaagagcttcttcagcagctgcggcagcctgcacaagctgagcgaggagcccctgatccccccccccctgccccccagaaagaagttcgaccacgacgccagcaacagcaagggcaacatgaagagcgacgacgacccccccgccatcccccccagacagccccccccccccaaggtgaagcccagagtgcccgtgcccaccggcgccttcgacggccccctgcacagcccccccccccccccccccagagaccccctgcccgacacccccccccccgtgcccctgagaccccccgagcacttcatcaactgccccttcaacctgcagcccccccccctgggccacctgcacagagacagcgactggctgagagacatcagcacctgccccaacagccccagcaccccccccagcacccccagccccagagtgcccagaagatgctacgtgctgagcagcagccagaacaacctggcccacccccccgccccccccgtgccccccagacagaacagcagcccccacctgcccaagctgccccccaagacctacaagagagagctgagccacccccccctgtacagactgcccctgctggagaacgccgagaccccccagtag

SEQ ID NO: 100324 - DNA, 1389 bp, synthetic construct
  misc_feature 1..1389: note = Description of Artificial Sequence: Synthetic coding sequence
  source 1..1389: mol_type = other DNA
atgctgctgctggccagatgcctgctgctggtgctggtgagcagcctgctggtgtgcagcggcctggcctgcggccccggcagaggcttcggcaagagaagacaccccaagaagctgacccccctggcctacaagcagttcatccccaacgtggccgagaagaccctgggcgccagcggcagatacgagggcaagatcagcagaaacagcgagagattcaaggagctgacccccaactacaaccccgacatcatcttcaaggacgaggagaacaccggcgccgacagactgatgacccagagatgcaaggacaagctgaacgccctggccatcagcgtgatgaaccagtggcccggcgtgaagctgagagtgaccgagggctgggacgaggacggccaccacagcgaggagagcctgcactacgagggcagagccgtggacatcaccaccagcgacagagacagaagcaagtacggcatgctggccagactggccgtggaggccggcttcgactgggtgtactacgagagcaaggcccacatccactgcagcgtgaaggccgagaacagcgtggccgccaagagcggcggctgcttccccggcagcgccaccgtgcacctggagcagggcggcaccaagctggtgaaggacctgagccccggcgacagagtgctggccgccgacgaccagggcagactgctgtacagcgacttcctgaccttcctggacagagacgacggcgccaagaaggtgttctacgtgatcgagaccagagagcccagagagagactgctgctgaccgccgcccacctgctgttcgtggccccccacaacgacagcgccaccggcgagcccgaggccagcagcggcagcggcccccccagcggcggcgccctgggccccagagccctgttcgccagcagagtgagacccggccagagagtgtacgtggtggccgagagagacggcgacagaagactgctgcccgccgccgtgcacagcgtgaccctgagcgaggaggccgccggcgcctacgcccccctgaccgcccagggcaccatcctgatcaacagagtgctggccagctgctacgccgtgatcgaggagcacagctgggcccacagagccttcgcccccttcagactggcccacgccctgctggccgccctggcccccgccagaaccgacagaggcggcgacagcggcggcggcgacagaggcggcggcggcggcagagtggccctgaccgcccccggcgccgccgacgcccccggcgccggcgccaccgccggcatccactggtacagccagctgctgtaccagatcggcacctggctgctggacagcgaggccctgcaccccctgggcatggccgtgaagagcagctag

SEQ ID NO: 100325 - DNA, 3456 bp, synthetic construct
  misc_feature 1..3456: note = Description of Artificial Sequence: Synthetic coding sequence
  source 1..3456: mol_type = other DNA
atgagcagcgagtgcgacggcggcagcaaggccgtgatgaacggcctggcccccggcagcaacggccaggacaaggccaccgccgaccccctgagagccagaagcatcagcgccgtgaagatcatccccgtgaagaccgtgaagaacgccagcggcctggtgctgcccaccgacatggacctgaccaagatctgcaccggcaagggcgccgtgaccctgagagccagcagcagctacagagagacccccagcagcagccccgccagcccccaggagaccagacagcacgagagcaagcccggcctggagcccgagcccagcagcgccgacgagtggagactgagcagcagcgccgacgccaacggcaacgcccagcccagcagcctggccgccaagggctacagaagcgtgcaccccaacctgcccagcgacaagagccaggacgccaccagcagcagcgccgcccagcccgaggtgatcgtggtgcccctgtacctggtgaacaccgacagaggccaggagggcaccgccagaccccccacccccctgggccccctgggctgcgtgcccaccatccccgccaccgccagcgccgccagccccctgaccttccccaccctggacgacttcatccccccccacctgcagagatggccccaccacagccagcccgccagagccagcggcagcttcgcccccatcagccagaccccccccagcttcagcccccccccccccctggtgccccccgcccccgaggacctgagaagagtgagcgagcccgacctgaccggcgccgtgagcagcaccgacagcagccccctgctgaacgaggtgagcagcagcctgatcggcaccgacagccaggccttccccagcgtgagcaagcccagcagcgcctaccccagcaccaccatcgtgaaccccaccatcgtgctgctgcagcacaacagagagcagcagaagagactgagcagcctgagcgaccccgtgagcgagagaagagtgggcgagcaggacagcgcccccacccaggagaagcccaccagccccggcaaggccatcgagaagagagccaaggacgacagcagaagagtggtgaagagcacccaggacctgagcgacgtgagcatggacgaggtgggcatccccctgagaaacaccgagagaagcaaggactggtacaagaccatgttcaagcagatccacaagctgaacagagacacccccgaggagaacccctacttccccacctacaagttccccgagctgcccgagatccagcagaccagcgaggagaccaagagctgcagcgtgatgagccccagactggagtgcagcggcaccgtgatcgcccactgcagcctgaagctgctggacagcagcaacccccccaccagcgccagccaggtggccggcaccgccgacgacgacagcgacctgtacagccccagatacagcttcagcgaggacaccaagagccccctgagcgtgcccagaagcaagagcgagatgagctacatcgacggcgagaaggtggtgaagagaagcgccaccctgcccctgcccgccagaagcagcagcctgaagagcagcagcgagagaaacgactgggagccccccgacaagaaggtggacaccagaaagtacagagccgagcccaagagcatctacgagtaccagcccggcaagagcagcgtgctgaccaacgagaagatgagcagagacatcagccccgaggagatcgacctgaagaacgagccctggtacaagttcttcagcgagctggagttcggcaagcccccccccaagaagatctgggactacacccccggcgactgcagcatcctgcccagagaggacagaaagaccaacctggacaaggacctgagcctgtgccagaccgagctggaggccgacctggagaagatggagaccctgaacaaggcccccagcgccaacgtgccccagagcagcgccatcagccccacccccgagatcagcagcgagacccccggctacatctacagcagcaacttccacgccgtgaagagagagagcgacggcgcccccggcgacctgaccagcctggagaacgagagacagatctacaagagcgtgctggagggcggcgacatccccctgcagggcctgagcggcctgaagagacccagcagcagcgccagcaccaaggacagcgagagccccagacacttcatccccgccgactacctggagagcaccgaggagttcatcagaagaagacacgacgacaaggagaagctgctggccgaccagagaagactgaagagagagcaggaggaggccgacatcgccgccagaagacacaccggcgtgatccccacccaccaccagttcatcaccaacgagagattcggcgacctgctgaacatcgacgacaccgccaagagaaagagcggcagcgagatgagacccgccagagccaagttcgacttcaaggcccagaccctgaaggagctgcccctgcagaagggcgacatcgtgtacatctacaagcagatcgaccagaactggtacgagggcgagcaccacggcagagtgggcatcttccccagaacctacatcgagctgctgccccccgccgagaaggcccagcccaagaagctgacccccgtgcaggtgctggagtacggcgaggccatcgccaagttcaacttcaacggcgacacccaggtggagatgagcttcagaaagggcgagagaatcaccctgctgagacaggtggacgagaactggtacgagggcagaatccccggcaccagcagacagggcatcttccccatcacctacgtggacgtgatcaagagacccctggtgaagaaccccgtggactacatggacctgcccttcagcagcagccccagcagaagcgccaccgccagcccccagccctggagagaggagagcggccagtacgagagaaaggccgagagaggcgccggcgagagaggccccggcggccccaagatcagcaagaagagctgcctgaagcccagcgacgtggtgagatgcctgagcaccgagcagagactgagcgacctgaacacccccgaggagagcagacccggcaagcccctgggcagcgccttccccggcagcgaggccgagcagaccgagagacacagaggcggcgagcaggccggcagaaaggccgccagaagaggcggcagccagcagccccaggcccagcagagaagagtgacccccgacagaagccagaccagccaggacctgttcagctaccaggccctgtacagctacatcccccagaacgacgacgagctggagctgagagacggcgacatcgtggacgtgatggagaagtgcgacgacggctggttcgtgggcaccagcagaagaaccaagcagttcggcaccttccccggcaactacgtgaagcccctgtacctgtag

SEQ ID NO: 100326 - DNA, 2346 bp, synthetic construct
  misc_feature 1..2346: note = Description of Artificial Sequence: Synthetic coding sequence
  source 1..2346: mol_type = other DNA
atgagcagcgagtgcgacggcggcagcaaggccgtgatgaacggcctggcccccggcagcaacggccaggacaaggccaccgccgaccccctgagagccagaagcatcagcgccgtgaagatcatccccgtgaagaccgtgaagaacgccagcggcctggtgctgcccaccgacatggacctgaccaagatctgcaccggcaagggcgccgtgaccctgagagccagcagcagctacagagagacccccagcagcagccccgccagcccccaggagaccagacagcacgagagcaagcccggcctggagcccgagcccagcagcgccgacgagtggagactgagcagcagcgccgacgccaacggcaacgcccagcccagcagcctggccgccaagggctacagaagcgtgcaccccaacctgcccagcgacaagagccaggacagcagccccctgctgaacgaggtgagcagcagcctgatcggcaccgacagccaggccttccccagcgtgagcaagcccagcagcgcctaccccagcaccaccatcgtgaaccccaccatcgtgctgctgcagcacaacagagagcagcagaagagactgagcagcctgagcgaccccgtgagcgagagaagagtgggcgagcaggacagcgcccccacccaggagaagcccaccagccccggcaaggccatcgagaagagagccaaggacgacagcagaagagtggtgaagagcacccaggacctgagcgacgtgagcatggacgaggtgggcatccccctgagaaacaccgagagaagcaaggactggtacaagaccatgttcaagcagatccacaagctgaacagagacgacgacagcgacctgtacagccccagatacagcttcagcgaggacaccaagagccccctgagcgtgcccagaagcaagagcgagatgagctacatcgacggcgagaaggtggtgaagagaagcgccaccctgcccctgcccgccagaagcagcagcctgaagagcagcagcgagagaaacgactgggagccccccgacaagaaggtggacaccagaaagtacagagccgagcccaagagcatctacgagtaccagcccggcaagagcagcgtgctgaccaacgagaagatgagcagcgccatcagccccacccccgagatcagcagcgagacccccggctacatctacagcagcaacttccacgccgtgaagagagagagcgacggcgcccccggcgacctgaccagcctggagaacgagagacagatctacaagagcgtgctggagggcggcgacatccccctgcagggcctgagcggcctgaagagacccagcagcagcgccagcaccaaggacagcgagagccccagacacttcatccccgccgactacctggagagcaccgaggagttcatcagaagaagacacgacgacaaggagaagctgctggccgaccagagaagactgaagagagagcaggaggaggccgacatcgccgccagaagacacaccggcgtgatccccacccaccaccagttcatcaccaacgagagattcggcgacctgctgaacatcgacgacaccgccaagagaaagagcggcagcgagatgagacccgccagagccaagttcgacttcaaggcccagaccctgaaggagctgcccctgcagaagggcgacatcgtgtacatctacaagcagatcgaccagaactggtacgagggcgagcaccacggcagagtgggcatcttccccagaacctacatcgagctgctgccccccgccgagaaggcccagcccaagaagctgacccccgtgcaggtgctggagtacggcgaggccatcgccaagttcaacttcaacggcgacacccaggtggagatgagcttcagaaagggcgagagaatcaccctgctgagacaggtggacgagaactggtacgagggcagaatccccggcaccagcagacagggcatcttccccatcacctacgtggacgtgatcaagagacccctggtgaagaaccccgtggactacatggacctgcccttcagcagcagccccagcagaagcgccaccgccagcccccagcagccccaggcccagcagagaagagtgacccccgacagaagccagaccagccaggacctgttcagctaccaggccctgtacagctacatcccccagaacgacgacgagctggagctgagagacggcgacatcgtggacgtgatggagaagtgcgacgacggctggttcgtgggcaccagcagaagaaccaagcagttcggcaccttccccggcaactacgtgaagcccctgtacctgtag

SEQ ID NO: 100327 - DNA, 2541 bp, synthetic construct
  misc_feature 1..2541: note = Description of Artificial Sequence: Synthetic coding sequence
  source 1..2541: mol_type = other DNA
atgagcagcgagtgcgacggcggcagcaaggccgtgatgaacggcctggcccccggcagcaacggccaggacaaggccaccgccgaccccctgagagccagaagcatcagcgccgtgaagatcatccccgtgaagaccgtgaagaacgccagcggcctggtgctgcccaccgacatggacctgaccaagatctgcaccggcaagggcgccgtgaccctgagagccagcagcagctacagagagacccccagcagcagccccgccagcccccaggagaccagacagcacgagagcaagcccgacgagtggagactgagcagcagcgccgacgccaacggcaacgcccagcccagcagcctggccgccaagggctacagaagcgtgcaccccaacctgcccagcgacaagagccaggacagcagccccctgctgaacgaggtgagcagcagcctgatcggcaccgacagccaggccttccccagcgtgagcaagcccagcagcgcctaccccagcaccaccatcgtgaaccccaccatcgtgctgctgcagcacaacagagagcagcagaagagactgagcagcctgagcgaccccgtgagcgagagaagagtgggcgagcaggacagcgcccccacccaggagaagcccaccagccccggcaaggccatcgagaagagagccaaggacgacagcagaagagtggtgaagagcacccaggacctgagcgacgtgagcatggacgaggtgggcatccccctgagaaacaccgagagaagcaaggactggtacaagaccatgttcaagcagatccacaagctgaacagagacacccccgaggagaacccctacttccccacctacaagttccccgagctgcccgagatccagcagaccagcgaggaggacaacccctacacccccacctaccagttccccgccagcacccccagccccaagagcgaggacgacgacagcgacctgtacagccccagatacagcttcagcgaggacaccaagagccccctgagcgtgcccagaagcaagagcgagatgagctacatcgacggcgagaaggtggtgaagagaagcgccaccctgcccctgcccgccagaagcagcagcctgaagagcagcagcgagagaaacgactgggagccccccgacaagaaggtggacaccagaaagtacagagccgagcccaagagcatctacgagtaccagcccggcaagagcagcgtgctgaccaacgagaagatgagcagagacatcagccccgaggagatcgacctgaagaacgagccctggtacaagttcttcagcgagctggagttcggcaagcccagcagcgccatcagccccacccccgagatcagcagcgagacccccggctacatctacagcagcaacttccacgccgtgaagagagagagcgacggcgcccccggcgacctgaccagcctggagaacgagagacagatctacaagagcgtgctggagggcggcgacatccccctgcagggcctgagcggcctgaagagacccagcagcagcgccagcaccaaggacagcgagagccccagacacttcatccccgccgactacctggagagcaccgaggagttcatcagaagaagacacgacgacaaggagaagctgctggccgaccagagaagactgaagagagagcaggaggaggccgacatcgccgccagaagacacaccggcgtgatccccacccaccaccagttcatcaccaacgagagattcggcgacctgctgaacatcgacgacaccgccaagagaaagagcggcagcgagatgagacccgccagagccaagttcgacttcaaggcccagaccctgaaggagctgcccctgcagaagggcgacatcgtgtacatctacaagcagatcgaccagaactggtacgagggcgagcaccacggcagagtgggcatcttccccagaacctacatcgagctgctgccccccgccgagaaggcccagcccaagaagctgacccccgtgcaggtgctggagtacggcgaggccatcgccaagttcaacttcaacggcgacacccaggtggagatgagcttcagaaagggcgagagaatcaccctgctgagacaggtggacgagaactggtacgagggcagaatccccggcaccagcagacagggcatcttccccatcacctacgtggacgtgatcaagagacccctggtgaagaaccccgtggactacatggacctgcccttcagcagcagccccagcagaagcgccaccgccagcccccagcagccccaggcccagcagagaagagtgacccccgacagaagccagaccagccaggacctgttcagctaccaggccctgtacagctacatcccccagaacgacgacgagctggagctgagagacggcgacatcgtggacgtgatggagaagtgcgacgacggctggttcgtgggcaccagcagaagaaccaagcagttcggcaccttccccggcaactacgtgaagcccctgtacctgtag

SEQ ID NO: 100328 - DNA, 2718 bp, synthetic construct
  misc_feature 1..2718: note = Description of Artificial Sequence: Synthetic coding sequence
  source 1..2718: mol_type = other DNA
atgagcagcgagtgcgacggcggcagcaaggccgtgatgaacggcctggcccccggcagcaacggccaggacaaggccaccgccgaccccctgagagccagaagcatcagcgccgtgaagatcatccccgtgaagaccgtgaagaacgccagcggcctggtgctgcccaccgacatggacctgaccaagatctgcaccggcaagggcgccgtgaccctgagagccagcagcagctacagagagacccccagcagcagccccgccagcccccaggagaccagacagcacgagagcaagcccggcctggagcccgagcccagcagcgccgacgagtggagactgagcagcagcgccgacgccaacggcaacgcccagcccagcagcctggccgccaagggctacagaagcgtgcaccccaacctgcccagcgacaagagccagagatggccccaccacagccagcccgccagagccagcggcagcttcgcccccatcagccagaccccccccagcttcagcccccccccccccctggtgccccccgcccccgaggacctgagaagagtgagcgagcccgacctgaccggcgccgtgagcagcaccgacagcagccccctgctgaacgaggtgagcagcagcctgatcggcaccgacagccaggccttccccagcgtgagcaagcccagcagcgcctaccccagcaccaccatcgtgaaccccaccatcgtgctgctgcagcacaacagagagcagcagaagagactgagcagcctgagcgaccccgtgagcgagagaagagtgggcgagcaggacagcgcccccacccaggagaagcccaccagccccggcaaggccatcgagaagagagccaaggacgacagcagaagagtggtgaagagcacccaggacctgagcgacgtgagcatggacgaggtgggcatccccctgagaaacaccgagagaagcaaggactggtacaagaccatgttcaagcagatccacaagctgaacagagacgacgacagcgacctgtacagccccagatacagcttcagcgaggacaccaagagccccctgagcgtgcccagaagcaagagcgagatgagctacatcgacggcgagaaggtggtgaagagaagcgccaccctgcccctgcccgccagaagcagcagcctgaagagcagcagcgagagaaacgactgggagccccccgacaagaaggtggacaccagaaagtacagagccgagcccaagagcatctacgagtaccagcccggcaagagcagcgtgctgaccaacgagaagatgagcagagacatcagccccgaggagatcgacctgaagaacgagccctggtacaagttcttcagcgagctggagttcggcaagcccccccccaagaagatctgggactacacccccggcgactgcagcatcctgcccagagaggacagaaagagcagcgccatcagccccacccccgagatcagcagcgagacccccggctacatctacagcagcaacttccacgccgtgaagagagagagcgacggcgcccccggcgacctgaccagcctggagaacgagagacagatctacaagagcgtgctggagggcggcgacatccccctgcagggcctgagcggcctgaagagacccagcagcagcgccagcaccaaggacagcgagagccccagacacttcatccccgccgactacctggagagcaccgaggagttcatcagaagaagacacgacgacaaggagaagctgctggccgaccagagaagactgaagagagagcaggaggaggccgacatcgccgccagaagacacaccggcgtgatccccacccaccaccagttcatcaccaacgagagattcggcgacctgctgaacatcgacgacaccgccaagagaaagagcggcagcgagatgagacccgccagagccaagttcgacttcaaggcccagaccctgaaggagctgcccctgcagaagggcgacatcgtgtacatctacaagcagatcgaccagaactggtacgagggcgagcaccacggcagagtgggcatcttccccagaacctacatcgagctgctgccccccgccgagaaggcccagcccaagaagctgacccccgtgcaggtgctggagtacggcgaggccatcgccaagttcaacttcaacggcgacacccaggtggagatgagcttcagaaagggcgagagaatcaccctgctgagacaggtggacgagaactggtacgagggcagaatccccggcaccagcagacagggcatcttccccatcacctacgtggacgtgatcaagagacccctggtgaagaaccccgtggactacatggacctgcccttcagcagcagccccagcagaagcgccaccgccagcccccagctgagccaccacagcctgagagccggccccgacctgaccgagagcgagaagagctacgtgcagccccaggcccagcagagaagagtgacccccgacagaagccagaccagccaggacctgttcagctaccaggccctgtacagctacatcccccagaacgacgacgagctggagctgagagacggcgacatcgtggacgtgatggagaagtgcgacgacggctggttcgtgggcaccagcagaagaaccaagcagttcggcaccttccccggcaactacgtgaagcccctgtacctgtag

SEQ ID NO: 100329 - DNA, 3015 bp, synthetic construct
  misc_feature 1..3015: note = Description of Artificial Sequence: Synthetic coding sequence
  source 1..3015: mol_type = other DNA
atgagcagcgagtgcgacggcggcagcaaggccgtgatgaacggcctggcccccggcagcaacggccaggacaaggccaccgccgaccccctgagagccagaagcatcagcgccgtgaagatcatccccgtgaagaccgtgaagaacgccagcggcctggtgctgcccaccgacatggacctgaccaagatctgcaccggcaagggcgccgtgaccctgagagccagcagcagctacagagagacccccagcagcagccccgccagcccccaggagaccagacagcacgagagcaagcccgacgagtggagactgagcagcagcgccgacgccaacggcaacgcccagcccagcagcctggccgccaagggctacagaagcgtgcaccccaacctgcccagcgacaagagccaggacgccaccagcagcagcgccgcccagcccgaggtgatcgtggtgcccctgtacctggtgaacaccgacagaggccaggagggcaccgccagaccccccacccccctgggccccctgggctgcgtgcccaccatccccgccaccgccagcgccgccagccccctgaccttccccaccctggacgacttcatccccccccacctgcagagatggccccaccacagccagcccgccagagccagcggcagcttcgcccccatcagccagaccccccccagcttcagcccccccccccccctggtgccccccgcccccgaggacctgagaagagtgagcgagcccgacctgaccggcgccgtgagcagcaccgacagcagccccctgctgaacgaggtgagcagcagcctgatcggcaccgacagccaggccttccccagcgtgagcaagcccagcagcgcctaccccagcaccaccatcgtgaaccccaccatcgtgctgctgcagcacaacagagagcagcagaagagactgagcagcctgagcgaccccgtgagcgagagaagagtgggcgagcaggacagcgcccccacccaggagaagcccaccagccccggcaaggccatcgagaagagagccaaggacgacagcagaagagtggtgaagagcacccaggacctgagcgacgtgagcatggacgaggtgggcatccccctgagaaacaccgagagaagcaaggactggtacaagaccatgttcaagcagatccacaagctgaacagagacacccccgaggagaacccctacttccccacctacaagttccccgagctgcccgagatccagcagaccagcgaggacgacgacagcgacctgtacagccccagatacagcttcagcgaggacaccaagagccccctgagcgtgcccagaagcaagagcgagatgagctacatcgacggcgagaaggtggtgaagagaagcgccaccctgcccctgcccgccagaagcagcagcctgaagagcagcagcgagagaaacgactgggagccccccgacaagaaggtggacaccagaaagtacagagccgagcccaagagcatctacgagtaccagcccggcaagagcagcgtgctgaccaacgagaagatgagcagagacatcagccccgaggagatcgacctgaagaacgagccctggtacaagttcttcagcgagctggagttcggcaagcccccccccaagaagatctgggactacacccccggcgactgcagcatcctgcccagagaggacagaaagaccaacctggacaaggacctgagcctgtgccagaccgagctggaggccgacctggagaagatggagaccctgaacaaggcccccagcgccaacgtgccccagagcagcgccatcagccccacccccgagatcagcagcgagacccccggctacatctacagcagcaacttccacgccgtgaagagagagagcgacggcgcccccggcgacctgaccagcctggagaacgagagacagatctacaagagcgtgctggagggcggcgacatccccctgcagggcctgagcggcctgaagagacccagcagcagcgccagcaccaaggacagcgagagccccagacacttcatccccgccgactacctggagagcaccgaggagttcatcagaagaagacacgacgacaaggagaagctgctggccgaccagagaagactgaagagagagcaggaggaggccgacatcgccgccagaagacacaccggcgtgatccccacccaccaccagttcatcaccaacgagagattcggcgacctgctgaacatcgacgacaccgccaagagaaagagcggcagcgagatgagacccgccagagccaagttcgacttcaaggcccagaccctgaaggagctgcccctgcagaagggcgacatcgtgtacatctacaagcagatcgaccagaactggtacgagggcgagcaccacggcagagtgggcatcttccccagaacctacatcgagctgctgccccccgccgagaaggcccagcccaagaagctgacccccgtgcaggtgctggagtacggcgaggccatcgccaagttcaacttcaacggcgacacccaggtggagatgagcttcagaaagggcgagagaatcaccctgctgagacaggtggacgagaactggtacgagggcagaatccccggcaccagcagacagggcatcttccccatcacctacgtggacgtgatcaagagacccctggtgaagaaccccgtggactacatggacctgcccttcagcagcagccccagcagaagcgccaccgccagcccccagcagccccaggcccagcagagaagagtgacccccgacagaagccagaccagccaggacctgttcagctaccaggccctgtacagctacatcccccagaacgacgacgagctggagctgagagacggcgacatcgtggacgtgatggagaagtgcgacgacggctggttcgtgggcaccagcagaagaaccaagcagttcggcaccttccccggcaactacgtgaagcccctgtacctgtag

SEQ ID NO: 100330 - DNA, 3879 bp, synthetic construct
  misc_feature 1..3879: note = Description of Artificial Sequence: Synthetic coding sequence
  source 1..3879: mol_type = other DNA
atgagcagcgagtgcgacggcggcagcaaggccgtgatgaacggcctggcccccggcagcaacggccaggacaaggccaccgccgaccccctgagagccagaagcatcagcgccgtgaagatcatccccgtgaagaccgtgaagaacgccagcggcctggtgctgcccaccgacatggacctgaccaagatctgcaccggcaagggcgccgtgaccctgagagccagcagcagctacagagagacccccagcagcagccccgccagcccccaggagaccagacagcacgagagcaagcccggcctggagcccgagcccagcagcgccgacgagtggagactgagcagcagcgccgacgccaacggcaacgcccagcccagcagcctggccgccaagggctacagaagcgtgcaccccaacctgcccagcgacaagagccaggacgccaccagcagcagcgccgcccagcccgaggtgatcgtggtgcccctgtacctggtgaacaccgacagaggccaggagggcaccgccagaccccccacccccctgggccccctgggctgcgtgcccaccatccccgccaccgccagcgccgccagccccctgaccttccccaccctggacgacttcatccccccccacctgcagagatggccccaccacagccagcccgccagagccagcggcagcttcgcccccatcagccagaccccccccagcttcagcccccccccccccctggtgccccccgcccccgaggacctgagaagagtgagcgagcccgacctgaccggcgccgtgagcagcaccgacagcagccccctgctgaacgaggtgagcagcagcctgatcggcaccgacagccaggccttccccagcgtgagcaagcccagcagcgcctaccccagcaccaccatcgtgaaccccaccatcgtgctgctgcagcacaacagagagcagcagaagagactgagcagcctgagcgaccccgtgagcgagagaagagtgggcgagcaggacagcgcccccacccaggagaagcccaccagccccggcaaggccatcgagaagagagccaaggacgacagcagaagagtggtgaagagcacccaggacctgagcgacgtgagcatggacgaggtgggcatccccctgagaaacaccgagagaagcaaggactggtacaagaccatgttcaagcagatccacaagctgaacagagacacccccgaggagaacccctacttccccacctacaagttccccgagctgcccgagatccagcagaccagcgaggaggacaacccctacacccccacctaccagttccccgccagcacccccagccccaagagcgaggacgacgacagcgacctgtacagccccagatacagcttcagcgaggacaccaagagccccctgagcgtgcccagaagcaagagcgagatgagctacatcgacggcgagaaggtggtgaagagaagcgccaccctgcccctgcccgccagaagcagcagcctgaagagcagcagcgagagaaacgactgggagccccccgacaagaaggtggacaccagaaagtacagagccgagcccaagagcatctacgagtaccagcccggcaagagcagcgtgctgaccaacgagaagatgagcagagacatcagccccgaggagatcgacctgaagaacgagccctggtacaagttcttcagcgagctggagttcggcaagcccccccccaagaagatctgggactacacccccggcgactgcagcatcctgcccagagaggacagaaagaccaacctggacaaggacctgagcctgtgccagaccgagctggaggccgacctggagaagatggagaccctgaacaaggcccccagcgccaacgtgccccagagcagcgccatcagccccacccccgagatcagcagcgagacccccggctacatctacagcagcaacttccacgccgtgaagagagagagcgacggcgcccccggcgacctgaccagcctggagaacgagagacagatctacaagagcgtgctggagggcggcgacatccccctgcagggcctgagcggcctgaagagacccagcagcagcgccagcaccaaggacagcgagagccccagacacttcatccccgccgactacctggagagcaccgaggagttcatcagaagaagacacgacgacaaggagaagctgctggccgaccagagaagactgaagagagagcaggaggaggccgacatcgccgccagaagacacaccggcgtgatccccacccaccaccagttcatcaccaacgagagattcggcgacctgctgaacatcgacgacaccgccaagagaaagagcggcagcgagatgagacccgccagagccaagttcgacttcaaggcccagaccctgaaggagctgcccctgcagaagggcgacatcgtgtacatctacaagcagatcgaccagaactggtacgagggcgagcaccacggcagagtgggcatcttccccagaacctacatcgagctgctgccccccgccgagaaggcccagcccaagaagctgacccccgtgcaggtgctggagtacggcgaggccatcgccaagttcaacttcaacggcgacacccaggtggagatgagcttcagaaagggcgagagaatcaccctgctgagacaggtggacgagaactggtacgagggcagaatccccggcaccagcagacagggcatcttccccatcacctacgtggacgtgatcaagagacccctggtgaagaaccccgtggactacatggacctgcccttcagcagcagccccagcagaagcgccaccgccagcccccagttcagcagccacagcaagctgatcacccccgcccccagcagcctgccccacagcagaagagccctgagccccgagatgcacgccgtgaccagcgagtggatcagcctgaccgtgggcgtgcccggcagaagaagcctggccctgaccccccccctgccccccctgcccgaggccagcatctacaacaccgaccacctggccctgagccccagagccagccccagcctgagcctgagcctgccccacctgagctggagcgacagacccacccccagaagcgtggccagccccctggccctgcccagcccccacaagacctacagcctggcccccaccagccaggccagcctgcacatgaacggcgacggcggcgtgcacacccccagcagcggcatccaccaggacagcttcctgcagctgcccctgggcagcagcgacagcgtgatcagccagctgagcgacgccttcagcagccagagcaagagacagccctggagagaggagagcggccagtacgagagaaaggccgagagaggcgccggcgagagaggccccggcggccccaagatcagcaagaagagctgcctgaagcccagcgacgtggtgagatgcctgagcaccgagcagagactgagcgacctgaacacccccgaggagagcagacccggcaagcccctgggcagcgccttccccggcagcgaggccgagcagaccgagagacacagaggcggcgagcaggccggcagaaaggccgccagaagaggcggcagccagcagccccaggcccagcagagaagagtgacccccgacagaagccagaccagccaggacctgttcagctaccaggccctgtacagctacatcccccagaacgacgacgagctggagctgagagacggcgacatcgtggacgtgatggagaagtgcgacgacggctggttcgtgggcaccagcagaagaaccaagcagttcggcaccttccccggcaactacgtgaagcccctgtacctgtag

SEQ ID NO: 100331 - DNA, 3801 bp, synthetic construct
  misc_feature 1..3801: note = Description of Artificial Sequence: Synthetic coding sequence
  source 1..3801: mol_type = other DNA
atgagcagcgagtgcgacggcggcagcaaggccgtgatgaacggcctggcccccggcagcaacggccaggacaaggccaccgccgaccccctgagagccagaagcatcagcgccgtgaagatcatccccgtgaagaccgtgaagaacgccagcggcctggtgctgcccaccgacatggacctgaccaagatctgcaccggcaagggcgccgtgaccctgagagccagcagcagctacagagagacccccagcagcagccccgccagcccccaggagaccagacagcacgagagcaagcccggcctggagcccgagcccagcagcgccgacgagtggagactgagcagcagcgccgacgccaacggcaacgcccagcccagcagcctggccgccaagggctacagaagcgtgcaccccaacctgcccagcgacaagagccaggacgccaccagcagcagcgccgcccagcccgaggtgatcgtggtgcccctgtacctggtgaacaccgacagaggccaggagggcaccgccagaccccccacccccctgggccccctgggctgcgtgcccaccatccccgccaccgccagcgccgccagccccctgaccttccccaccctggacgacttcatccccccccacctgcagagatggccccaccacagccagcccgccagagccagcggcagcttcgcccccatcagccagaccccccccagcttcagcccccccccccccctggtgccccccgcccccgaggacctgagaagagtgagcgagcccgacctgaccggcgccgtgagcagcaccgacagcagccccctgctgaacgaggtgagcagcagcctgatcggcaccgacagccaggccttccccagcgtgagcaagcccagcagcgcctaccccagcaccaccatcgtgaaccccaccatcgtgctgctgcagcacaacagagagcagcagaagagactgagcagcctgagcgaccccgtgagcgagagaagagtgggcgagcaggacagcgcccccacccaggagaagcccaccagccccggcaaggccatcgagaagagagccaaggacgacagcagaagagtggtgaagagcacccaggacctgagcgacgtgagcatggacgaggtgggcatccccctgagaaacaccgagagaagcaaggactggtacaagaccatgttcaagcagatccacaagctgaacagagacgacgacagcgacctgtacagccccagatacagcttcagcgaggacaccaagagccccctgagcgtgcccagaagcaagagcgagatgagctacatcgacggcgagaaggtggtgaagagaagcgccaccctgcccctgcccgccagaagcagcagcctgaagagcagcagcgagagaaacgactgggagccccccgacaagaaggtggacaccagaaagtacagagccgagcccaagagcatctacgagtaccagcccggcaagagcagcgtgctgaccaacgagaagatgagcagagacatcagccccgaggagatcgacctgaagaacgagccctggtacaagttcttcagcgagctggagttcggcaagcccccccccaagaagatctgggactacacccccggcgactgcagcatcctgcccagagaggacagaaagaccaacctggacaaggacctgagcctgtgccagaccgagctggaggccgacctggagaagatggagaccctgaacaaggcccccagcgccaacgtgccccagagcagcgccatcagccccacccccgagatcagcagcgagacccccggctacatctacagcagcaacttccacgccgtgaagagagagagcgacggcgcccccggcgacctgaccagcctggagaacgagagacagatctacaagagcgtgctggagggcggcgacatccccctgcagggcctgagcggcctgaagagacccagcagcagcgccagcaccaaggacagcgagagccccagacacttcatccccgccgactacctggagagcaccgaggagttcatcagaagaagacacgacgacaaggagaagctgctggccgaccagagaagactgaagagagagcaggaggaggccgacatcgccgccagaagacacaccggcgtgatccccacccaccaccagttcatcaccaacgagagattcggcgacctgctgaacatcgacgacaccgccaagagaaagagcggcagcgagatgagacccgccagagccaagttcgacttcaaggcccagaccctgaaggagctgcccctgcagaagggcgacatcgtgtacatctacaagcagatcgaccagaactggtacgagggcgagcaccacggcagagtgggcatcttccccagaacctacatcgagctgctgccccccgccgagaaggcccagcccaagaagctgacccccgtgcaggtgctggagtacggcgaggccatcgccaagttcaacttcaacggcgacacccaggtggagatgagcttcagaaagggcgagagaatcaccctgctgagacaggtggacgagaactggtacgagggcagaatccccggcaccagcagacagggcatcttccccatcacctacgtggacgtgatcaagagacccctggtgaagaaccccgtggactacatggacctgcccttcagcagcagccccagcagaagcgccaccgccagcccccagttcagcagccacagcaagctgatcacccccgcccccagcagcctgccccacagcagaagagccctgagccccgagatgcacgccgtgaccagcgagtggatcagcctgaccgtgggcgtgcccggcagaagaagcctggccctgaccccccccctgccccccctgcccgaggccagcatctacaacaccgaccacctggccctgagccccagagccagccccagcctgagcctgagcctgccccacctgagctggagcgacagacccacccccagaagcgtggccagccccctggccctgcccagcccccacaagacctacagcctggcccccaccagccaggccagcctgcacatgaacggcgacggcggcgtgcacacccccagcagcggcatccaccaggacagcttcctgcagctgcccctgggcagcagcgacagcgtgatcagccagctgagcgacgccttcagcagccagagcaagagacagccctggagagaggagagcggccagtacgagagaaaggccgagagaggcgccggcgagagaggccccggcggccccaagatcagcaagaagagctgcctgaagcccagcgacgtggtgagatgcctgagcaccgagcagagactgagcgacctgaacacccccgaggagagcagacccggcaagcccctgggcagcgccttccccggcagcgaggccgagcagaccgagagacacagaggcggcgagcaggccggcagaaaggccgccagaagaggcggcagccagctgagccaccacagcctgagagccggccccgacctgaccgagagcgagaagagctacgtgcagccccaggcccagcagagaagagtgacccccgacagaagccagaccagccaggacctgttcagctaccaggccctgtacagctacatcccccagaacgacgacgagctggagctgagagacggcgacatcgtggacgtgatggagaagtgcgacgacggctggttcgtgggcaccagcagaagaaccaagcagttcggcaccttccccggcaactacgtgaagcccctgtacctgtag

SEQ ID NO: 100332 - DNA, 2436 bp, synthetic construct
  misc_feature 1..2436: note = Description of Artificial Sequence: Synthetic coding sequence
  source 1..2436: mol_type = other DNA
atgagcagcgagtgcgacggcggcagcaaggccgtgatgaacggcctggcccccggcagcaacggccaggacaaggacatggacctgaccaagatctgcaccggcaagggcgccgtgaccctgagagccagcagcagctacagagagacccccagcagcagccccgccagcccccaggagaccagacagcacgagagcaagcccggcctggagcccgagcccagcagcgccgacgagtggagactgagcagcagcgccgacgccaacggcaacgcccagcccagcagcctggccgccaagggctacagaagcgtgcaccccaacctgcccagcgacaagagccaggacagcagccccctgctgaacgaggtgagcagcagcctgatcggcaccgacagccaggccttccccagcgtgagcaagcccagcagcgcctaccccagcaccaccatcgtgaaccccaccatcgtgctgctgcagcacaacagagagcagcagaagagactgagcagcctgagcgaccccgtgagcgagagaagagtgggcgagcaggacagcgcccccacccaggagaagcccaccagccccggcaaggccatcgagaagagagccaaggacgacagcagaagagtggtgaagagcacccaggacctgagcgacgtgagcatggacgaggtgggcatccccctgagaaacaccgagagaagcaaggactggtacaagaccatgttcaagcagatccacaagctgaacagagacgacgacagcgacctgtacagccccagatacagcttcagcgaggacaccaagagccccctgagcgtgcccagaagcaagagcgagatgagctacatcgacggcgagaaggtggtgaagagaagcgccaccctgcccctgcccgccagaagcagcagcctgaagagcagcagcgagagaaacgactgggagccccccgacaagaaggtggacaccagaaagtacagagccgagcccaagagcatctacgagtaccagcccggcaagagcagcgtgctgaccaacgagaagatgagcagagacatcagccccgaggagatcgacctgaagaacgagccctggtacaagttcttcagcgagctggagttcggcaagcccaccaacctggacaaggacctgagcctgtgccagaccgagctggaggccgacctggagaagatggagaccctgaacaaggcccccagcgccaacgtgccccagagcagcgccatcagccccacccccgagatcagcagcgagacccccggctacatctacagcagcaacttccacgccgtgaagagagagagcgacggcgcccccggcgacctgaccagcctggagaacgagagacagatctacaagagcgtgctggagggcggcgacatccccctgcagggcctgagcggcctgaagagacccagcagcagcgccagcaccaaggacagcgagagccccagacacttcatccccgccgactacctggagagcaccgaggagttcatcagaagaagacacgacgacaaggagaagctgctggccgaccagagaagactgaagagagagcaggaggaggccgacatcgccgccagaagacacaccggcgtgatccccacccaccaccagttcatcaccaacgagagattcggcgacctgctgaacatcgacgacaccgccaagagaaagagcggcagcgagatgagacccgccagagccaagttcgacttcaaggcccagaccctgaaggagctgcccctgcagaagggcgacatcgtgtacatctacaagcagatcgaccagaactggtacgagggcgagcaccacggcagagtgggcatcttccccagaacctacatcgagctgctgccccccgccgagaaggcccagcccaagaagctgacccccgtgcaggtgctggagtacggcgaggccatcgccaagttcaacttcaacggcgacacccaggtggagatgagcttcagaaagggcgagagaatcaccctgctgagacaggtggacgagaactggtacgagggcagaatccccggcaccagcagacagggcatcttccccatcacctacgtggacgtgatcaagagacccctggtgaagaaccccgtggactacatggacctgcccttcagcagcagccccagcagaagcgccaccgccagcccccagcagccccaggcccagcagagaagagtgacccccgacagaagccagaccagccaggacctgttcagctaccaggccctgtacagctacatcccccagaacgacgacgagctggagctgagagacggcgacatcgtggacgtgatggagaagtgcgacgacggctggttcgtgggcaccagcagaagaaccaagcagttcggcaccttccccggcaactacgtgaagcccctgtacctgtag

SEQ ID NO: 100333 - DNA, 2055 bp, synthetic construct
  misc_feature 1..2055: note = Description of Artificial Sequence: Synthetic coding sequence
  source 1..2055: mol_type = other DNA
atgagcagcgagtgcgacggcggcagcaaggccgtgatgaacggcctggcccccggcagcaacggccaggacaaggacatggacctgaccaagatctgcaccggcaagggcgccgtgaccctgagagccagcagcagctacagagagacccccagcagcagccccgccagcccccaggagaccagacagcacgagagcaagcccgacgagtggagactgagcagcagcgccgacgccaacggcaacgcccagcccagcagcctggccgccaagggctacagaagcgtgcaccccaacctgcccagcgacaagagccaggacagcagccccctgctgaacgaggtgagcagcagcctgatcggcaccgacagccaggccttccccagcgtgagcaagcccagcagcgcctaccccagcaccaccatcgtgaaccccaccatcgtgctgctgcagcacaacagagagcagcagaagagactgagcagcctgagcgaccccgtgagcgagagaagagtgggcgagcaggacagcgcccccacccaggagaagcccaccagccccggcaaggccatcgagaagagagccaaggacgacagcagaagagtggtgaagagcacccaggacctgagcgacgtgagcatggacgaggtgggcatccccctgagaaacaccgagagaagcaaggactggtacaagaccatgttcaagcagatccacaagctgaacagagacgacgacagcgacctgtacagccccagatacagcttcagcgaggacaccaagagccccctgagcgtgcccagaagcaagagcgagatgagctacatcgacggcgagaaggtggtgaagagaagcgccaccctgcccctgcccgccagaagcagcagcctgaagagcagcagcgagagaaacgactgggagccccccgacaagaaggtggacaccagaaagtacagagccgagcccaagagcatctacgagtaccagcccggcaagagcagcgtgctgaccaacgagaagatgagcagcgccatcagccccacccccgagatcagcagcgagacccccggctacatctacagcagcaacttccacgccgtgaagagagagagcgacggcgcccccggcgacctgaccagcctggagaacgagagacagatctacaagagcgtgctggagggcggcgacatccccctgcagggcctgagcggcctgaagagacccagcagcagcgccagcaccaaggacagcgagagccccagacacttcatccccgccgactacctggagagcaccgaggagttcatcagaagaagacacgacgacaaggagatgagacccgccagagccaagttcgacttcaaggcccagaccctgaaggagctgcccctgcagaagggcgacatcgtgtacatctacaagcagatcgaccagaactggtacgagggcgagcaccacggcagagtgggcatcttccccagaacctacatcgagctgctgccccccgccgagaaggcccagcccaagaagctgacccccgtgcaggtgctggagtacggcgaggccatcgccaagttcaacttcaacggcgacacccaggtggagatgagcttcagaaagggcgagagaatcaccctgctgagacaggtggacgagaactggtacgagggcagaatccccggcaccagcagacagggcatcttccccatcacctacgtggacgtgatcaagagacccctggtgaagaaccccgtggactacatggacctgcccttcagcagcagccccagcagaagcgccaccgccagcccccagcagccccaggcccagcagagaagagtgacccccgacagaagccagaccagccaggacctgttcagctaccaggccctgtacagctacatcccccagaacgacgacgagctggagctgagagacggcgacatcgtggacgtgatggagaagtgcgacgacggctggttcgtgggcaccagcagaagaaccaagcagttcggcaccttccccggcaactacgtgaagcccctgtacctgtag

SEQ ID NO: 100334 - DNA, 2718 bp, synthetic construct; identical to SEQ ID NO: 100328
  misc_feature 1..2718: note = Description of Artificial Sequence: Synthetic coding sequence
  source 1..2718: mol_type = other DNA

SEQ ID NO: 100335 - DNA, 3456 bp, synthetic construct; identical to SEQ ID NO: 100325
  misc_feature 1..3456: note = Description of Artificial Sequence: Synthetic coding sequence
  source 1..3456: mol_type = other DNA

SEQ ID NO: 100336 - DNA, 3879 bp, synthetic construct; identical to SEQ ID NO: 100330
  misc_feature 1..3879: note = Description of Artificial Sequence: Synthetic coding sequence
  source 1..3879: mol_type = other DNA

SEQ ID NO: 100337 - DNA, 2451 bp, synthetic construct
  misc_feature 1..2451: note = Description of Artificial Sequence: Synthetic coding sequence
  source 1..2451: mol_type = other DNA
atgagcagcgagtgcgacggcggcagcaaggccgtgatgaacggcctggcccccggcagcaacggccaggacaaggacatggacctgaccaagatctgcaccggcaagggcgccgtgaccctgagagccagcagcagctacagagagacccccagcagcagccccgccagcccccaggagaccagacagcacgagagcaagcccggcctggagcccgagcccagcagcgccgacgagtggagactgagcagcagcgccgacgccaacggcaacgcccagcccagcagcctggccgccaagggctacagaagcgtgcaccccaacctgcccagcgacaagagccaggacgccaccagcagcagcgccgcccagcccgaggtgatcgtggtgcccctgtacctggtgaacaccgacagaggccaggagggcaccgccagaccccccacccccctgggccccctgggctgcgtgcccaccatccccgccaccgccagcgccgccagccccctgaccttccccaccctggacgacttcatccccccccacctgcagagatggccccaccacagccagcccgccagagccagcggcagcttcgcccccatcagccagaccccccccagcttcagcccccccccccccctggtgccccccgcccccgaggacctgagaagagtgagcgagcccgacctgaccggcgccgtgagcagcaccgacagcagccccctgctgaacgaggtgagcagcagcctgatcggcaccgacagccaggccttccccagcgtgagcaagcccagcagcgcctaccccagcaccaccatcgtgaaccccaccatcgtgctgctgcagcacaacagagagcagcagaagagactgagcagcctgagcgaccccgtgagcgagagaagagtgggcgagcaggacagcgcccccacccaggagaagcccaccagccccggcaaggccatcgagaagagagccaaggacgacagcagaagagtggtgaagagcacccaggacctgagcgacgtgagcatggacgaggtgggcatccccctgagaaacaccgagagaagcaaggactggtacaagaccatgttcaagcagatccacaagctgaacagagacgacgacagcgacctgtacagccccagatacagcttcagcgaggacaccaagagccccctgagcgtgcccagaagcaagagcgagatgagctacatcgacggcgagaaggtggtgaagagaagcgccaccctgcccctgcccgccagaagcagcagcctgaagagcagcagcgagagaaacgactgggagccccccgacaagaaggtggacaccagaaagtacagagccgagcccaagagcatctacgagtaccagcccggcaagagcagcgtgctgaccaacgagaagatgagcagcgccatcagccccacccccgagatcagcagcgagacccccggctacatctacagcagcaacttccacgccgtgaagagagagagcgacggcgcccccggcgacctgaccagcctggagaacgagagacagatctacaagagcgtgctggagggcggcgacatccccctgcagggcctgagcggcctgaagagacccagcagcagcgccagcaccaaggacagcgagagccccagacacttcatccccgccgactacctggagagcaccgaggagttcatcagaagaagacacgacgacaaggagatgagacccgccagagccaagttcgacttcaaggcccagaccctgaaggagctgcccctgcagaagggcgacatcgtgtacatctacaagcagatcgaccagaactggtacgagggcgagcaccacggcagagtgggcatcttccccagaacctacatcgagctgctgccccccgccgagaaggcccagcccaagaagctgacccccgtgcaggtgctggagtacggcgaggccatcgccaagttcaacttcaacggcgacacccaggtggagatgagcttcagaaagggcgagagaatcaccctgctgagacaggtggacgagaactggtacgagggcagaatccccggcaccagcagacagggcatcttccccatcacctacgtggacgtgatcaagagacccctggtgaagaaccccgtggactacatggacctgcccttcagcagcagccccagcagaagcgccaccgccagcccccagcagccccaggcccagcagagaagagtgacccccgacagaagccagaccagccaggacctgttcagctaccaggccctgtacagctacatcccccagaacgacgacgagctggagctgagagacggcgacatcgtggacgtgatggagaagtgcgacgacggctggttcgtgggcaccagcagaagaaccaagcagttcggcaccttccccggcaactacgtgaagcccctgtacctgtag

SEQ ID NO: 100338 - DNA, 3015 bp, synthetic construct; identical to SEQ ID NO: 100329
  misc_feature 1..3015: note = Description of Artificial Sequence: Synthetic coding sequence
  source 1..3015: mol_type = other DNA

SEQ ID NO: 100339 - DNA, 2016 bp, synthetic construct
  misc_feature 1..2016: note = Description of Artificial Sequence: Synthetic coding sequence
  source 1..2016: mol_type = other DNA
atgcagggcccccccagaagcctgagagccggcctgagcctggacgacttcatccccggccacctgcagagccacatcggcagcagcagcagaggcaccagagtgcccgtgatcagaaacggcggcagcaacaccctgaacttccagttccacgaccccgcccccagaaccgtgtgcaacggcggctacacccccagaagagacgccagccagcaccccgaccccgcctggtaccagacctggcccggccccggcagcaagcccagcgccagcaccaagatccccgccagccagcacacccagaactggagcgccacctggaccaaggacagcaagagaagagacaagagatgggtgaagtacgagggcatcggccccgtggacgagagcggcatgcccatcgcccccagaagcagcgtggacagacccagagactggtacagaagaatgttccagcagatccacagaaagatgcccgacctgcagctggactggaccttcgaggagccccccagagaccccagacacctgggcgcccagcagagacccgcccacagacccggccccgccaccagcagcagcggcagaagctgggaccacagcgaggagctgcccagaagcaccttcaactacagacccggcgccttcagcaccgtgctgcagcccagcaaccaggtgctgagaagaagagagaaggtggacaacgtgtggaccgaggagagctggaaccagttcctgcaggagctggagaccggccagagacccaagaagcccctggtggacgaccccggcgagaagcccagccagcccatcgaggtgctgctggagagagagctggccgagctgagcgccgagctggacaaggacctgagagccatcgagaccagactgcccagccccaagagcagccccgcccccagaagagcccccgagcagagaccccccgccggccccgccagcgcctggagcagcagctacccccacgccccctacctgggcagcgccagaagcctgagcccccacaagatggccgacggcggcagccccttcctgggcagaagagacttcgtgtaccccagcagcaccagagaccccagcgccagcaacggcggcggcagccccgccagaagagaggagaagaagagaaaggccgccagactgaagttcgacttccaggcccagagccccaaggagctgaccctgcagaagggcgacatcgtgtacatccacaaggaggtggacaagaactggctggagggcgagcaccacggcagactgggcatcttccccgccaactacgtggaggtgctgcccgccgacgagatccccaagcccatcaagccccccacctaccaggtgctggagtacggcgaggccgtggcccagtacaccttcaagggcgacctggaggtggagctgagcttcagaaagggcgagcacatctgcctgatcagaaaggtgaacgagaactggtacgagggcagaatcaccggcaccggcagacagggcatcttccccgccagctacgtgcaggtgagcagagagcccagactgagactgtgcgacgacggcccccagctgcccaccagccccagactgaccgccgccgccagaagcgccagacaccccagcagccccagcgccctgagaagccccgccgaccccatcgacctgggcggccagaccagccccagaagaaccggcttcagcttccccacccaggagcccagaccccagacccagaacctgggcacccccggccccgccctgagccacagcagaggccccagccaccccctggacctgggcaccagcagccccaacaccagccagatccactggaccccctacagagccatgtaccagtacagaccccagaacgaggacgagctggagctgagagagggcgacagagtggacgtgatgcagcagtgcgacgacggctggttcgtgggcgtgagcagaagaacccagaagttcggcaccttccccggcaactacgtggcccccgtgtag

SEQ ID NO: 100340 - DNA, 990 bp, synthetic construct
  misc_feature 1..990: note = Description of Artificial Sequence: Synthetic coding sequence
  source 1..990: mol_type = other DNA
atggccgacggcggcagccccttcctgggcagaagagacttcgtgtaccccagcagcaccagagaccccagcgccagcaacggcggcggcagccccgccagaagagaggagaagaagagaaaggccgccagactgaagttcgacttccaggcccagagccccaaggagctgaccctgcagaagggcgacatcgtgtacatccacaaggaggtggacaagaactggctggagggcgagcaccacggcagactgggcatcttccccgccaactacgtggaggtgctgcccgccgacgagatccccaagcccatcaagccccccacctaccaggtgctggagtacggcgaggccgtggcccagtacaccttcaagggcgacctggaggtggagctgagcttcagaaagggcgagcacatctgcctgatcagaaaggtgaacgagaactggtacgagggcagaatcaccggcaccggcagacagggcatcttccccgccagctacgtgcaggtgagcagagagcccagactgagactgtgcgacgacggcccccagctgcccaccagccccagactgaccgccgccgccagaagcgccagacaccccagcagccccagcgccctgagaagccccgccgaccccatcgacctgggcggccagaccagccccagaagaaccggcttcagcttccccacccaggagcccagaccccagacccagaacctgggcacccccggccccgccctgagccacagcagaggccccagccaccccctggacctgggcaccagcagccccaacaccagccagatccactggaccccctacagagccatgtaccagtacagaccccagaacgaggacgagctggagctgagagagggcgacagagtggacgtgatgcagcagtgcgacgacggctggttcgtgggcgtgagcagaagaacccagaagttcggcaccttccccggcaactacgtggcccccgtgtag

SEQ ID NO: 100341 - DNA, 1074 bp, synthetic construct
  misc_feature 1..1074: note = Description of Artificial Sequence: Synthetic coding sequence
  source 1..1074: mol_type = other DNA
atggccgccgccgccaagcccaacaacctgagcctggtggtgcacggccccggcgacctgagactggagaactaccccatccccgagcccggccccaacgaggtgctgctgagaatgcacagcgtgggcatctgcggcagcgacgtgcactactgggagtacggcagaatcggcaacttcatcgtgaagaagcccatggtgctgggccacgaggccagcggcaccgtggagaaggtgggcagcagcgtgaagcacctgaagcccggcgacagagtggccatcgagcccggcgcccccagagagaacgacgagttctgcaagatgggcagatacaacctgagccccagcatcttcttctgcgccaccccccccgacgacggcaacctgtgcagattctacaagcacaacgccgccttctgctacaagctgcccgacaacgtgaccttcgaggagggcgccctgatcgagcccctgagcgtgggcatccacgcctgcagaagaggcggcgtgaccctgggccacaaggtgctggtgtgcggcgccggccccatcggcatggtgaccctgctggtggccaaggccatgggcgccgcccaggtggtggtgaccgacctgagcgccaccagactgagcaaggccaaggagatcggcgccgacctggtgctgcagatcagcaaggagagcccccaggagatcgccagaaaggtggagggccagctgggctgcaagcccgaggtgaccatcgagtgcaccggcgccgaggccagcatccaggccggcatctacgccaccagaagcggcggcaacctggtgctggtgggcctgggcagcgagatgaccaccgtgcccctgctgcacgccgccatcagagaggtggacatcaagggcgtgttcagatactgcaacacctggcccgtggccatcagcatgctggccagcaagagcgtgaacgtgaagcccctggtgacccacagattccccctggagaaggccctggaggccttcgagaccttcaagaagggcctgggcctgaagatcatgctgaagtgcgaccccagcgaccagaacccctag

SEQ ID NO: 100342 - DNA, 597 bp, synthetic construct
  misc_feature 1..597: note = Description of Artificial Sequence: Synthetic coding sequence
  source 1..597: mol_type = other DNA
atggcctaccccggccaccccggcgccggcggcggctactaccccggcggctacggcggcgcccccggcggccccgccttccccggccagacccaggaccccctgtacggctacttcgccgccgtggccggccaggacggccagatcgacgccgacgagctgcagagatgcctgacccagagcggcatcgccggcggctacaagcccttcaacctggagacctgcagactgatggtgagcatgctggacagagacatgagcggcaccatgggcttcaacgagttcaaggagctgtgggccgtgctgaacggctggagacagcacttcatcagcttcgacaccgacagaagcggcaccgtggacccccaggagctgcagaaggccctgaccaccatgggcttcagactgagcccccaggccgtgaacagcatcgccaagagatacagcaccaacggcaagatcaccttcgacgactacatcgcctgctgcgtgaagctgagagccctgaccgacagcttcagaagaagagacaccgcccagcagggcgtggtgaacttcccctacgacgacttcatccagtgcgtgatgagcgtgtag

SEQ ID NO: 100343 - DNA, 552 bp, synthetic construct
  misc_feature 1..552: note = Description of Artificial Sequence: Synthetic coding sequence
  source 1..552: mol_type = other DNA
atgcagtacggcggcgcccccggcggccccgccttccccggccagacccaggaccccctgtacggctacttcgccgccgtggccggccaggacggccagatcgacgccgacgagctgcagagatgcctgacccagagcggcatcgccggcggctacaagcccttcaacctggagacctgcagactgatggtgagcatgctggacagagacatgagcggcaccatgggcttcaacgagttcaaggagctgtgggccgtgctgaacggctggagacagcacttcatcagcttcgacaccgacagaagcggcaccgtggacccccaggagctgcagaaggccctgaccaccatgggcttcagactgagcccccaggccgtgaacagcatcgccaagagatacagcaccaacggcaagatcaccttcgacgactacatcgcctgctgcgtgaagctgagagccctgaccgacagcttcagaagaagagacaccgcccagcagggcgtggtgaacttcccctacgacgacttcatccagtgcgtgatgagcgtgtag

SEQ ID NO: 100344 - DNA, 543 bp, synthetic construct
  misc_feature 1..543: note = Description of Artificial Sequence: Synthetic coding sequence
  source 1..543: mol_type = other DNA
atgcagtacggcggcgcccccggcggccccgccttccccggccagacccaggaccccctgtacggctacttcgccgccgtggccggccaggacggccagatcgacgccgacgagctgcagagatgcctgacccagagcggcatcgccggcggctacaagcccttcaacctggagacctgcagactgatggtgagcatgctggacagagacatgagcggcaccatgggcttcaacgagttcaaggagctgtgggccgtgctgaacggctggagacagcacttcatcagcttcgacaccgacagaagcggcaccgtggacccccaggagctgcagaaggccctgaccaccatgggcttcagactgagcccccaggccgtgaacagcatcgccaagagatacagcaccaacggcaagatcaccttcgacgactacatcgcctgctgcgtgaagctgagagccctgaccgacagcttcagaagaagagacaccgcccagcagggcgtggtgaacttcccctacgacgacgtgagcctgagaaactag

SEQ ID NO: 100345 - DNA, 6645 bp, synthetic construct
  misc_feature 1..6645: note = Description of Artificial Sequence: Synthetic coding sequence
  source 1..6645: mol_type = other DNA
atggccaccagaagcagcagaagagagagcagactgcccttcctgttcaccctggtggccctgctgccccccggcgccctgtgcgaggtgtggacccagagactgcacggcggcagcgcccccctgccccaggacagaggcttcctggtggtgcagggcgaccccagagagctgagactgtgggccagaggcgacgccagaggcgccagcagagccgacgagaagcccctgagaagaaagagaagcgccgccctgcagcccgagcccatcaaggtgtacggccaggtgagcctgaacgacagccacaaccagatggtggtgcactgggccggcgagaagagcaacgtgatcgtggccctggccagagacagcctggccctggccagacccaagagcagcgacgtgtacgtgagctacgactacggcaagagcttcaagaagatcagcgacaagctgaacttcggcctgggcaacagaagcgaggccgtgatcgcccagttctaccacagccccgccgacaacaagagatacatcttcgccgacgcctacgcccagtacctgtggatcaccttcgacttctgcaacaccctgcagggcttcagcatccccttcagagccgccgacctgctgctgcacagcaaggccagcaacctgctgctgggcttcgacagaagccaccccaacaagcagctgtggaagagcgacgacttcggccagacctggatcatgatccaggagcacgtgaagagcttcagctggggcatcgacccctacgacaagcccaacaccatctacatcgagagacacgagcccagcggctacagcaccgtgttcagaagcaccgacttcttccagagcagagagaaccaggaggtgatcctggaggaggtgagagacttccagctgagagacaagtacatgttcgccaccaaggtggtgcacctgctgggcagcgagcagcagagcagcgtgcagctgtgggtgagcttcggcagaaagcccatgagagccgcccagttcgtgaccagacaccccatcaacgagtactacatcgccgacgccagcgaggaccaggtgttcgtgtgcgtgagccacagcaacaacagaaccaacctgtacatcagcgaggccgagggcctgaagttcagcctgagcctggagaacgtgctgtactacagccccggcggcgccggcagcgacaccctggtgagatacttcgccaacgagcccttcgccgacttccacagagtggagggcctgcagggcgtgtacatcgccaccctgatcaacggcagcatgaacgaggagaacatgagaagcgtgatcaccttcgacaagggcggcacctgggagttcctgcaggcccccgccttcaccggctacggcgagaagatcaactgcgagctgagccagggctgcagcctgcacctggcccagagactgagccagctgctgaacctgcagctgagaagaatgcccatcctgagcaaggagagcgcccccggcctgatcatcgccaccggcagcgtgggcaagaacctggccagcaagaccaacgtgtacatcagcagcagcgccggcgccagatggagagaggccctgcccggcccccactactacacctggggcgaccacggcggcatcatcaccgccatcgcccagggcatggagaccaacgagctgaagtacagcaccaacgagggcgagacctggaagaccttcatcttcagcgagaagcccgtgttcgtgtacggcctgctgaccgagcccggcgagaagagcaccgtgttcaccatcttcggcagcaacaaggagaacgtgcacagctggctgatcctgcaggtgaacgccaccgacgccctgggcgtgccctgcaccgagaacgactacaagctgtggagccccagcgacgagagaggcaacgagtgcctgctgggccacaagaccgtgttcaagagaagaaccccccacgccacctgcttcaacggcgaggacttcgacagacccgtggtggtgagcaactgcagctgcaccagagaggactacgagtgcgacttcggcttcaagatgagcgaggacctgagcctggaggtgtgcgtgcccgaccccgagttcagcggcaagagctacagcccccccgtgccctgccccgtgggcagcacctacagaagaaccagaggctacagaaagatcagcggcgacacctgcagcggcggcgacgtggaggccagactggagggcgagctggtgccctgccccctggccgaggagaacgagttcatcctgtacgccgtgagaaagagcatctacagatacgacctggccagcggcgccaccgagcagctgcccctgaccggcctgagagccgccgtggccctggacttcgactacgagcacaactgcctgtactggagcgacctggccctggacgtgatccagagactgtgcctgaacggcagcaccggccaggaggtgatcatcaacagcggcctggagaccgtggaggccctggccttcgagcccctgagccagctgctgtactgggtggacgccggcttcaagaagatcgaggtggccaaccccgacggcgacttcagactgaccatcgtgaacagcagcgtgctggacagacccagagccctggtgctggtgccccaggagggcgtgatgttctggaccgactggggcgacctgaagcccggcatctacagaagcaacatggacggcagcgccgcctaccacctggtgagcgaggacgtgaagtggcccaacggcatcagcgtggacgaccagtggatctactggaccgacgcctacctggagtgcatcgagagaatcaccttcagcggccagcagagaagcgtgatcctggacaacctgccccacccctacgccatcgccgtgttcaagaacgagatctactgggacgactggagccagctgagcatcttcagagccagcaagtacagcggcagccagatggagatcctggccaaccagctgaccggcctgatggacatgaagatcttctacaagggcaagaacaccggcagcaacgcctgcgtgcccagaccctgcagcctgctgtgcctgcccaaggccaacaacagcagaagctgcagatgccccgaggacgtgagcagcagcgtgctgcccagcggcgacctgatgtgcgactgcccccagggctaccagctgaagaacaacacctgcgtgaagcaggagaacacctgcctgagaaaccagtacagatgcagcaacggcaactgcatcaacagcatctggtggtgcgacttcgacaacgactgcggcgacatgagcgacgagagaaactgccccaccaccatctgcgacctggacacccagttcagatgccaggagagcggcacctgcatccccctgagctacaagtgcgacctggaggacgactgcggcgacaacagcgacgagagccactgcgagatgcaccagtgcagaagcgacgagtacaactgcagcagcggcatgtgcatcagaagcagctgggtgtgcgacggcgacaacgactgcagagactggagcgacgaggccaactgcaccgccatctaccacacctgcgaggccagcaacttccagtgcagaaacggccactgcatcccccagagatgggcctgcgacggcgacaccgactgccaggacggcagcgacgaggaccccgtgaactgcgagaagaagtgcaacggcttcagatgccccaacggcacctgcatccccagcagcaagcactgcgacggcctgagagactgcagcgacggcagcgacgagcagcactgcgagcccctgtgcacccacttcatggacttcgtgtgcaagaacagacagcagtgcctgttccacagcatggtgtgcgacggcatcatccagtgcagagacggcagcgacgaggacgccgccttcgccggctgcagccaggaccccgagttccacaaggtgtgcgacgagttcggcttccagtgccagaacggcgtgtgcatcagcctgatctggaagtgcgacggcatggacgactgcggcgactacagcgacgaggccaactgcgagaaccccaccgaggcccccaactgcagcagatacttccagttcagatgcgagaacggccactgcatccccaacagatggaagtgcgacagagagaacgactgcggcgactggagcgacgagaaggactgcggcgacagccacatcctgcccttcagcacccccggccccagcacctgcctgcccaactactacagatgcagcagcggcacctgcgtgatggacacctgggtgtgcgacggctacagagactgcgccgacggcagcgacgaggaggcctgccccctgctggccaacgtgaccgccgccagcacccccacccagctgggcagatgcgacagattcgagttcgagtgccaccagcccaagacctgcatccccaactggaagagatgcgacggccaccaggactgccaggacggcagagacgaggccaactgccccacccacagcaccctgacctgcatgagcagagagttccagtgcgaggacggcgaggcctgcatcgtgctgagcgagagatgcgacggcttcctggactgcagcgacgagagcgacgagaaggcctgcagcgacgagctgaccgtgtacaaggtgcagaacctgcagtggaccgccgacttcagcggcgacgtgaccctgacctggatgagacccaagaagatgcccagcgccagctgcgtgtacaacgtgtactacagagtggtgggcgagagcatctggaagaccctggagacccacagcaacaagaccaacaccgtgctgaaggtgctgaagcccgacaccacctaccaggtgaaggtgcaggtgcagtgcctgagcaaggcccacaacaccaacgacttcgtgaccctgagaacccccgagggcctgcccgacgcccccagaaacctgcagctgagcctgcccagagaggccgagggcgtgatcgtgggccactgggccccccccatccacacccacggcctgatcagagagtacatcgtggagtacagcagaagcggcagcaagatgtgggccagccagagagccgccagcaacttcaccgagatcaagaacctgctggtgaacaccctgtacaccgtgagagtggccgccgtgaccagcagaggcatcggcaactggagcgacagcaagagcatcaccaccatcaagggcaaggtgatccccccccccgacatccacatcgacagctacggcgagaactacctgagcttcaccctgaccatggagagcgacatcaaggtgaacggctacgtggtgaacctgttctgggccttcgacacccacaagcaggagagaagaaccctgaacttcagaggcagcatcctgagccacaaggtgggcaacctgaccgcccacaccagctacgagatcagcgcctgggccaagaccgacctgggcgacagccccctggccttcgagcacgtgatgaccagaggcgtgagaccccccgcccccagcctgaaggccaaggccatcaaccagaccgccgtggagtgcacctggaccggccccagaaacgtggtgtacggcatcttctacgccaccagcttcctggacctgtacagaaaccccaagagcctgaccaccagcctgcacaacaagaccgtgatcgtgagcaaggacgagcagtacctgttcctggtgagagtggtggtgccctaccagggccccagcagcgactacgtggtggtgaagatgatccccgacagcagactgccccccagacacctgcacgtggtgcacaccggcaagaccagcgtggtgatcaagtgggagagcccctacgacagccccgaccaggacctgctgtacgccgtggccgtgaaggacctgatcagaaagaccgacagaagctacaaggtgaagagcagaaacagcaccgtggagtacaccctgaacaagctggagcccggcggcaagtaccacatcatcgtgcagctgggcaacatgagcaaggacagcagcatcaagatcaccaccgtgagcctgagcgcccccgacgccctgaagatcatcaccgagaacgaccacgtgctgctgttctggaagagcctggccctgaaggagaagcacttcaacgagagcagaggctacgagatccacatgttcgacagcgccatgaacatcaccgcctacctgggcaacaccaccgacaacttcttcaagatcagcaacctgaagatgggccacaactacaccttcaccgtgcaggccagatgcctgttcggcaaccagatctgcggcgagcccgccatcctgctgtacgacgagctgggcagcggcgccgacgccagcgccacccaggccgccagaagcaccgacgtggccgccgtggtggtgcccatcctgttcctgatcctgctgagcctgggcgtgggcttcgccatcctgtacaccaagcacagaagactgcagagcagcttcaccgccttcgccaacagccactacagcagcagactgggcagcgccatcttcagcagcggcgacgacctgggcgaggacgacgaggacgcccccatgatcaccggcttcagcgacgacgtgcccatggtgatcgcctag

SEQ ID NO: 100346 - DNA, 3507 bp, synthetic construct
  misc_feature 1..3507: note = Description of Artificial Sequence: Synthetic coding sequence
  source 1..3507: mol_type = other DNA
atgggcaaggtgggcgccggcggcggcagccaggccagactgagcgccctgctggccggcgccggcctgctgatcctgtgcgcccccggcgtgtgcggcggcggcagctgctgccccagcccccaccccagcagcgcccccagaagcgccagcacccccagaggcttcagccaccagggcagacccggcagagcccccgccacccccctgcccctggtggtgagacccctgttcagcgtggcccccggcgacagagccctgagcctggagagagccagaggcaccggcgccagcatggccgtggccgccagaagcggcagaagaagaagaagcggcgccgaccaggagaaggccgagagaggcgagggcgccagcagaagccccagaggcgtgctgagagacggcggccagcaggagcccggcaccagagagagagaccccgacaaggccaccagattcagaatggaggagctgagactgaccagcaccaccttcgccctgaccggcgacagcgcccacaaccaggccatggtgcactggagcggccacaacagcagcgtgatcctgatcctgaccaagctgtacgactacaacctgggcagcatcaccgagagcagcctgtggagaagcaccgactacggcaccacctacgagaagctgaacgacaaggtgggcctgaagaccatcctgagctacctgtacgtgtgccccaccaacaagagaaagatcatgctgctgaccgaccccgagatcgagagcagcctgctgatcagcagcgacgagggcgccacctaccagaagtacagactgaacttctacatccagagcctgctgttccaccccaagcaggaggactggatcctggcctacagccaggaccagaagctgtacagcagcgccgagttcggcagaagatggcagctgatccaggagggcgtggtgcccaacagattctactggagcgtgatgggcagcaacaaggagcccgacctggtgcacctggaggccagaaccgtggacggccacagccactacctgacctgcagaatgcagaactgcaccgaggccaacagaaaccagcccttccccggctacatcgaccccgacagcctgatcgtgcaggaccactacgtgttcgtgcagctgaccagcggcggcagaccccactactacgtgagctacagaagaaacgccttcgcccagatgaagctgcccaagtacgccctgcccaaggacatgcacgtgatcagcaccgacgagaaccaggtgttcgccgccgtgcaggagtggaaccagaacgacacctacaacctgtacatcagcgacaccagaggcgtgtacttcaccctggccctggagaacgtgcagagcagcagaggccccgagggcaacatcatgatcgacctgtacgaggtggccggcatcaagggcatgttcctggccaacaagaagatcgacaaccaggtgaagaccttcatcacctacaacaagggcagagactggagactgctgcaggcccccgacaccgacctgagaggcgaccccgtgcactgcctgctgccctactgcagcctgcacctgcacctgaaggtgagcgagaacccctacaccagcggcatcatcgccagcaaggacaccgcccccagcatcatcgtggccagcggcaacatcggcagcgagctgagcgacaccgacatcagcatgttcgtgagcagcgacgccggcaacacctggagacagatcttcgaggaggagcacagcgtgctgtacctggaccagggcggcgtgctggtggccatgaagcacaccagcctgcccatcagacacctgtggctgagcttcgacgagggcagaagctggagcaagtacagcttcaccagcatccccctgttcgtggacggcgtgctgggcgagcccggcgaggagaccctgatcatgaccgtgttcggccacttcagccacagaagcgagtggcagctggtgaaggtggactacaagagcatcttcgacagaagatgcgccgaggaggactacagaccctggcagctgcacagccagggcgaggcctgcatcatgggcgccaagagaatctacaagaagagaaagagcgagagaaagtgcatgcagggcaagtacgccggcgccatggagagcgagccctgcgtgtgcaccgaggccgacttcgactgcgactacggctacgagagacacagcaacggccagtgcctgcccgccttctggttcaaccccagcagcctgagcaaggactgcagcctgggccagagctacctgaacagcaccggctacagaaaggtggtgagcaacaactgcaccgacggcgtgagagagcagtacaccgccaagccccagaagtgccccggcaaggcccccagaggcctgagaatcgtgaccgccgacggcaagctgaccgccgagcagggccacaacgtgaccctgatggtgcagctggaggagggcgacgtgcagagaaccctgatccaggtggacttcggcgacggcatcgccgtgagctacgtgaacctgagcagcatggaggacggcatcaagcacgtgtaccagaacgtgggcatcttcagagtgaccgtgcaggtggacaacagcctgggcagcgacagcgccgtgctgtacctgcacgtgacctgccccctggagcacgtgcacctgagcctgcccttcgtgaccaccaagaacaaggaggtgaacgccaccgccgtgctgtggcccagccaggtgggcaccctgacctacgtgtggtggtacggcaacaacaccgagcccctgatcaccctggagggcagcatcagcttcagattcaccagcgagggcatgaacaccatcaccgtgcaggtgagcgccggcaacgccatcctgcaggacaccaagaccatcgccgtgtacgaggagttcagaagcctgagactgagcttcagccccaacctggacgactacaaccccgacatccccgagtggagaagagacatcggcagagtgatcaagaagagcctggtggaggccaccggcgtgcccggccagcacatcctggtggccgtgctgcccggcctgcccaccaccgccgagctgttcgtgctgccctaccaggaccccgccggcgagaacaagagaagcaccgacgacctggagcagatcagcgagctgctgatccacaccctgaaccagaacagcgtgcacttcgagctgaagcccggcgtgagagtgctggtgcacgccgcccacctgaccgccgcccccctggtggacctgacccccacccacagcggcagcgccatgctgatgctgctgagcgtggtgttcgtgggcctggccgtgttcgtgatctacaagttcaagagaagagtggccctgcccagcccccccagccccagcacccagcccggcgacagcagcctgagactgcagagagccagacacgccaccccccccagcacccccaagagaggcagcgccggcgcccagtacgccatctag

SEQ ID NO: 100347 - DNA, 3597 bp, synthetic construct
  misc_feature 1..3597: note = Description of Artificial Sequence: Synthetic coding sequence
  source 1..3597: mol_type = other DNA
atgggcaaggtgggcgccggcggcggcagccaggccagactgagcgccctgctggccggcgccggcctgctgatcctgtgcgcccccggcgtgtgcggcggcggcagctgctgccccagcccccaccccagcagcgcccccagaagcgccagcacccccagaggcttcagccaccagggcagacccggcagagcccccgccacccccctgcccctggtggtgagacccctgttcagcgtggcccccggcgacagagccctgagcctggagagagccagaggcaccggcgccagcatggccgtggccgccagaagcggcagaagaagaagaagcggcgccgaccaggagaaggccgagagaggcgagggcgccagcagaagccccagaggcgtgctgagagacggcggccagcaggagcccggcaccagagagagagaccccgacaaggccaccagattcagaatggaggagctgagactgaccagcaccaccttcgccctgaccggcgacagcgcccacaaccaggccatggtgcactggagcggccacaacagcagcgtgatcctgatcctgaccaagctgtacgactacaacctgggcagcatcaccgagagcagcctgtggagaagcaccgactacggcaccacctacgagaagctgaacgacaaggtgggcctgaagaccatcctgagctacctgtacgtgtgccccaccaacaagagaaagatcatgctgctgaccgaccccgagatcgagagcagcctgctgatcagcagcgacgagggcgccacctaccagaagtacagactgaacttctacatccagagcctgctgttccaccccaagcaggaggactggatcctggcctacagccaggaccagaagctgtacagcagcgccgagttcggcagaagatggcagctgatccaggagggcgtggtgcccaacagattctactggagcgtgatgggcagcaacaaggagcccgacctggtgcacctggaggccagaaccgtggacggccacagccactacctgacctgcagaatgcagaactgcaccgaggccaacagaaaccagcccttccccggctacatcgaccccgacagcctgatcgtgcaggaccactacgtgttcgtgcagctgaccagcggcggcagaccccactactacgtgagctacagaagaaacgccttcgcccagatgaagctgcccaagtacgccctgcccaaggacatgcacgtgatcagcaccgacgagaaccaggtgttcgccgccgtgcaggagtggaaccagaacgacacctacaacctgtacatcagcgacaccagaggcgtgtacttcaccctggccctggagaacgtgcagagcagcagaggccccgagggcaacatcatgatcgacctgtacgaggtggccggcatcaagggcatgttcctggccaacaagaagatcgacaaccaggtgaagaccttcatcacctacaacaagggcagagactggagactgctgcaggcccccgacaccgacctgagaggcgaccccgtgcactgcctgctgccctactgcagcctgcacctgcacctgaaggtgagcgagaacccctacaccagcggcatcatcgccagcaaggacaccgcccccagcatcatcgtggccagcggcaacatcggcagcgagctgagcgacaccgacatcagcatgttcgtgagcagcgacgccggcaacacctggagacagatcttcgaggaggagcacagcgtgctgtacctggaccagggcggcgtgctggtggccatgaagcacaccagcctgcccatcagacacctgtggctgagcttcgacgagggcagaagctggagcaagtacagcttcaccagcatccccctgttcgtggacggcgtgctgggcgagcccggcgaggagaccctgatcatgaccgtgttcggccacttcagccacagaagcgagtggcagctggtgaaggtggactacaagagcatcttcgacagaagatgcgccgaggaggactacagaccctggcagctgcacagccagggcgaggcctgcatcatgggcgccaagagaatctacaagaagagaaagagcgagagaaagtgcatgcagggcaagtacgccggcgccatggagagcgagccctgcgtgtgcaccgaggccgacttcgactgcgactacggctacgagagacacagcaacggccagtgcctgcccgccttctggttcaaccccagcagcctgagcaaggactgcagcctgggccagagctacctgaacagcaccggctacagaaaggtggtgagcaacaactgcaccgacggcgtgagagagcagtacaccgccaagccccagaagtgccccggcaaggcccccagaggcctgagaatcgtgaccgccgacggcaagctgaccgccgagcagggccacaacgtgaccctgatggtgcagctggaggagggcgacgtgcagagaaccctgatccaggtggacttcggcgacggcatcgccgtgagctacgtgaacctgagcagcatggaggacggcatcaagcacgtgtaccagaacgtgggcatcttcagagtgaccgtgcaggtggacaacagcctgggcagcgacagcgccgtgctgtacctgcacgtgacctgccccctggagcacgtgcacctgagcctgcccttcgtgaccaccaagaacaaggaggtgaacgccaccgccgtgctgtggcccagccaggtgggcaccctgacctacgtgtggtggtacggcaacaacaccgagcccctgatcaccctggagggcagcatcagcttcagattcaccagcgagggcatgaacaccatcaccgtgcaggtgagcgccggcaacgccatcctgcaggacaccaagaccatcgccgtgtacgaggagttcagaagcctgagactgagcttcagccccaacctggacgactacaaccccgacatccccgagtggagaagagacatcggcagagtgatcaagaagagcctggtggaggccaccggcgtgcccggccagcacatcctggtggccgtgctgcccggcctgcccaccaccgccgagctgttcgtgctgccctaccaggaccccgccggcgagaacaagagaagcaccgacgacctggagcagatcagcgagctgctgatccacaccctgaaccagaacagcgtgcacttcgagctgaagcccggcgtgagagtgctggtgcacgccgcccacctgaccgccgcccccctggtggacctgacccccacccacagcggcagcgccatgctgatgctgctgagcgtggtgttcgtgggcctggccgtgttcgtgatctacaagttcaagagaaagatccccggcatcaacgtgtacgcccagatgcagaacgagaaggagcaggagatgatcagccccgtgagccacagcgagagcagacccaacgtgccccagaccgagctgagaagacccggccagctgatcgacgagaaggtggagagccagctgatcggcagcatcagcatcgtggccgagaaccagagcaccaaggagatccccacctacgtgaacgtgtag

SEQ ID NO: 100348 - DNA, 2145 bp, synthetic construct
  misc_feature 1..2145: note = Description of Artificial Sequence: Synthetic coding sequence
  source 1..2145: mol_type = other DNA
atgatcgacctgtacgaggtggccggcatcaagggcatgttcctggccaacaagaagatcgacaaccaggtgaagaccttcatcacctacaacaagggcagagactggagactgctgcaggcccccgacaccgacctgagaggcgaccccgtgcactgcctgctgccctactgcagcctgcacctgcacctgaaggtgagcgagaacccctacaccagcggcatcatcgccagcaaggacaccgcccccagcatcatcgtggccagcggcaacatcggcagcgagctgagcgacaccgacatcagcatgttcgtgagcagcgacgccggcaacacctggagacagatcttcgaggaggagcacagcgtgctgtacctggaccagggcggcgtgctggtggccatgaagcacaccagcctgcccatcagacacctgtggctgagcttcgacgagggcagaagctggagcaagtacagcttcaccagcatccccctgttcgtggacggcgtgctgggcgagcccggcgaggagaccctgatcatgaccgtgttcggccacttcagccacagaagcgagtggcagctggtgaaggtggactacaagagcatcttcgacagaagatgcgccgaggaggactacagaccctggcagctgcacagccagggcgaggcctgcatcatgggcgccaagagaatctacaagaagagaaagagcgagagaaagtgcatgcagggcaagtacgccggcgccatggagagcgagccctgcgtgtgcaccgaggccgacttcgactgcgactacggctacgagagacacagcaacggccagtgcctgcccgccttctggttcaaccccagcagcctgagcaaggactgcagcctgggccagagctacctgaacagcaccggctacagaaaggtggtgagcaacaactgcaccgacggcgtgagagagcagtacaccgccaagccccagaagtgccccggcaaggcccccagaggcctgagaatcgtgaccgccgacggcaagctgaccgccgagcagggccacaacgtgaccctgatggtgcagctggaggagggcgacgtgcagagaaccctgatccaggtggacttcggcgacggcatcgccgtgagctacgtgaacctgagcagcatggaggacggcatcaagcacgtgtaccagaacgtgggcatcttcagagtgaccgtgcaggtggacaacagcctgggcagcgacagcgccgtgctgtacctgcacgtgacctgccccctggagcacgtgcacctgagcctgcccttcgtgaccaccaagaacaaggaggtgaacgccaccgccgtgctgtggcccagccaggtgggcaccctgacctacgtgtggtggtacggcaacaacaccgagcccctgatcaccctggagggcagcatcagcttcagattcaccagcgagggcatgaacaccatcaccgtgcaggtgagcgccggcaacgccatcctgcaggacaccaagaccatcgccgtgtacgaggagttcagaagcctgagactgagcttcagccccaacctggacgactacaaccccgacatccccgagtggagaagagacatcggcagagtgatcaagaagagcctggtggaggccaccggcgtgcccggccagcacatcctggtggccgtgctgcccggcctgcccaccaccgccgagctgttcgtgctgccctaccaggaccccgccggcgagaacaagagaagcaccgacgacctggagcagatcagcgagctgctgatccacaccctgaaccagaacagcgtgcacttcgagctgaagcccggcgtgagagtgctggtgcacgccgcccacctgaccgccgcccccctggtggacctgacccccacccacagcggcagcgccatgctgatgctgctgagcgtggtgttcgtgggcctggccgtgttcgtgatctacaagttcaagagaaagatccccggcatcaacgtgtacgcccagatgcagaacgagaaggagcaggagatgatcagccccgtgagccacagcgagagcagacccaacgtgccccagaccgagctgagaagacccggccagctgatcgacgagaaggtggagagccagctgatcggcgagtag

SEQ ID NO: 100349 - DNA, 642 bp, synthetic construct
  misc_feature 1..642: note = Description of Artificial Sequence: Synthetic coding sequence
  source 1..642: mol_type = other DNA
tgactggacgactacaaccccgacatccccgagtggagaagagacatcggcagagtgatcaagaagagcctggtggaggccaccggcgtgcccggccagcacatcctggtggccgtgctgcccggcctgcccaccaccgccgagctgttcgtgctgccctaccaggaccccgccggcgagaacaagagaagcaccgacgacctggagcagatcagcgagctgctgatccacaccctgaaccagaacagcgtgcacttcgagctgaagcccggcgtgagagtgctggtgcacgccgcccacctgaccgccgcccccctggtggacctgacccccacccacagcggcagcgccatgctgatgctgctgagcgtggtgttcgtgggcctggccgtgttcgtgatctacaagttcaagagaaagatccccggcatcaacgtgtacgcccagatgcagaacgagaaggagcaggagatgatcagccccgtgagccacagcgagagcagacccaacgtgccccagaccgagctgagaagacccggccagctgatcgacgagaaggtggagagccagctgatcggcagcatcagcatcgtggccgagaaccagagcaccaaggagatccccacctacgtgaacgtgtag

SEQ ID NO: 100350 - DNA, 3009 bp, synthetic construct
  misc_feature 1..3009: note = Description of Artificial Sequence: Synthetic coding sequence
  source 1..3009: mol_type = other DNA
atgggcaaggtgctggagagcagcctgtggagaagcagcgacttcggcaccagctacaccaagctgaccctgcagcccggcgtgaccaccgtgatcgacaacttctacatctgccccaccaacaagagaaaggtgatcctggtgagcagcagcctgagcgacagagaccagagcctgttcctgagcgccgacgagggcgccaccttccagaagcagcccatccccttcttcgtggagaccctgatcttccaccccaaggaggaggacaaggtgctggcctacaccaaggagagcaagctgtacgtgagcagcgacctgggcaagaagtggaccctgctgcaggagagagtgaccaaggaccacgtgttctggagcgtgagcggcgtggacgccgaccccgacctggtgcacgtggaggcccaggacctgggcggcgacttcagatacgtgacctgcgccatccacaactgcagcgagaagatgctgaccgcccccttcgccggccccatcgaccacggcagcctgaccgtgcaggacgactacatcttcttcaaggccaccagcgccaaccagaccaagtactacgtgagctacagaagaaacgagttcgtgctgatgaagctgcccaagtacgccctgcccaaggacctgcagatcatcagcaccgacgagagccaggtgttcgtggccgtgcaggagtggtaccagatggacacctacaacctgtaccagagcgaccccagaggcgtgagatacgccctggtgctgcaggacgtgagaagcagcagacaggccgaggagagcgtgctgatcgacatcctggaggtgagaggcgtgaagggcgtgttcctggccaaccagaagatcgacggcaaggtgatgaccctgatcacctacaacaagggcagagactgggactacctgagaccccccagcatggacatgaacggcaagcccaccaactgcaagccccccgactgccacctgcacctgcacctgagatgggccgacaacccctacgtgagcggcaccgtgcacaccaaggacaccgcccccggcctgatcatgggcgccggcaacctgggcagccagctggtggagtacaaggaggagatgtacatcaccagcgactgcggccacacctggagacaggtgttcgaggaggagcaccacatcctgtacctggaccacggcggcgtgatcgtggccatcaaggacaccagcatccccctgaagatcctgaagttcagcgtggacgagggcctgacctggagcacccacaacttcaccagcaccagcgtgttcgtggacggcctgctgagcgagcccggcgacgagaccctggtgatgaccgtgttcggccacatcagcttcagaagcgactgggagctggtgaaggtggacttcagacccagcttcagcagacagtgcggcgaggaggactacagcagctgggagctgagcaacctgcagggcgacagatgcatcatgggccagcagagaagcttcagaaagagaaagagcaccagctggtgcatcaagggcagaagcttcaccagcgccctgaccagcagagtgtgcgagtgcagagacagcgacttcctgtgcgactacggcttcgagagaagcagcagcagcgagagcagcaccaacaagtgcagcgccaacttctggttcaaccccctgagcccccccgacgactgcgccctgggccagacctacaccagcagcctgggctacagaaaggtggtgagcaacgtgtgcgagggcggcgtggacatgcagcagagccaggtgcagctgcagtgccccctgaccccccccagaggcctgcaggtgagcatccagggcgaggccgtggccgtgagacccggcgaggacgtgctgttcgtggtgagacaggagcagggcgacgtgctgaccaccaagtaccaggtggacctgggcgacggcttcaaggccatgtacgtgaacctgaccctgaccggcgagcccatcagacacagatacgagagccccggcatctacagagtgagcgtgagagccgagaacaccgccggccacgacgaggccgtgctgttcgtgcaggtgaacagccccctgcaggccctgtacctggaggtggtgcccgtgatcggcctgaaccaggaggtgaacctgaccgccgtgctgctgcccctgaaccccaacctgaccgtgttctactggtggatcggccacagcctgcagcccctgctgagcctggacaacagcgtgaccaccagattcagcgacaccggcgacgtgagagtgaccgtgcaggccgcctgcggcaacagcgtgctgcaggacagcagagtgctgagagtgctggaccagttccaggtgatgcccctgcagttcagcaaggagctggacgcctacaaccccaacacccccgagtggagagaggacgtgggcctggtggtgaccagactgctgagcaaggagaccagcgtgccccaggagctgctggtgaccgtggtgaagcccggcctgcccaccctggccgacctgtacgtgctgctgcccccccccagacccaccagaaagagaagcctgagcagcgacaagagactggccgccatccagcaggtgctgaacgcccagaagatcagcttcctgctgagaggcggcgtgagagtgctggtggccctgagagacaccggcaccggcgccgagcagctgggcggcggcggcggctactgggccgtggtggtgctgttcgtgatcggcctgttcgccgccggcgccttcatcctgtacaagttcaagagcagaaagagacccggcagaaccgtgtacgcccagatgcacaacgagaaggagcaggagatgaccagccccgtgagccacagcgaggacgtgcagggcgccgtgcagggcgaggagttcatcgacgacgacctggacagccagaccctgggcaaccacagcggcgtggtgctgagcatcaacagcagagagatgcacagctacctggtgagctag

SEQ ID NO: 100351 - DNA, 3480 bp, synthetic construct
  misc_feature 1..3480: note = Description of Artificial Sequence: Synthetic coding sequence
  source 1..3480: mol_type = other DNA
atggcccacagaggccccagcagagccagcaagggccccggccccaccgccagagcccccagccccggcgccccccccccccccagaagccccagaagcagacccctgctgctgctgctgctgctgctgggcgcctgcggcgccgccggcagaagccccgagcccggcagactgggcccccacgcccagctgaccagagtgcccagaagcccccccgccggcagagccgagcccggcggcggcgaggacagacaggccagaggcaccgagcccggcgcccccggccccagccccggccccgcccccggccccggcgaggacggcgcccccgccgccggctacagaagatgggagagagccgcccccctggccggcgtggccagcagagcccaggtgagcctgatcagcaccagcttcgtgctgaagggcgacgccacccacaaccaggccatggtgcactggaccggcgagaacagcagcgtgatcctgatcctgaccaagtactaccacgccgacatgggcaaggtgctggagagcagcctgtggagaagcagcgacttcggcaccagctacaccaagctgaccctgcagcccggcgtgaccaccgtgatcgacaacttctacatctgccccaccaacaagagaaaggtgatcctggtgagcagcagcctgagcgacagagaccagagcctgttcctgagcgccgacgagggcgccaccttccagaagcagcccatccccttcttcgtggagaccctgatcttccaccccaaggaggaggacaaggtgctggcctacaccaaggagagcaagctgtacgtgagcagcgacctgggcaagaagtggaccctgctgcaggagagagtgaccaaggaccacgtgttctggagcgtgagcggcgtggacgccgaccccgacctggtgcacgtggaggcccaggacctgggcggcgacttcagatacgtgacctgcgccatccacaactgcagcgagaagatgctgaccgcccccttcgccggccccatcgaccacggcagcctgaccgtgcaggacgactacatcttcttcaaggccaccagcgccaaccagaccaagtactacgtgagctacagaagaaacgagttcgtgctgatgaagctgcccaagtacgccctgcccaaggacctgcagatcatcagcaccgacgagagccaggtgttcgtggccgtgcaggagtggtaccagatggacacctacaacctgtaccagagcgaccccagaggcgtgagatacgccctggtgctgcaggacgtgagaagcagcagacaggccgaggagagcgtgctgatcgacatcctggaggtgagaggcgtgaagggcgtgttcctggccaaccagaagatcgacggcaaggtgatgaccctgatcacctacaacaagggcagagactgggactacctgagaccccccagcatggacatgaacggcaagcccaccaactgcaagccccccgactgccacctgcacctgcacctgagatgggccgacaacccctacgtgagcggcaccgtgcacaccaaggacaccgcccccggcctgatcatgggcgccggcaacctgggcagccagctggtggagtacaaggaggagatgtacatcaccagcgactgcggccacacctggagacaggtgttcgaggaggagcaccacatcctgtacctggaccacggcggcgtgatcgtggccatcaaggacaccagcatccccctgaagatcctgaagttcagcgtggacgagggcctgacctggagcacccacaacttcaccagcaccagcgtgttcgtggacggcctgctgagcgagcccggcgacgagaccctggtgatgaccgtgttcggccacatcagcttcagaagcgactgggagctggtgaaggtggacttcagacccagcttcagcagacagtgcggcgaggaggactacagcagctgggagctgagcaacctgcagggcgacagatgcatcatgggccagcagagaagcttcagaaagagaaagagcaccagctggtgcatcaagggcagaagcttcaccagcgccctgaccagcagagtgtgcgagtgcagagacagcgacttcctgtgcgactacggcttcgagagaagcagcagcagcgagagcagcaccaacaagtgcagcgccaacttctggttcaaccccctgagcccccccgacgactgcgccctgggccagacctacaccagcagcctgggctacagaaaggtggtgagcaacgtgtgcgagggcggcgtggacatgcagcagagccaggtgcagctgcagtgccccctgaccccccccagaggcctgcaggtgagcatccagggcgaggccgtggccgtgagacccggcgaggacgtgctgttcgtggtgagacaggagcagggcgacgtgctgaccaccaagtaccaggtggacctgggcgacggcttcaaggccatgtacgtgaacctgaccctgaccggcgagcccatcagacacagatacgagagccccggcatctacagagtgagcgtgagagccgagaacaccgccggccacgacgaggccgtgctgttcgtgcaggtgaacagccccctgcaggccctgtacctggaggtggtgcccgtgatcggcctgaaccaggaggtgaacctgaccgccgtgctgctgcccctgaaccccaacctgaccgtgttctactggtggatcggccacagcctgcagcccctgctgagcctggacaacagcgtgaccaccagattcagcgacaccggcgacgtgagagtgaccgtgcaggccgcctgcggcaacagcgtgctgcaggacagcagagtgctgagagtgctggaccagttccaggtgatgcccctgcagttcagcaaggagctggacgcctacaaccccaacacccccgagtggagagaggacgtgggcctggtggtgaccagactgctgagcaaggagaccagcgtgccccaggagctgctggtgaccgtggtgaagcccggcctgcccaccctggccgacctgtacgtgctgctgcccccccccagacccaccagaaagagaagcctgagcagcgacaagagactggccgccatccagcaggtgctgaacgcccagaagatcagcttcctgctgagaggcggcgtgagagtgctggtggccctgagagacaccggcaccggcgccgagcagctgggcggcggcggcggctactgggccgtggtggtgctgttcgtgatcggcctgttcgccgccggcgccttcatcctgtacaagttcaagagaaagagacccggcagaaccgtgtacgcccagatgcacaacgagaaggagcaggagatgaccagccccgtgagccacagcgaggacgtgcagggcgccgtgcagggcaaccacagcggcgtggtgctgagcatcaacagcagagagatgcacagctacctggtgagctag

SEQ ID NO: 100352 - DNA, 594 bp, synthetic construct
  misc_feature 1..594: note = Description of Artificial Sequence: Synthetic coding sequence
  source 1..594: mol_type = other DNA
atgggcgagagaaagatcttcaagaagagaaagcccggcgcccagtgcgccctgggcagagaccacagcggcagcgtggtgagcgagccctgcgtgtgcgccaactgggacttcgagtgcgactacggctacgagagacacggcgagagccagtgcgtgcccgccttctggtacaaccccgccagccccagcaaggactgcagcctgggccagagctacctgaacagcaccggctacagaagaatcgtgagcaacaactgcaccgacggcctgagagagaagtacaccgccaaggcccagatgtgccccggcaaggcccccagaggcctgcacgtggtgaccaccgacggcagactggtggccgagcagggccacaacgccaccttcatcatcctgatggaggagggcgacctgcagagaaccaacatccagctggacttcggcgacggcatcgccgtgagctacgccaacttcagccccatcgaggacggcatcaagcacgtgtacaagagcgccggcatcttccaggtgaccgcctacgccgagaacaacctgggcagcgacaccgccgtgctgttcctgcacgtggtgtag

SEQ ID NO: 100353 - DNA, 3669 bp, synthetic construct
  misc_feature 1..3669: note = Description of Artificial Sequence: Synthetic coding sequence
  source 1..3669: mol_type = other DNA
atggaggccgccagaaccgagagacccgccggcagacccggcgcccccctggtgagaaccggcctgctgctgctgagcacctgggtgctggccggcgccgagatcacctgggacgccaccggcggccccggcagacccgccgcccccgccagcagaccccccgccctgagccccctgagccccagagccgtggccagccagtggcccgaggagctggccagcgccagaagagccgccgtgctgggcagaagagccggccccgagctgctgccccagcagggcggcggcagaggcggcgagatgcaggtggaggccggcggcaccagccccgccggcgagagaagaggcagaggcatccccgcccccgccaagctgggcggcgccagaagaagcagaagagcccagccccccatcacccaggagagaggcgacgcctgggccaccgcccccgccgacggcagcagaggcagcagacccctggccaagggcagcagagaggaggtgaaggcccccagagccggcggcagcgccgccgaggacctgagactgcccagcaccagcttcgccctgaccggcgacagcgcccacaaccaggccatggtgcactggagcggccacaacagcagcgtgatcctgatcctgaccaagctgtacgacttcaacctgggcagcgtgaccgagagcagcctgtggagaagcaccgactacggcaccacctacgagaagctgaacgacaaggtgggcctgaagaccgtgctgagctacctgtacgtgaaccccaccaacaagagaaagatcatgctgctgagcgaccccgagatggagagcagcatcctgatcagcagcgacgagggcgccacctaccagaagtacagactgaccttctacatccagagcctgctgttccaccccaagcaggaggactgggtgctggcctacagcctggaccagaagctgtacagcagcatggacttcggcagaagatggcagctgatgcacgagagaatcacccccaacagattctactggagcgtggccggcctggacaaggaggccgacctggtgcacatggaggtgagaaccaccgacggctacgcccactacctgacctgcagaatccaggagtgcgccgagaccaccagaagcggccccttcgccagaagcatcgacatcagcagcctggtggtgcaggacgagtacatcttcatccaggtgaccaccagcggcagagccagctactacgtgagctacagaagagaggccttcgcccagatcaagctgcccaagtacagcctgcccaaggacatgcacatcatcagcaccgacgagaaccaggtgttcgccgccgtgcaggagtggaaccagaacgacacctacaacctgtacatcagcgacaccagaggcatctacttcaccctggccatggagaacatcaagagcagcagaggcctgatgggcaacatcatcatcgagctgtacgaggtggccggcatcaagggcatcttcctggccaacaagaaggtggacgaccaggtgaagacctacatcacctacaacaagggcagagactggagactgctgcaggcccccgacgtggacctgagaggcagccccgtgcactgcctgctgcccttctgcagcctgcacctgcacctgcagctgagcgagaacccctacagcagcggcagaatcagcagcaaggagaccgcccccggcctggtggtggccaccggcaacatcggccccgagctgagctacaccgacatcggcgtgttcatcagcagcgacggcggcaacacctggagacagatcttcgacgaggagtacaacgtgtggttcctggactggggcggcgccctggtggccatgaagcacacccccctgcccgtgagacacctgtgggtgagcttcgacgagggccacagctgggacaagtacggcttcaccagcgtgcccctgttcgtggacggcgccctggtggaggccggcatggagacccacatcatgaccgtgttcggccacttcagcctgagaagcgagtggcagctggtgaaggtggactacaagagcatcttcagcagacactgcaccaaggaggactaccagacctggcacctgctgaaccagggcgagccctgcgtgatgggcgagagaaagatcttcaagaagagaaagcccggcgcccagtgcgccctgggcagagaccacagcggcagcgtggtgagcgagccctgcgtgtgcgccaactgggacttcgagtgcgactacggctacgagagacacggcgagagccagtgcgtgcccgccttctggtacaaccccgccagccccagcaaggactgcagcctgggccagagctacctgaacagcaccggctacagaagaatcgtgagcaacaactgcaccgacggcctgagagagaagtacaccgccaaggcccagatgtgccccggcaaggcccccagaggcctgcacgtggtgaccaccgacggcagactggtggccgagcagggccacaacgccaccttcatcatcctgatggaggagggcgacctgcagagaaccaacatccagctggacttcggcgacggcatcgccgtgagctacgccaacttcagccccatcgaggacggcatcaagcacgtgtacaagagcgccggcatcttccaggtgaccgcctacgccgagaacaacctgggcagcgacaccgccgtgctgttcctgcacgtggtgtgccccgtggagcacgtgcacctgagagtgcccttcgtggccatcagaaacaaggaggtgaacatcagcgccgtggtgtggcccagccagctgggcaccctgacctacttctggtggttcggcaacagcaccaagcccctgatcaccctggacagcagcatcagcttcaccttcctggccgagggcaccgacaccatcaccgtgcaggtggccgccggcaacgccctgatccaggacaccaaggagatcgccgtgcacgagtacttccagagccagctgctgagcttcagccccaacctggactaccacaaccccgacatccccgagtggagaaaggacatcggcaacgtgatcaagagagccctggtgaaggtgaccagcgtgcccgaggaccagatcctgatcgccgtgttccccggcctgcccaccagcgccgagctgttcatcctgccccccaagaacctgaccgagagaagaaagggcaacgagggcgacctggagcagatcgtggagaccctgttcaacgccctgaaccagaacctggtgcagttcgagctgaagcccggcgtgcaggtgatcgtgtacgtgacccagctgaccctggcccccctggtggacagcagcgccggccacagcagcagcgccatgctgatgctgctgagcgtggtgttcgtgggcctggccgtgttcctgatctacaagttcaagagaaagatcccctggatcaacatctacgcccaggtgcagcacgacaaggagcaggagatgatcggcagcgtgagccagagcgagaacgcccccaagatcaccctgagcgacttcaccgagcccgaggagctgctggacaaggagctggacaccagagtgatcggcggcatcgccaccatcgccaacagcgagagcaccaaggagatccccaactgcaccagcgtgtag

SEQ ID NO: 100354 - DNA, 462 bp, synthetic construct
  misc_feature 1..462: note = Description of Artificial Sequence: Synthetic coding sequence
  source 1..462: mol_type = other DNA
gagaacccctacagcagcggcagaatcagcagcaaggagaccgcccccggcctggtggtggccaccggcaacatcggccccgagctgagctacaccgacatcggcgtgttcatcagcagcgacggcggcaacacctggagacagatcttcgacgaggagtacaacgtgtggttcctggactggggcggcgccctggtggccatgaagcacacccccctgcccgtgagacacctgtgggtgagcttcgacgagggccacagctgggacaagtacggcttcaccagcgtgcccctgttcgtggacggcgccctggtggaggccggcatggagacccacatcatgaccgactacggctacgagagacacggcgagagccagtgcgtgcccgccttctggtacaaccccgccagccccagcaaggactgcagcctgggccagagctacctgaacagcaccggctag

SEQ ID NO: 100355 - DNA, 1410 bp, synthetic construct
  misc_feature 1..1410: note = Description of Artificial Sequence: Synthetic coding sequence
  source 1..1410: mol_type = other DNA
atgggcaccgtgcacgccagaagcctggagcccctgcccagcagcggccccgacttcggcggcctgggcgaggaggccgagttcgtggaggtggagcccgaggccaagcaggagatcctggagaacaaggacgtggtggtgcagcacgtgcacttcgacggcctgggcagaaccaaggacgacatcatcatctgcgagatcggcgacgtgttcaaggccaagaacctgatcgaggtgatgagaaagagccacgaggccagagagaagctgctgagactgggcatcttcagacaggtggacgtgctgatcgacacctgccagggcgacgacgccctgcccaacggcctggacgtgaccttcgaggtgaccgagctgagaagactgaccggcagctacaacaccatggtgggcaacaacgagggcagcatggtgctgggcctgaagctgcccaacctgctgggcagagccgagaaggtgaccttccagttcagctacggcaccaaggagaccagctacggcctgagcttcttcaagcccagacccggcaacttcgagagaaacttcagcgtgaacctgtacaaggtgaccggccagttcccctggagcagcctgagagagaccgacagaggcatgagcgccgagtacagcttccccatctggaagaccagccacaccgtgaagtgggagggcgtgtggagagagctgggctgcctgagcagaaccgccagcttcgccgtgagaaaggagagcggccacagcctgaagagcagcctgagccacgccatggtgatcgacagcagaaacagcagcatcctgcccagaagaggcgccctgctgaaggtgaaccaggagctggccggctacaccggcggcgacgtgagcttcatcaaggaggacttcgagctgcagctgaacaagcagctgatcttcgacagcgtgttcagcgccagcttctggggcggcatgctggtgcccatcggcgacaagcccagcagcatcgccgacagattctacctgggcggccccaccagcatcagaggcttcagcatgcacagcatcggcccccagagcgagggcgactacctgggcggcgaggcctactgggccggcggcctgcacctgtacacccccctgcccttcagacccggccagggcggcttcggcgagctgttcagaacccacttcttcctgaacgccggcaacctgtgcaacctgaactacggcgagggccccaaggcccacatcagaaagctggccgagtgcatcagatggagctacggcgccggcatcgtgctgagactgggcaacatcgccagactggagctgaactactgcgtgcccatgggcgtgcagaccggcgacagaatctgcgacggcgtgcagttcggcgccggcatcagattcctgtag

SEQ ID NO: 100356 - DNA, 780 bp, synthetic construct
  misc_feature 1..780: note = Description of Artificial Sequence: Synthetic coding sequence
  source 1..780: mol_type = other DNA
atgagcgccgagtacagcttccccatctggaagaccagccacaccgtgaagtgggagggcgtgtggagagagctgggctgcctgagcagaaccgccagcttcgccgtgagaaaggagagcggccacagcctgaagagcagcctgagccacgccatggtgatcgacagcagaaacagcagcatcctgcccagaagaggcgccctgctgaaggtgaaccaggagctggccggctacaccggcggcgacgtgagcttcatcaaggaggacttcgagctgcagctgaacaagcagctgatcttcgacagcgtgttcagcgccagcttctggggcggcatgctggtgcccatcggcgacaagcccagcagcatcgccgacagattctacctgggcggccccaccagcatcagaggcttcagcatgcacagcatcggcccccagagcgagggcgactacctgggcggcgaggcctactgggccggcggcctgcacctgtacacccccctgcccttcagacccggccagggcggcttcggcgagctgttcagaacccacttcttcctgaacgccggcaacctgtgcaacctgaactacggcgagggccccaaggcccacatcagaaagctggccgagtgcatcagatggagctacggcgccggcatcgtgctgagactgggcaacatcgccagactggagctgaactactgcgtgcccatgggcgtgcagaccggcgacagaatctgcgacggcgtgcagttcggcgccggcatcagattcctgtag

SEQ ID NO: 100357 - DNA, 1425 bp, synthetic construct
  misc_feature 1..1425: note = Description of Artificial Sequence: Synthetic coding sequence
  source 1..1425: mol_type = other DNA
atggccagcggcggcggcggctgcagcgccagcgagagactgcccccccccttccccggcctggagcccgagagcgagggcgccgccggcggcagcgagcccgaggccggcgacagcgacaccgagggcgaggacatcttcaccggcgccgccgtggtgagcaagcaccagagccccaagatcaccaccagcctgctgcccatcaacaacggcagcaaggagaacggcatccacgaggagcaggaccaggagccccaggacctgttcgccgacgccaccgtggagctgagcctggacagcacccagaacaaccagaagaaggtgctggccaagaccctgatcagcctgcccccccaggaggccaccaacagcagcaagccccagcccacctacgaggagctggaggaggaggagcaggaggaccagttcgacctgaccgtgggcatcaccgaccccgagaagatcggcgacggcatgaacgcctacgtggcctacaaggtgaccacccagaccagcctgcccctgttcagaagcaagcagttcgccgtgaagagaagattcagcgacttcctgggcctgtacgagaagctgagcgagaagcacagccagaacggcttcatcgtgccccccccccccgagaagagcctgatcggcatgaccaaggtgaaggtgggcaaggaggacagcagcagcgccgagttcctggagaagagaagagccgccctggagagatacctgcagagaatcgtgaaccaccccaccatgctgcaggaccccgacgtgagagagttcctggagaaggaggagctgcccagagccgtgggcacccagaccctgagcggcgccggcctgctgaagatgttcaacaaggccaccgacgccgtgagcaagatgaccatcaagatgaacgagagcgacatctggttcgaggagaagctgcaggaggtggagtgcgaggagcagagactgagaaagctgcacgccgtggtggagaccctggtgaaccacagaaaggagctggccctgaacaccgcccagttcgccaagagcctggccatgctgggcagcagcgaggacaacaccgccctgagcagagccctgagccagctggccgaggtggaggagaagatcgagcagctgcaccaggagcaggccaacaacgacttcttcctgctggccgagctgctgagcgactacatcagactgctggccatcgtgagatgggagagcagagtgacccagtacgagagagacttcgagagaatcagcaccgtggtgagaaaggaggtgatcagattcgagaaggagaagagcaaggacttcaagaaccacgtgatcaagtacctggagaccctgctgtacagccagcagcagctggccaagtactgggaggccttcctgcccgaggccaaggccatcagctag

SEQ ID NO: 100358 - DNA, 1569 bp, synthetic construct
  misc_feature 1..1569: note = Description of Artificial Sequence: Synthetic coding sequence
  source 1..1569: mol_type = other DNA
atggccagcggcggcggcggctgcagcgccagcgagagactgcccccccccttccccggcctggagcccgagagcgagggcgccgccggcggcagcgagcccgaggccggcgacagcgacaccgagggcgaggacatcttcaccggcgccgccgtggtgagcaagcaccagagccccaagatcaccaccagcctgctgcccatcaacaacggcagcaaggagaacggcatccacgaggagcaggaccaggagccccaggacctgttcgccgacgccaccgtggagctgagcctggacagcacccagaacaaccagaagaaggtgctggccaagaccctgatcagcctgcccccccaggaggccaccaacagcagcaagccccagcccacctacgaggagctggaggaggaggagcaggaggaccagttcgacctgaccgtgggcatcaccgaccccgagaagatcggcgacggcatgaacgcctacgtggcctacaaggtgaccacccagaccagcctgcccctgttcagaagcaagcagttcgccgtgaagagaagattcagcgacttcctgggcctgtacgagaagctgagcgagaagcacagccagaacggcttcatcgtgccccccccccccgagaagagcctgatcggcatgaccaaggtgaaggtgggcaaggaggacagcagcagcgccgagttcctggagaagagaagagccgccctggagagatacctgcagagaatcgtgaaccaccccaccatgctgcaggaccccgacgtgagagagttcctggagaaggaggagctgcccagagccgtgggcacccagaccctgagcggcgccggcctgctgaagatgttcaacaaggccaccgacgccgtgagcaagatgaccatcaagatgaacgagagcgacatctggttcgaggagaagctgcaggaggtggagtgcgaggagcagagactgagaaagctgcacgccgtggtggagaccctggtgaaccacagaaaggagctggccctgaacaccgcccagttcgccaagagcctggccatgctgggcagcagcgaggacaacaccgccctgagcagagccctgagccagctggccgaggtggaggagaagatcgagcagctgcaccaggagcaggccaacaacgacttcttcctgctggccgagctgctgagcgactacatcagactgctggccatcgtgagagccgccttcgaccagagaatgaagacctggcagagatggcaggacgcccaggccaccctgcagaagaagagagaggccgaggccagactgctgtgggccaacaagcccgacaagctgcagcaggccaaggacgagatcctggagtgggagagcagagtgacccagtacgagagagacttcgagagaatcagcaccgtggtgagaaaggaggtgatcagattcgagaaggagaagagcaaggacttcaagaaccacgtgatcaagtacctggagaccctgctgtacagccagcagcagctggccaagtactgggaggccttcctgcccgaggccaaggccatcagctag

SEQ ID NO: 100359 - DNA, 1374 bp, synthetic construct
  misc_feature 1..1374: note = Description of Artificial Sequence: Synthetic coding sequence
  source 1..1374: mol_type = other DNA
atggccagcggcggcggcggctgcagcgccagcgagagactgcccccccccttccccggcctggagcccgagagcgagggcgccgccggcggcagcgagcccgaggccggcgacagcgacaccgagggcgaggacatcttcaccggcgccgccgtggtgagcaagcaccagagccccaagatcaccaccagcctgctgcccatcaacaacggcagcaaggagaacggcatccacgaggagcaggaccaggagccccaggacctgttcgccggcgacggcatgaacgcctacgtggcctacaaggtgaccacccagaccagcctgcccctgttcagaagcaagcagttcgccgtgaagagaagattcagcgacttcctgggcctgtacgagaagctgagcgagaagcacagccagaacggcttcatcgtgccccccccccccgagaagagcctgatcggcatgaccaaggtgaaggtgggcaaggaggacagcagcagcgccgagttcctggagaagagaagagccgccctggagagatacctgcagagaatcgtgaaccaccccaccatgctgcaggaccccgacgtgagagagttcctggagaaggaggagctgcccagagccgtgggcacccagaccctgagcggcgccggcctgctgaagatgttcaacaaggccaccgacgccgtgagcaagatgaccatcaagatgaacgagagcgacatctggttcgaggagaagctgcaggaggtggagtgcgaggagcagagactgagaaagctgcacgccgtggtggagaccctggtgaaccacagaaaggagctggccctgaacaccgcccagttcgccaagagcctggccatgctgggcagcagcgaggacaacaccgccctgagcagagccctgagccagctggccgaggtggaggagaagatcgagcagctgcaccaggagcaggccaacaacgacttcttcctgctggccgagctgctgagcgactacatcagactgctggccatcgtgagagccgccttcgaccagagaatgaagacctggcagagatggcaggacgcccaggccaccctgcagaagaagagagaggccgaggccagactgctgtgggccaacaagcccgacaagctgcagcaggccaaggacgagatcctggagtgggagagcagagtgacccagtacgagagagacttcgagagaatcagcaccgtggtgagaaaggaggtgatcagattcgagaaggagaagagcaaggacttcaagaaccacgtgatcaagtacctggagaccctgctgtacagccagcagcagctggccaagtactgggaggccttcctgcccgaggccaaggccatcagctag

SEQ ID NO: 100360 - DNA, 1374 bp, synthetic construct; identical to SEQ ID NO: 100359
  misc_feature 1..1374: note = Description of Artificial Sequence: Synthetic coding sequence
  source 1..1374: mol_type = other DNA

SEQ ID NO: 100361 - DNA, 3018 bp, synthetic construct
  misc_feature 1..3018: note = Description of Artificial Sequence: Synthetic coding sequence
  source 1..3018: mol_type = other DNA
atggccgccagacccagcagagccaccggccccagaggcggccagagaagcagagtgaagcccccccccggcagaagactgaaggagcagctgccccccctggccgccgccagagccgtgttcgccgccgccaccgccgtgatcatgctgaccgaggccagcctgagcatctggggctggggcagcctgggcatcgtgctgttcctgatcaccttcggccccttcgtgatcttctacctgaccttctacatcctgtgcttcgtgggcggcggcctggtggtgaccctgctgttcggcaagaccaacagcgagaagtacctggagcagtgcgagcacagcttcctgccccccaccagccccggcgtgcccaagtgcctggaggagatgaagagagaggccagaaccatcaagatcgacagaagactgaccggcgccaacatcatcgacgagcccctgcagcaggtgatccagttcagcctgagagactacgtgcagtactggtactacaccctgagcgacgacgagagcttcctgctggagatcagacagaccctgcagaacgccctgatccagttcgccaccagaagcaaggagatcgactggcagccctacttcaccaccagaatcgtggacgacttcggcacccacctgagagtgttcagaaaggcccagcagaagatcaccgagaaggacgaccaggtgaagggcaccgccgaggacctggtggacaccttcttcgaggtggaggtggagatggagaaggaggtgtgcagagacctggtgtgcaccagccccaaggacgaggagggcttcctgagagacctgtgcgaggtgctgctgtacctgctgctgccccccggcgacttccagaacaagatcatgagatacttcgtgagagagatcctggccagaggcatcctgctgcccctgatcaaccagctgagcgaccccgactacatcaaccagtacgtgatctggatgatcagagacagcaactgcaactacgaggccttcatgaacatcatcaagctgagcgacaacatcggcgagctggaggccgtgagagacaaggccgccgaggagctgcagtacctgagaagcctggacaccgccggcgacgacatcaacaccatcaagaaccagatcaacagcctgctgttcgtgaagaaggtgtgcgacagcagaatccagagactgcagagcggcaaggagatcaacaccgtgaagctggccgccaacttcggcaagctgtgcaccgtgcccctggacagcatcctggtggacaacgtggccctgcagttcttcatggactacatgcagcagaccggcggccaggcccacctgttcttctggatgaccgtggagggctacagagtgaccgcccagcagcagctggaggtgctgctgagcagacagagagacggcaagcaccagaccaaccagaccaagggcctgctgagagccgccgccgtgggcatctacgagcagtacctgagcgagaaggccagccccagagtgaccgtggacgactacctggtggccaagctggccgacaccctgaaccacgaggaccccacccccgagatcttcgacgacatccagagaaaggtgtacgagctgatgctgagagacgagagattctaccccagcttcagacagaacgccctgtacgtgagaatgctggccgagctggacatgctgaaggaccccagcttcagaggcagcgacgacggcgacggcgagagcttcaacggcagccccaccggcagcatcaacctgagcctggacgacctgagcaacgtgagcagcgacgacagcgtgcagctgcacgcctacatcagcgacaccggcgtgtgcaacgaccacggcaagacctacgccctgtacgccatcaccgtgcacagaagaaacctgaacagcgaggagatgtggaagacctacagaagatacagcgacttccacgacttccacatgagaatcaccgagcagttcgagagcctgagcagcatcctgaagctgcccggcaagaagaccttcaacaacatggacagagacttcctggagaagagaaagaaggacctgaacgcctacctgcagctgctgctggcccccgagatgatgaaggccagccccgccctggcccactacgtgtacgacttcctggagaacaaggcctacagcaagggcaagggcgacttcgccagaaagatggacaccttcgtgaaccccctgagaaacagcatgagaaacgtgagcaacgccgtgaagagcctgcccgacagcctggccgagggcatgaccaagatgagcgacaacatgggcaagatgagcgagagactgggccaggacatcaagcagagcttcttcaaggtgccccccctgatccccaagaccgacagcgaccccgagcacagaagagtgagcgcccagctggacgacaacgtggacgacaacatccccctgagagtgatgctgctgctgatggacgaggtgttcgacctgaaggagagaaaccagtggctgagaagaaacatcaagaacctgctgcagcagctgatcagagccacctacggcgacaccatcaacagaaagatcgtggaccacgtggactggatgaccagccccgagcaggtggccgacagcgtgaagagattcagagacgccttctggcccaacggcatcctggccgaggccgtgccctgcagagacaagagcatcagaatgagaaccagagtggccggcaagaccaagctgctggccatcatgcccgacgagctgaagcacatcatcggcgccgagaccaccagaaagggcatcctgagagtgttcgagatgttccagcacaaccagctgaacagaagaatggtgtacgtgttcctggagggcttcctggagaccctgttcccccagtacaagttcagagagctgttcaacaagctgcacagcagaagcaagcagatgcagaagtacaagcagaagctgcagaccacccaggcccccagcctgcagaagagatag

SEQ ID NO: 100362 - DNA, 2874 bp, synthetic construct
  misc_feature 1..2874: note = Description of Artificial Sequence: Synthetic coding sequence
  source 1..2874: mol_type = other DNA
atgctgaccgaggccagcctgagcatctggggctggggcagcctgggcatcgtgctgttcctgatcaccttcggccccttcgtgatcttctacctgaccttctacatcctgtgcttcgtgggcggcggcctggtggtgaccctgctgttcggcaagaccaacagcgagaagtacctggagcagtgcgagcacagcttcctgccccccaccagccccggcgtgcccaagtgcctggaggagatgaagagagaggccagaaccatcaagatcgacagaagactgaccggcgccaacatcatcgacgagcccctgcagcaggtgatccagttcagcctgagagactacgtgcagtactggtactacaccctgagcgacgacgagagcttcctgctggagatcagacagaccctgcagaacgccctgatccagttcgccaccagaagcaaggagatcgactggcagccctacttcaccaccagaatcgtggacgacttcggcacccacctgagagtgttcagaaaggcccagcagaagatcaccgagaaggacgaccaggtgaagggcaccgccgaggacctggtggacaccttcttcgaggtggaggtggagatggagaaggaggtgtgcagagacctggtgtgcaccagccccaaggacgaggagggcttcctgagagacctgtgcgaggtgctgctgtacctgctgctgccccccggcgacttccagaacaagatcatgagatacttcgtgagagagatcctggccagaggcatcctgctgcccctgatcaaccagctgagcgaccccgactacatcaaccagtacgtgatctggatgatcagagacagcaactgcaactacgaggccttcatgaacatcatcaagctgagcgacaacatcggcgagctggaggccgtgagagacaaggccgccgaggagctgcagtacctgagaagcctggacaccgccggcgacgacatcaacaccatcaagaaccagatcaacagcctgctgttcgtgaagaaggtgtgcgacagcagaatccagagactgcagagcggcaaggagatcaacaccgtgaagctggccgccaacttcggcaagctgtgcaccgtgcccctggacagcatcctggtggacaacgtggccctgcagttcttcatggactacatgcagcagaccggcggccaggcccacctgttcttctggatgaccgtggagggctacagagtgaccgcccagcagcagctggaggtgctgctgagcagacagagagacggcaagcaccagaccaaccagaccaagggcctgctgagagccgccgccgtgggcatctacgagcagtacctgagcgagaaggccagccccagagtgaccgtggacgactacctggtggccaagctggccgacaccctgaaccacgaggaccccacccccgagatcttcgacgacatccagagaaaggtgtacgagctgatgctgagagacgagagattctaccccagcttcagacagaacgccctgtacgtgagaatgctggccgagctggacatgctgaaggaccccagcttcagaggcagcgacgacggcgacggcgagagcttcaacggcagccccaccggcagcatcaacctgagcctggacgacctgagcaacgtgagcagcgacgacagcgtgcagctgcacgcctacatcagcgacaccggcgtgtgcaacgaccacggcaagacctacgccctgtacgccatcaccgtgcacagaagaaacctgaacagcgaggagatgtggaagacctacagaagatacagcgacttccacgacttccacatgagaatcaccgagcagttcgagagcctgagcagcatcctgaagctgcccggcaagaagaccttcaacaacatggacagagacttcctggagaagagaaagaaggacctgaacgcctacctgcagctgctgctggcccccgagatgatgaaggccagccccgccctggcccactacgtgtacgacttcctggagaacaaggcctacagcaagggcaagggcgacttcgccagaaagatggacaccttcgtgaaccccctgagaaacagcatgagaaacgtgagcaacgccgtgaagagcctgcccgacagcctggccgagggcatgaccaagatgagcgacaacatgggcaagatgagcgagagactgggccaggacatcaagcagagcttcttcaaggtgccccccctgatccccaagaccgacagcgaccccgagcacagaagagtgagcgcccagctggacgacaacgtggacgacaacatccccctgagagtgatgctgctgctgatggacgaggtgttcgacctgaaggagagaaaccagtggctgagaagaaacatcaagaacctgctgcagcagctgatcagagccacctacggcgacaccatcaacagaaagatcgtggaccacgtggactggatgaccagccccgagcaggtggccgacagcgtgaagagattcagagacgccttctggcccaacggcatcctggccgaggccgtgccctgcagagacaagagcatcagaatgagaaccagagtggccggcaagaccaagctgctggccatcatgcccgacgagctgaagcacatcatcggcgccgagaccaccagaaagggcatcctgagagtgttcgagatgttccagcacaaccagctgaacagaagaatggtgtacgtgttcctggagggcttcctggagaccctgttcccccagtacaagttcagagagctgttcaacaagctgcacagcagaagcaagcagatgcagaagtacaagcagaagctgcagaccacccaggcccccagcctgcagaagagatag

SEQ ID NO: 100363 - DNA, 771 bp, synthetic construct
  misc_feature 1..771: note = Description of Artificial Sequence: Synthetic coding sequence
  source 1..771: mol_type = other DNA
atgagcagacaggccaaggacgacttcctgagacactacaccgtgagcgaccccagaacccaccccaagggctacaccgagtacaaggtgaccgcccagttcatcagcaagaaggaccccgaggacgtgaaggaggtggtggtgtggaagagatacagcgacttcagaaagctgcacggcgacctggcctacacccacagaaacctgttcagaagactggaggagttccccgccttccccagagcccaggtgttcggcagattcgaggccagcgtgatcgaggagagaagaaagggcgccgaggacctgctgagattcaccgtgcacatccccgccctgaacaacagcccccagctgaaggagttcttcagaggcggcgaggtgaccagacccctggaggtgagcagagacctgcacatcctgcccccccccctgatccccacccccccccccgacgaccccagactgagccagctgctgcccgccgagagaagaggcctggaggagctggaggtgcccgtggaccccccccccagcagccccgcccaggaggccctggacctgctgttcaactgcgagagcaccgaggaggccagcggcagccccgccagaggccccctgaccgaggccgagctggccctgttcgaccccttcagcaaggagggcgaccccctgcccgccagacaggagggcgtgaagaagaaggccgccgagtacctgaagagagccgaggagatcctgagactgcacctgagccagctgcccccctag

SEQ ID NO: 100364 - DNA, 1029 bp, synthetic construct
  misc_feature 1..1029: note = Description of Artificial Sequence: Synthetic coding sequence
  source 1..1029: mol_type = other DNA
atgagcagacaggccaaggacgacttcctgagacactacaccgtgagcgaccccagaacccaccccaagggctacaccgagtacaaggtgaccgcccagttcatcagcaagaaggaccccgaggacgtgaaggaggtggtggtgtggaagagatacagcgacttcagaaagctgcacggcgacctggcctacacccacagaaacctgttcagaagactggaggagttccccgccttccccagagcccaggtgttcggcagattcgaggccagcgtgatcgaggagagaagaaagggcgccgaggacctgctgagattcaccgtgcacatccccgccctgaacaacagcccccagctgaaggagttcttcagaggcggcgaggtgaccagacccctggaggtgagcagagacctgcacatcctgcccccccccctgatccccacccccccccccgacgaccccagactgagccagctgctgcccgccgagagaagaggcctggaggagctggaggtgcccgtggaccccccccccagcagccccgcccaggaggccctggacctgctgttcaactgcgagagcaccgaggaggccagcggcagccccgccagaggccccctgaccgaggccgagctggccctgttcgaccccttcagcaaggaggagggcgccgcccccagccccacccacgtggccgagctggccaccatggaggtggagagcgccagactggaccaggagccctgggagcccggcggccaggaggaggaggaggacggcgagggcggccccacccccgcctacctgagccaggccaccgagctgatcacccaggccctgagagacgagaaggccggcgcctacgccgccgccctgcagggctacagagacggcgtgcacgtgctgctgcagggcgtgcccagcgaccccctgcccgccagacaggagggcgtgaagaagaaggccgccgagtacctgaagagagccgaggagatcctgagactgcacctgagccagctgcccccctag

SEQ ID NO: 100365 - DNA, 1608 bp, synthetic construct
  misc_feature 1..1608: note = Description of Artificial Sequence: Synthetic coding sequence
  source 1..1608: mol_type = other DNA
atgagcgagggcgagagccagaccgtgctgagcagcggcagcgaccccaaggtggagagcagcagcagcgcccccggcctgaccagcgtgagcccccccgtgaccagcaccaccagcgccgccagccccgaggaggaggaggagagcgaggacgagagcgagatcctggaggagagcccctgcggcagatggcagaagagaagagaggaggtgaaccagagaaacgtgcccggcatcgacagcgcctacctggccatggacaccgaggagggcgtggaggtggtgtggaacgaggtgcagttcagcgagagaaagaactacaagctgcaggaggagaaggtgagagccgtgttcgacaacctgatccagctggagcacctgaacatcgtgaagttccacaagtactgggccgacatcaaggagaacaaggccagagtgatcttcatcaccgagtacatgagcagcggcagcctgaagcagttcctgaagaagaccaagaagaaccacaagaccatgaacgagaaggcctggaagagatggtgcacccagatcctgagcgccctgagctacctgcacagctgcgacccccccatcatccacggcaacctgacctgcgacaccatcttcatccagcacaacggcctgatcaagatcggcagcgtggcccccgacaccatcaacaaccacgtgaagacctgcagagaggagcagaagaacctgcacttcttcgcccccgagtacggcgaggtgaccaacgtgaccaccgccgtggacatctacagcttcggcatgtgcgccctggagatggccgtgctggagatccagggcaacggcgagagcagctacgtgccccaggaggccatcagcagcgccatccagctgctggaggaccccctgcagagagagttcatccagaagtgcctgcagagcgagcccgccagaagacccaccgccagagagctgctgttccaccccgccctgttcgaggtgcccagcctgaagctgctggccgcccactgcatcgtgggccaccagcacatgatccccgagaacgccctggaggagatcaccaagaacatggacaccagcgccgtgctggccgagatccccgccggccccggcagagagcccgtgcagaccctgtacagccagagccccgccctggagctggacaagttcctggaggacgtgagaaacggcatctaccccctgaccgccttcggcctgcccagaccccagcagccccagcaggaggaggtgaccagccccgtggtgccccccagcgtgaagacccccacccccgagcccgccgaggtggagaccagaaaggtggtgctgatgcagtgcaacatcgagagcgtggaggagggcgtgaagcaccacctgaccctgctgctgaagctggaggacaagctgaacagacacctgagctgcgacctgatgcccaacgagaacatccccgagctggccgccgagctggtgcagctgggcttcatcagcgaggccgaccagagcagactgaccagcctgctggaggagaccctgaacaagttcaacttcgccagaaacagcaccctgaacagcgccgccgtgaccgtgagcagctag

SEQ ID NO: 100366 - DNA, 1338 bp, synthetic construct
  misc_feature 1..1338: note = Description of Artificial Sequence: Synthetic coding sequence
  source 1..1338: mol_type = other DNA
atgcacttcagcatccccgagaccgagagcagaagcggcgacagcggcggcagcgcctacgtgctgagaaaggagtacggcgccaacgtgctgcccgccttcccccccaagaagctgttcagcctgacccccgccgaggtggagcagagaagagagcagctggagaagtacatgcaggccgtgagacaggaccccctgctgggcagcagcgagaccttcaacagcttcctgagaagagcccagcaggagacccagcaggtgcccaccgaggaggtgagcctggaggtgctgctgagcaacggccagaaggtgctggtgaacgtgctgaccagcgaccagaccgaggacgtgctggaggccgtggccgccaagctggacctgcccgacgacctgatcggctacttcagcctgttcctggtgagagagaaggaggacggcgccttcagcttcgtgagaaagctgcaggagttcgagctgccctacgtgagcgtgaccagcctgagaagccaggagtacaagatcgtgctgagaaagagctactgggacagcgcctacgacgacgacgtgatggagaacagagtgggcctgaacctgctgtacgcccagaccgtgagcgacatcgagagaggctggatcctggtgaccaaggagcagcacagacagctgaagagcctgcaggagaaggtgagcaagaaggagttcctgagactggcccagaccctgagacactacggctacctgagattcgacgcctgcgtggccgacttccccgagaaggactgccccgtggtggtgagcgccggcaacagcgagctgagcctgcagctgagactgcccggccagcagctgagagagggcagcttcagagtgaccagaatgagatgctggagagtgaccagcagcgtgcccctgcccagcggcagcaccagcagccccggcagaggcagaggcgaggtgagactggagctggccttcgagtacctgatgagcaaggacagactgcagtgggtgaccatcaccagcccccaggccatcatgatgagcatctgcctgcagagcatggtggacgagctgatggtgaagaagagcggcggcagcatcagaaagatgctgagaagaagagtgggcggcaccctgagaagaagcgacagccagcaggccgtgaagagcccccccctgctggagagccccgacgccaccagagagagcatggtgaagctgagcagcaagctgagcgccgtgagcctgagaggcatcggcagccccagcaccgacgccagcgccagcgacgtgcacggcaacttcgccttcgagggcatcggcgacgaggacctgtag

SEQ ID NO: 100367 - DNA, 771 bp, synthetic construct
  misc_feature 1..771: note = Description of Artificial Sequence: Synthetic coding sequence
  source 1..771: mol_type = other DNA
atggagaacagagtgggcctgaacctgctgtacgcccagaccgtgagcgacatcgagagaggctggatcctggtgaccaaggagcagcacagacagctgaagagcctgcaggagaaggtgagcaagaaggagttcctgagactggcccagaccctgagacactacggctacctgagattcgacgcctgcgtggccgacttccccgagaaggactgccccgtggtggtgagcgccggcaacagcgagctgagcctgcagctgagactgcccggccagcagctgagagagggcagcttcagagtgaccagaatgagatgctggagagtgaccagcagcgtgcccctgcccagcggcagcaccagcagccccggcagaggcagaggcgaggtgagactggagctggccttcgagtacctgatgagcaaggacagactgcagtgggtgaccatcaccagcccccaggccatcatgatgagcatctgcctgcagagcatggtggacgagctgatggtgaagaagagcggcggcagcatcagaaagatgctgagaagaagagtgggcggcaccctgagaagaagcgacagccagcaggccgtgaagagcccccccctgctggagagccccgacgccaccagagagagcatggtgaagctgagcagcaagctgagcgccgtgagcctgagaggcatcggcagccccagcaccgacgccagcgccagcgacgtgcacggcaacttcgccttcgagggcatcggcgacgaggacctgtag

SEQ ID NO: 100368 - DNA, 771 bp, synthetic construct; identical to SEQ ID NO: 100367
  misc_feature 1..771: note = Description of Artificial Sequence: Synthetic coding sequence
  source 1..771: mol_type = other DNA

SEQ ID NO: 100369 - DNA, 1560 bp, synthetic construct
  misc_feature 1..1560: note = Description of Artificial Sequence: Synthetic coding sequence
  source 1..1560: mol_type = other DNA
atggccgccgagagagagcccccccccctgggcgacggcaagcccaccgacttcgaggacctggaggacggcgaggacctgttcaccagcaccgtgagcaccctggagagcagccccagcagccccgagcccgccagcctgcccgccgaggacatcagcgccaacagcaacggccccaagcccaccgaggtggtgctggacgacgacagagaggacctgttcgccgaggccaccgaggaggtgagcctggacagccccgagagagagcccatcctgagcagcgagcccagccccgccgtgacccccgtgacccccaccaccctgatcgcccccagaatcgagagcaagagcatgagcgcccccgtgatcttcgacagaagcagagaggagatcgaggaggaggccaacggcgacatcttcgacatcgagatcggcgtgagcgaccccgagaaggtgggcgacggcatgaacgcctacatggcctacagagtgaccaccaagaccagcctgagcatgttcagcaagagcgagttcagcgtgaagagaagattcagcgacttcctgggcctgcacagcaagctggccagcaagtacctgcacgtgggctacatcgtgccccccgcccccgagaagagcatcgtgggcatgaccaaggtgaaggtgggcaaggaggacagcagcagcaccgagttcgtggagaagagaagagccgccctggagagatacctgcagagaaccgtgaagcaccccaccctgctgcaggaccccgacctgagacagttcctggagagcagcgagctgcccagagccgtgaacacccaggccctgagcggcgccggcatcctgagaatggtgaacaaggccgccgacgccgtgaacaagatgaccatcaagatgaacgagagcgacgcctggttcgaggagaagcagcagcagttcgagaacctggaccagcagctgagaaagctgcacgtgagcgtggaggccctggtgtgccacagaaaggagctgagcgccaacaccgccgccttcgccaagagcgccgccatgctgggcaacagcgaggaccacaccgccctgagcagagccctgagccagctggccgaggtggaggagaagatcgaccagctgcaccaggagcaggccttcgccgacttctacatgttcagcgagctgctgagcgactacatcagactgatcgccgccgtgaagggcgtgttcgaccacagaatgaagtgctggcagaagtgggaggacgcccagatcaccctgctgaagaagagagaggccgaggccaagatgatggtggccaacaagcccgacaagatccagcaggccaagaacgagatcagagagtgggaggccaaggtgcagcagggcgagagagacttcgagcagatcagcaagaccatcagaaaggaggtgggcagattcgagaaggagagagtgaaggacttcaagaccgtgatcatcaagtacctggagagcctggtgcagacccagcagcagctgatcaagtactgggaggccttcctgcccgaggccaaggccatcgcctag

SEQ ID NO: 100370 - DNA, 390 bp, synthetic construct
  misc_feature 1..390: note = Description of Artificial Sequence: Synthetic coding sequence
  source 1..390: mol_type = other DNA
atggccagccccgagcaccccggcagccccggctgcatgggccccatcacccagtgcaccgccagaacccagcaggaggcccccgccaccggccccgacctgccccaccccggccccgacggccacctggacacccacagcggcctgagcagcaacagcagcatgaccaccagagagctgcagcagtactggcagaaccagaagtgcagatggaagcacgtgaagctgctgttcgagatcgccagcgccagaatcgaggagagaaaggtgagcaagttcgtgatgggcaagagcagacccggcgagatgacctaccccggcagcagaggcgagaccggcaccgcccccgagcccgaccccagatgccccagacagagcgacatgctgtag

SEQ ID NO: 100371 - DNA, 951 bp, synthetic construct
  misc_feature 1..951: note = Description of Artificial Sequence: Synthetic coding sequence
  source 1..951: mol_type = other DNA
atggccagccccgagcaccccggcagccccggctgcatgggccccatcacccagtgcaccgccagaacccagcaggaggcccccgccaccggccccgacctgccccaccccggccccgacggccacctggacacccacagcggcctgagcagcaacagcagcatgaccaccagagagctgcagcagtactggcagaaccagaagtgcagatggaagcacgtgaagctgctgttcgagatcgccagcgccagaatcgaggagagaaaggtgagcaagttcgtggtgtaccagatcatcgtgatccagaccggcagcttcgacaacaacaaggccgtgctggagagaagatacagcgacttcgccaagctgcagaaggccctgctgaagaccttcagagaggagatcgaggacgtggagttccccagaaagcacctgaccggcaacttcgccgaggagatgatctgcgagagaagaagagccctgcaggagtacctgggcctgctgtacgccatcagatgcgtgagaagaagcagagagttcctggacttcctgaccagacccgagctgagagaggccttcggctgcctgagagccggccagtaccccagagccctggagctgctgctgagagtgctgcccctgcaggagaagctgaccgcccactgccccgccgccgccgtgcccgccctgtgcgccgtgctgctgtgccacagagacctggacagacccgccgaggccttcgccgccggcgagagagccctgcagagactgcaggccagagagggccacagatactacgcccccctgctggacgccatggtgagactggcctacgccctgggcaaggacttcgtgaccctgcaggagagactggaggagagccagctgagaagacccacccccagaggcatcaccctgaaggagctgaccgtgagagagtacctgcactag

SEQ ID NO: 100372 - DNA, 459 bp, synthetic construct
  misc_feature 1..459: note = Description of Artificial Sequence: Synthetic coding sequence
  source 1..459: mol_type = other DNA
atggccagccccgagcaccccggcagccccggctgcatgggccccatcacccagtgcaccgccagaacccagcaggaggcccccgccaccggccccgacctgccccaccccggccccgacggccacctggacacccacagcggcctgagcagcaacagcagcatgaccaccagagagctgcagcagtactggcagaaccagaagtgcagatggaagcacgtgaagctgctgttcgagatcgccagcgccagaatcgaggagagaaaggtgagcaagttcgtggtgtaccagatcatcgtgatccagaccggcagcttcgacaacaacaaggccgtgctggagagaagatacagcgacttcgtgaccctgcaggagagactggaggagagccagctgagaagacccacccccagaggcatcaccctgaaggagctgaccgtgagagagtacctgcactag

SEQ ID NO: 100373 - DNA, 309 bp, synthetic construct
  misc_feature 1..309: note = Description of Artificial Sequence: Synthetic coding sequence
  source 1..309: mol_type = other DNA
atggccagccccgagcaccccggcagccccggctgcatgggccccatcacccagtgcaccgccagaacccagcaggaggcccccgccaccggccccgacctgccccaccccggccccgacggccacctggacacccacagcggcctgagcagcaacagcagcatgaccaccagagagctgcagcagtactggcagaaccagaagtgcagatggaagcacgtgaagctgctgttcgagatcgccagcgccagaatcgaggagagaaaggtgagcaagttcgtggcccccgcccccgacgccaccccctag

SEQ ID NO: 100374 - DNA, 807 bp, synthetic construct
  misc_feature 1..807: note = Description of Artificial Sequence: Synthetic coding sequence
  source 1..807: mol_type = other DNA
atgcagcagatcagaccccccttcatcagaggccccccccaccacgccagcaaccccaacagccccctgagcaaccccatgctgcccggcatcggccccccccccggcggccccagaaacctgggccccaccagcagccccatgcacagacccatgctgagcccccacatccacccccccagcacccccaccatgcccggcaacccccccggcctgctgcccccccccccccccggcgcccccctgcccagcctgcccttcccccccgtgagcatgatgcccaacggccccatgcccgtgccccagatgatgaacttcggcctgcccagcctggcccccctggtgcccccccccaccctgctggtgccctaccccgtgatcgtgcccctgcccgtgcccatccccatccccatccccatcccccacgtgagcgacagcaagccccccaagaagctgctgagccccgaggagcccgccgtgagcgagctggagagcgtgaaggagaacaactgcgccagcaactgccacctggacggcgaggccgccaagaagctgatgggcgaggaggccctggccggcggcgacaagagcgaccccaacctgaacaaccccgccgacgaggaccacgcctacgccctgagaatgctgcccaagaccggctgcgtgatccagcccgtgcccaagcccgccgagaaggccgccatggccccctgcatcatcagcagccccatgctgagcgccggccccgaggacctggagccccccctgaagagaagatgcctgagaatcagaaaccagaacaagtag

SEQ ID NO: 100375 - DNA, 423 bp, synthetic construct
  misc_feature 1..423: note = Description of Artificial Sequence: Synthetic coding sequence
  source 1..423: mol_type = other DNA
atggccgagaccgtggccgacaccagaagactgatcaccaagccccagaacctgaacgacgcctacggcccccccagcaacttcctggagatcgacaccaacctgcccatcttcaagctgaaggagagcaccgtgagaagaagatacagcgacttcgagtggctgagaagcgagctggagagagagagcaaggtggtggtgccccccctgcccggcaaggccttcctgagacagctgcccttcagaggcgacgacggcatcttcgacgacaacttcatcgaggagagaaagcagggcctggagcagttcatcaacaaggtggccggccaccccctggcccagaacgagagatgcctgcacatgttcctgcaggacgagatcatcgacaagagctacacccccagcaagatcagacacgcctag

SEQ ID NO: 100376 - DNA, 342 bp, synthetic construct
  misc_feature 1..342: note = Description of Artificial Sequence: Synthetic coding sequence
  source 1..342: mol_type = other DNA
atggccgagaccgtggccgacaccagaagactgatcaccaagccccagaacctgaacgacgcctacggcccccccagcaacttcctggagatcgacgtgagcaacccccagaccgtgggcgtgggcagaggcagattcaccacctacgagatcagagtgaagaccaacctgcccatcttcaagctgaaggagagcaccgtgagaagaagatacagcgacttcgagtggctgagaagcgagctggagagagagagcaagccctgcctgagaatgaccagcgaggccagaagccacggcagaacctggtgcgcccagaacgacgagaagctgttctgcgactag

SEQ ID NO: 100377 - DNA, 393 bp, synthetic construct
  misc_feature 1..393: note = Description of Artificial Sequence: Synthetic coding sequence
  source 1..393: mol_type = other DNA
atggccgagaccgtggccgacaccagaagactgatcaccaagccccagaacctgaacgacgcctacggcccccccagcaacttcctggagatcgacgtgagcaacccccagaccgtgggcgtgggcagaggcagattcaccacctacgagatcagagtgaaggtggtggtgccccccctgcccggcaaggccttcctgagacagctgcccttcagaggcgacgacggcatcttcgacgacaacttcatcgaggagagaaagcagggcctggagcagttcatcaacaaggtggccggccaccccctggcccagaacgagagatgcctgcacatgttcctgcaggacgagatcatcgacaagagctacacccccagcaagatcagacacgcctag

SEQ ID NO: 100378 - DNA, 1353 bp, synthetic construct
  misc_feature 1..1353: note = Description of Artificial Sequence: Synthetic coding sequence
  source 1..1353: mol_type = other DNA
atggagcaggccccccccgaccccgagagacagctgcagcccgcccccctggagcccctgggcagccccgacgccggcctgggcgccgccgtgggcaaggaggccgagggcgccggcgaggagagcagcggcgtggacaccatgacccacaacaacttctggctgaagaagatcgagatcagcgtgagcgaggccgagaagagaaccggcagaaacgccatgaacatgcaggagacctacaccgcctacctgatcgagaccagaagcgtggagcacaccgacggccagagcgtgctgaccgacagcctgtggagaagatacagcgagttcgagctgctgagaagctacctgctggtgtactacccccacatcgtggtgccccccctgcccgagaagagagccgagttcgtgtggcacaagctgagcgccgacaacatggaccccgacttcgtggagagaagaagaatcggcctggagaacttcctgctgagaatcgccagccaccccatcctgtgcagagacaagatcttctacctgttcctgacccaggagggcaactggaaggagaccgtgaacgagaccggcttccagctgaaggccgacagcagactgaaggccctgaacgccaccttcagagtgaagaaccccgacaagagattcaccgacctgaagcactacagcgacgagctgcagagcgtgatcagccacctgctgagagtgagagccagagtggccgacagactgtacggcgtgtacaaggtgcacggcaactacggcagagtgttcagcgagtggagcgccatcgagaaggagatgggcgacggcctgcagagcgccggccaccacatggacgtgtacgccagcagcatcgacgacatcctggaggacgaggagcactacgccgaccagctgaaggagtacctgttctacgccgaggccctgagagccgtgtgcagaaagcacgagctgatgcagtacgacctggagatggccgcccaggacctggccagcaagaagcagcagtgcgaggagctggtgaccggcaccgtgagaaccttcagcctgaagggcatgaccaccaagctgttcggccaggagacccccgagcagagagaggccagaatcaaggtgctggaggagcagatcaacgagggcgagcagcagctgaagagcaagaacctggagggcagagagttcgtgaagaacgcctgggccgacatcgagagattcaaggagcagaagaacagagacctgaaggaggccctgatcagctacgccgtgatgcagatcagcatgtgcaagaagggcatccaggtgtggaccaacgccaaggagtgcttcagcaagatgtag

SEQ ID NO: 100379 - DNA, 918 bp, synthetic construct
  misc_feature 1..918: note = Description of Artificial Sequence: Synthetic coding sequence
  source 1..918: mol_type = other DNA
atggaccccgacttcgtggagagaagaagaatcggcctggagaacttcctgctgagaatcgccagccaccccatcctgtgcagagacaagatcttctacctgttcctgacccaggagggcaactggaaggagaccgtgaacgagaccggcttccagctgaaggccgacagcagactgaaggccctgaacgccaccttcagagtgaagaaccccgacaagagattcaccgacctgaagcactacagcgacgagctgcagagcgtgatcagccacctgctgagagtgagagccagagtggccgacagactgtacggcgtgtacaaggtgcacggcaactacggcagagtgttcagcgagtggagcgccatcgagaaggagatgggcgacggcctgcagagcgccggccaccacatggacgtgtacgccagcagcatcgacgacatcctggaggacgaggagcactacgccgaccagctgaaggagtacctgttctacgccgaggccctgagagccgtgtgcagaaagcacgagctgatgcagtacgacctggagatggccgcccaggacctggccagcaagaagcagcagtgcgaggagctggtgaccggcaccgtgagaaccttcagcctgaagggcatgaccaccaagctgttcggccaggagacccccgagcagagagaggccagaatcaaggtgctggaggagcagatcaacgagggcgagcagcagctgaagagcaagaacctggagggcagagagttcgtgaagaacgcctgggccgacatcgagagattcaaggagcagaagaacagagacctgaaggaggccctgatcagctacgccgtgatgcagatcagcatgtgcaagaagggcatccaggtgtggaccaacgccaaggagtgcttcagcaagatgtag

SEQ ID NO: 100380 - DNA, 1215 bp, synthetic construct
  misc_feature 1..1215: note = Description of Artificial Sequence: Synthetic coding sequence
  source 1..1215: mol_type = other DNA
atggccgccgtgcccgagctgctgcagcagcaggaggaggacagaagcaagctgagaagcgtgagcgtggacctgaacgtggaccccagcctgcagatcgacatccccgacgccctgagcgagagagacaaggtgaagttcaccgtgcacaccaagaccaccctgcccaccttccagagccccgagttcagcgtgaccagacagcacgaggacttcgtgtggctgcacgacaccctgatcgagaccaccgactacgccggcctgatcatcccccccgcccccaccaagcccgacttcgacggccccagagagaagatgcagaagctgggcgagggcgagggcagcatgaccaaggaggagttcgccaagatgaagcaggagctggaggccgagtacctggccgtgttcaagaagaccgtgagcagccacgaggtgttcctgcagagactgagcagccaccccgtgctgagcaaggacagaaacttccacgtgttcctggagtacgaccaggacctgagcgtgagaagaaagaacaccaaggagatgttcggcggcttcttcaagagcgtggtgaagagcgccgacgaggtgctgttcaccggcgtgaaggaggtggacgacttcttcgagcaggagaagaacttcctgatcaactactacaacagaatcaaggacagctgcgtgaaggccgacaagatgaccagaagccacaagaacgtggccgacgactacatccacaccgccgcctgcctgcacagcctggccctggaggagcccaccgtgatcaagaagtacctgctgaaggtggccgagctgttcgagaagctgagaaaggtggagggcagagtgagcagcgacgaggacctgaagctgaccgagctgctgagatactacatgctgaacatcgaggccgccaaggacctgctgtacagaagaaccaaggccctgatcgactacgagaacagcaacaaggccctggacaaggccagactgaagagcaaggacgtgaagctggccgaggcccaccagcaggagtgctgccagaagttcgagcagctgagcgagagcgccaaggaggagctgatcaacttcaagagaaagagagtggccgccttcagaaagaacctgatcgagatgagcgagctggagatcaagcacgccagaaacaacgtgagcctgctgcagagctgcatcgacctgttcaagaacaactag

SEQ ID NO: 100381 - DNA, 1215 bp, synthetic construct; identical to SEQ ID NO: 100380
  misc_feature 1..1215: note = Description of Artificial Sequence: Synthetic coding sequence
  source 1..1215: mol_type = other DNA

SEQ ID NO: 100382 - DNA, 687 bp, synthetic construct
  misc_feature 1..687: note = Description of Artificial Sequence: Synthetic coding sequence
  source 1..687: mol_type = other DNA
atggccgccgtgcccgagctgctgcagcagcaggaggaggacagaagcaagaccaccctgcccaccttccagagccccgagttcagcgtgaccagacagcacgaggacttcgtgtggctgcacgacaccctgatcgagaccaccgactacgccggcctgatcatcccccccgcccccaccaagcccgacttcgacggccccagagagaagatgcagaagctgggcgagggcgagggcagcatgaccaaggaggagttcgccaagatgaagcaggagctggaggccgagtacctggccgtgttcaagaagaccgtgagcagccacgaggtgttcctgcagagactgagcagccaccccgtgctgagcaaggacagaaacttccacgtgttcctggagtacgaccaggacctgagcgtgagaagaaagaacaccaaggagatgttcggcggcttcttcaagagcgtggtgaagagcgccgacgaggtgctgttcaccggcgtgaaggaggtggacgacttcttcgagcaggagaagaacttcctgatcaactactacaacagaatcaaggacagctgcgtgaaggccgacaagatgaccagaagccacaagaacgtggccgacgactacatccacaccgccgcctgcctgcacagcctggccctggaggagcccaccgtgatcaagtag

SEQ ID NO: 100383 - DNA, 810 bp, synthetic construct
  misc_feature 1..810: note = Description of Artificial Sequence: Synthetic coding sequence
  source 1..810: mol_type = other DNA
atggccgccgtgcccgagctgctgcagcagcaggaggaggacagaagcaagctgagaagcgtgagcgtggacctgaacgtggaccccagcctgcagatcgacatccccgacgccctgagcgagagagacaaggtgaagttcaccgtgcacaccaagatcccccccgcccccaccaagcccgacttcgacggccccagagagaagatgcagaagctgggcgagggcgagggcagcatgaccaaggaggagttcgccaagatgaagcaggagctggaggccgagtacctggccgtgttcaagaagaccgtgagcagccacgaggtgttcctgcagagactgagcagccaccccgtgctgagcaaggacagaaacttccacgtgttcctggagtacgaccaggacctgagcgtgagaagaaagaacaccaaggagatgttcggcggcttcttcaagagcgtggtgaagagcgccgacgaggtgctgttcaccggcgtgaaggaggtggacgacttcttcgagcaggagaagaacttcctgatcaactactacaacagaatcaaggacagctgcgtgaaggccgacaagatgaccagaagccacaagaacgtggccgacgactacatccacaccgccgcctgcctgcacagcctggccctggaggagcccaccgtgatcaagaagtacctgctgaaggtggccgagctgttcgagaagctgagaaaggtggagggcagagtgagcagcgacgaggacctgaagctgaccgagctgctgagatactacatgctgaacatcgaggccgccaagtag

SEQ ID NO: 100384 - DNA, 885 bp, synthetic construct
  misc_feature 1..885: note = Description of Artificial Sequence: Synthetic coding sequence
  source 1..885: mol_type = other DNA
atgaccaccctgaccgagatcaagctgctgcccagcctggtgctgctggtgtgctgcgagtacctggccatcttcaagaagaccgtggccatgcacgaggtgttcctgtgcagagtggccgcccaccccatcctgagaagagacctgaacttccacgtgttcctggagtacaaccaggacctgagcgtgagaggcaagaacaagaaggagaagctggaggacttcttcaagaacatggtgaagagcgccgacggcgtgatcgtgagcggcgtgaaggacgtggacgacttcttcgagcacgagagaaccttcctgctggagtaccacaacagagtgaaggacgccagcgccaagagcgacagaatgaccagaagccacaagagcgccgccgacgactacaacagaatcggcagcagcctgtacgccctgggcacccaggacagcaccgacatctgcaagttcttcctgaaggtgagcgagctgttcgacaagaccagaaagatcgaggccagagtgagcgccgacgaggacctgaagctgagcgacctgctgaagtactacctgagagagagccaggccgccaaggacctgctgtacagaagaagcagaagcctggtggactacgagaacgccaacaaggccctggacaaggccagagccaagaacaaggacgtgctgcaggccgagaccagccagcagctgtgctgccagaagttcgagaagatcagcgagagcgccaagcaggagctgatcgacttcaagaccagaagagtggccgccttcagaaagaacctggtggagctggccgagctggagctgaagcacgccaagggcaacctgcagctgctgcagaactgcctggccgtgctgaacggcgacacctag

SEQ ID NO: 100385 - DNA, 1257 bp, synthetic construct
  misc_feature 1..1257: note = Description of Artificial Sequence: Synthetic coding sequence
  source 1..1257: mol_type = other DNA
atgagagcctgcgccggccccagactgggcgccgccatgatggagggcctggacgacggccccgacttcctgagcgaggaggacagaggcctgaaggccatcaacgtggacctgcagagcgacgccgccctgcaggtggacatcagcgacgccctgagcgagagagacaaggtgaagttcaccgtgcacaccaagagcagcctgcccaacttcaagcagaacgagttcagcgtggtgagacagcacgaggagttcatctggctgcacgacagcttcgtggagaacgaggactacgccggctacatcatcccccccgccccccccagacccgacttcgacgccagcagagagaagctgcagaagctgggcgagggcgagggcagcatgaccaaggaggagttcaccaagatgaagcaggagctggaggccgagtacctggccatcttcaagaagaccgtggccatgcacgaggtgttcctgtgcagagtggccgcccaccccatcctgagaagagacctgaacttccacgtgttcctggagtacaaccaggacctgagcgtgagaggcaagaacaagaaggagaagctggaggacttcttcaagaacatggtgaagagcgccgacggcgtgatcgtgagcggcgtgaaggacgtggacgacttcttcgagcacgagagaaccttcctgctggagtaccacaacagagtgaaggacgccagcgccaagagcgacagaatgaccagaagccacaagagcgccgccgacgactacaacagaatcggcagcagcctgtacgccctgggcacccaggacagcaccgacatctgcaagttcttcctgaaggtgagcgagctgttcgacaagaccagaaagatcgaggccagagtgagcgccgacgaggacctgaagctgagcgacctgctgaagtactacctgagagagagccaggccgccaaggacctgctgtacagaagaagcagaagcctggtggactacgagaacgccaacaaggccctggacaaggccagagccaagaacaaggacgtgctgcaggccgagaccagccagcagctgtgctgccagaagttcgagaagatcagcgagagcgccaagcaggagctgatcgacttcaagaccagaagagtggccgccttcagaaagaacctggtggagctggccgagctggagctgaagcacgccaagggcaacctgcagctgctgcagaactgcctggccgtgctgaacggcgacacctag

SEQ ID NO: 100386 - DNA, 873 bp, synthetic construct
  misc_feature 1..873: note = Description of Artificial Sequence: Synthetic coding sequence
  source 1..873: mol_type = other DNA
atgaccaaggaggagttcaccaagatgaagcaggagctggaggccgagtacctggccatcttcaagaagaccgtggccatgcacgaggtgttcctgtgcagagtggccgcccaccccatcctgagaagagacctgaacttccacgtgttcctggagtacaaccaggacctgagcgtgagaggcaagaacaagaaggagaagctggaggacttcttcaagaacatggtgaagagcgccgacggcgtgatcgtgagcggcgtgaaggacgtggacgacttcttcgagcacgagagaaccttcctgctggagtaccacaacagagtgaaggacgccagcgccaagagcgacagaatgaccagaagccacaagagcgccgccgacgactacaacagaatcggcagcagcctgtacgccctgggcacccaggacagcaccgacatctgcaagttcttcctgaaggtgagcgagctgttcgacaagaccagaaagatcgaggccagagtgagcgccgacgaggacctgaagctgagcgacctgctgaagtactacctgagagagagccaggccgccaaggacctgctgtacagaagaagcagaagcctggtggactacgagaacgccaacaaggccctggacaaggccagagccaagaacaaggacgtgctgcaggccgagaccagccagcagctgtgctgccagaagttcgagaagatcagcgagagcgccaagcaggagctgatcgacttcaagaccagaagagtggccgccttcagaaagaacctggtggagctggccgagctggagctgaagcacgccaagggcaacctgcagctgctgcagaactgcctggccgtgctgaacggcgacacctag

SEQ ID NO: 100387 - DNA, 873 bp, synthetic construct; identical to SEQ ID NO: 100386
  misc_feature 1..873: note = Description of Artificial Sequence: Synthetic coding sequence
  source 1..873: mol_type = other DNA

SEQ ID NO: 100388 - DNA, 1188 bp, synthetic construct
  misc_feature 1..1188: note = Description of Artificial Sequence: Synthetic coding sequence
  source 1..1188: mol_type = other DNA
atgaagatccccctgaacaagttccccggcttcgccaagcccggcaccgagcagtacctgctggccaagcagctggccaagcccaaggagaagatccccatcatcgtgggcgactacggccccatgtgggtgtaccccaccagcaccttcgactgcgtggtggccgaccccagaaagggcagcaagatgtacggcctgaagagctacatcgagtaccagctgacccccaccaacaccaacagaagcgtgaaccacagatacaagcacttcgactggctgtacgagagactgctggtgaagttcggcagcgccatccccatccccagcctgcccgacaagcaggtgaccggcagattcgaggaggagttcatcaagatgagaatggagagactgcaggcctggatgaccagaatgtgcagacaccccgtgatcagcgagagcgaggtgttccagcagttcctgaacttcagagacgagaaggagtggaagaccggcaagagaaaggccgagagagacgagctggccggcgtgatgatcttcagcaccatggagcccgaggcccccgacctggacctggtggagatcgagcagaagtgcgaggccgtgggcaagttcaccaaggccatggacgacggcgtgaaggagctgctgaccgtgggccaggagcactggaagagatgcaccggccccctgcccaaggagtaccagaagatcggcaaggccctgcagagcctggccaccgtgttcagcagcagcggctaccagggcgagaccgacctgaacgacgccatcaccgaggccggcaagacctacgaggagatcgccagcctggtggccgagcagcccaagaaggacctgcacttcctgatggagtgcaaccacgagtacaagggcttcctgggctgcttccccgacatcatcggcacccacaagggcgccatcgagaaggtgaaggagagcgacaagctggtggccaccagcaagatcaccctgcaggacaagcagaacatggtgaagagagtgagcatcatgagctacgccctgcaggccgagatgaaccacttccacagcaacagaatctacgactacaacagcgtgatcagactgtacctggagcagcaggtgcagttctacgagaccatcgccgagaagctgagacaggccctgagcagattccccgtgatgtag

SEQ ID NO: 100389 - DNA, 1788 bp, synthetic construct
  misc_feature 1..1788: note = Description of Artificial Sequence: Synthetic coding sequence
  source 1..1788: mol_type = other DNA
atggccaccaaggccagagtgatgtacgacttcgccgccgagcccggcaacaacgagctgaccgtgaacgagggcgagatcatcaccatcaccaaccccgacgtgggcggcggctggctggagggcagaaacatcaagggcgagagaggcctggtgcccaccgactacgtggagatcctgcccagcgacggcaaggaccagttcagctgcggcaacagcgtggccgaccaggccttcctggacagcctgagcgccagcaccgcccaggccagcagcagcgccgccagcaacaaccaccaggtgggcagcggcaacgacccctggagcgcctggagcgccagcaagagcggcaactgggagagcagcgagggctggggcgcccagcccgagggcgccggcgcccagagaaacaccaacacccccaacaactgggacaccgccttcggccacccccaggcctaccagggccccgccaccggcgacgacgacgactgggacgaggactgggacggccccaagagcagcagctacttcaaggacagcgagagcgccgacgccggcggcgcccagagaggcaacagcagagccagcagcagcagcatgaagatccccctgaacaagttccccggcttcgccaagcccggcaccgagcagtacctgctggccaagcagctggccaagcccaaggagaagatccccatcatcgtgggcgactacggccccatgtgggtgtaccccaccagcaccttcgactgcgtggtggccgaccccagaaagggcagcaagatgtacggcctgaagagctacatcgagtaccagctgacccccaccaacaccaacagaagcgtgaaccacagatacaagcacttcgactggctgtacgagagactgctggtgaagttcggcagcgccatccccatccccagcctgcccgacaagcaggtgaccggcagattcgaggaggagttcatcaagatgagaatggagagactgcaggcctggatgaccagaatgtgcagacaccccgtgatcagcgagagcgaggtgttccagcagttcctgaacttcagagacgagaaggagtggaagaccggcaagagaaaggccgagagagacgagctggccggcgtgatgatcttcagcaccatggagcccgaggcccccgacctggacctggtggagatcgagcagaagtgcgaggccgtgggcaagttcaccaaggccatggacgacggcgtgaaggagctgctgaccgtgggccaggagcactggaagagatgcaccggccccctgcccaaggagtaccagaagatcggcaaggccctgcagagcctggccaccgtgttcagcagcagcggctaccagggcgagaccgacctgaacgacgccatcaccgaggccggcaagacctacgaggagatcgccagcctggtggccgagcagcccaagaaggacctgcacttcctgatggagtgcaaccacgagtacaagggcttcctgggctgcttccccgacatcatcggcacccacaagggcgccatcgagaaggtgaaggagagcgacaagctggtggccaccagcaagatcaccctgcaggacaagcagaacatggtgaagagagtgagcatcatgagctacgccctgcaggccgagatgaaccacttccacagcaacagaatctacgactacaacagcgtgatcagactgtacctggagcagcaggtgcagttctacgagaccatcgccgagaagctgagacaggccctgagcagattccccgtgatgtag

SEQ ID NO: 100390 - DNA, 1788 bp, synthetic construct; identical to SEQ ID NO: 100389
  misc_feature 1..1788: note = Description of Artificial Sequence: Synthetic coding sequence
  source 1..1788: mol_type = other DNA

SEQ ID NO: 100391 - DNA, 1308 bp, synthetic construct
  misc_feature 1..1308: note = Description of Artificial Sequence: Synthetic coding sequence
  source 1..1308: mol_type = other DNA
atgggcctgagcttcagcctgttccccctgagaaaccacgtgaacgtggagggcgccacccacaagcaggtggtggacctgatcagagccggcgagaaggagctgatcctgaccgtgctgagcgtgcccccccacgaggccgacaacctggaccccagcgacgacagcctgggccagagcttctacgactacaccgagaagcaggccgtgcccatcagcgtgcccagatacaagcacgtggagcagaacggcgagaagttcgtggtgtacaacgtgtacatggccggcagacagctgtgcagcaagagatacagagagttcgccatcctgcaccagaacctgaagagagagttcgccaacttcaccttccccagactgcccggcaagtggcccttcagcctgagcgagcagcagctggacgccagaagaagaggcctggaggagtacctggagaaggtgtgcagcatcagagtgatcggcgagagcgacatcatgcaggagttcctgagcgagagcgacgagaactacaacggcgtgagcgacgtggagctgagagtggccctgcccgacggcaccaccgtgaccgtgagagtgaagaagaacagcaccaccgaccaggtgtaccaggccatcgccgccaaggtgggcatggacagcaccaccgtgaactacttcgccctgttcgaggtgatcagccacagcttcgtgagaaagctggcccccaacgagttcccccacaagctgtacatccagaactacaccagcgccgtgcccggcacctgcctgaccatcagaaagtggctgttcaccaccgaggaggagatcctgctgaacgacaacgacctggccgtgacctacttcttccaccaggccgtggacgacgtgaagaagggctacatcaaggccgaggagaagagctaccagctgcagaagctgtacgagcagagaaagatggtgatgtacctgaacatgctgagaacctgcgagggctacaacgagatcatcttcccccactgcgcctgcgacagcagaagaaagggccacgtgatcaccgccatcagcatcacccacttcaagctgcacgcctgcaccgaggagggccagctggagaaccaggtgatcgccttcgagtgggacgagatgcagagatgggacaccgacgaggagggcatggccttctgcttcgagtacgccagaggcgagaagaagcccagatgggtgaagatcttcaccccctacttcaactacatgcacgagtgcttcgagagagtgttctgcgagctgaagtggagaaaggaggagtactag

SEQ ID NO: 100392 - DNA, 1587 bp, synthetic construct
  misc_feature 1..1587: note = Description of Artificial Sequence: Synthetic coding sequence
  source 1..1587: mol_type = other DNA
atggccgacgaggacggcgagggcatccaccccagcgccccccacagaaacggcggcggcggcggcggcggcggcagcggcctgcactgcgccggcaacggcggcggcggcggcggcggccccagagtggtgagaatcgtgaagagcgagagcggctacggcttcaacgtgagaggccaggtgagcgagggcggccagctgagaagcatcaacggcgagctgtacgcccccctgcagcacgtgagcgccgtgctgcccggcggcgccgccgacagagccggcgtgagaaagggcgacagaatcctggaggtgaaccacgtgaacgtggagggcgccacccacaagcaggtggtggacctgatcagagccggcgagaaggagctgatcctgaccgtgctgagcgtgcccccccacgaggccgacaacctggaccccagcgacgacagcctgggccagagcttctacgactacaccgagaagcaggccgtgcccatcagcgtgcccagatacaagcacgtggagcagaacggcgagaagttcgtggtgtacaacgtgtacatggccggcagacagctgtgcagcaagagatacagagagttcgccatcctgcaccagaacctgaagagagagttcgccaacttcaccttccccagactgcccggcaagtggcccttcagcctgagcgagcagcagctggacgccagaagaagaggcctggaggagtacctggagaaggtgtgcagcatcagagtgatcggcgagagcgacatcatgcaggagttcctgagcgagagcgacgagaactacaacggcgtgagcgacgtggagctgagagtggccctgcccgacggcaccaccgtgaccgtgagagtgaagaagaacagcaccaccgaccaggtgtaccaggccatcgccgccaaggtgggcatggacagcaccaccgtgaactacttcgccctgttcgaggtgatcagccacagcttcgtgagaaagctggcccccaacgagttcccccacaagctgtacatccagaactacaccagcgccgtgcccggcacctgcctgaccatcagaaagtggctgttcaccaccgaggaggagatcctgctgaacgacaacgacctggccgtgacctacttcttccaccaggccgtggacgacgtgaagaagggctacatcaaggccgaggagaagagctaccagctgcagaagctgtacgagcagagaaagatggtgatgtacctgaacatgctgagaacctgcgagggctacaacgagatcatcttcccccactgcgcctgcgacagcagaagaaagggccacgtgatcaccgccatcagcatcacccacttcaagctgcacgcctgcaccgaggagggccagctggagaaccaggtgatcgccttcgagtgggacgagatgcagagatgggacaccgacgaggagggcatggccttctgcttcgagtacgccagaggcgagaagaagcccagatgggtgaagatcttcaccccctacttcaactacatgcacgagtgcttcgagagagtgttctgcgagctgaagtggagaaaggaggagtactag

SEQ ID NO: 100393 - DNA, 1626 bp, synthetic construct
  misc_feature 1..1626: note = Description of Artificial Sequence: Synthetic coding sequence
  source 1..1626: mol_type = other DNA
atggccgacgaggacggcgagggcatccaccccagcgccccccacagaaacggcggcggcggcggcggcggcggcagcggcctgcactgcgccggcaacggcggcggcggcggcggcggccccagagtggtgagaatcgtgaagagcgagagcggctacggcttcaacgtgagaggccaggtgagcgagggcggccagctgagaagcatcaacggcgagctgtacgcccccctgcagcacgtgagcgccgtgctgcccggcggcgccgccgacagagccggcgtgagaaagggcgacagaatcctggaggtgaaccacgtgaacgtggagggcgccacccacaagcaggtggtggacctgatcagagccggcgagaaggagctgatcctgaccgtgctgagcgtgcccccccacgaggccgacaacctggaccccagcgacgacagcctgggccagagcttctacgactacaccgagaagcaggccgtgcccatcagcgtgcccagatacaagcacgtggagcagaacggcgagaagttcgtggtgtacaacgtgtacatggccggcagacagctgtgcagcaagagatacagagagttcgccatcctgcaccagaacctgaagagagagttcgccaacttcaccttccccagactgcccggcaagtggcccttcagcctgagcgagcagcagctggacgccagaagaagaggcctggaggagtacctggagaaggtgtgcagcatcagagtgatcggcgagagcgacatcatgcaggagttcctgagcgagagcgacgagaactacaacggcgtgagcgacgtggagctgagagtggccctgcccgacggcaccaccgtgaccgtgagagtgaagaagaacagcaccaccgaccaggtgtaccaggccatcgccgccaaggtgggcatggacagcaccaccgtgaactacttcgccctgttcgaggtgatcagccacagcttcgtgagaaagctggcccccaacgagttcccccacaagctgtacatccagaactacaccagcgccgtgcccggcacctgcctgaccatcagaaagtggctgttcaccaccgaggaggagatcctgctgaacgacaacgacctggccgtgacctacttcttccaccaggccgtggacgacgtgaagaagggctacatcaaggccgaggagaagagctaccagctgcagaagctgtacgagcagagaaagatggtgatgtacctgaacatgctgagaacctgcgagggctacaacgagatcatcttcccccactgcgcctgcgacagcagaagaaagggccacgtgatcaccgccatcagcatcacccacttcaagctgcacgcctgcaccgaggagggccagctggagaaccaggtgatcgccttcgagtgggacgagatgcagagatgggacaccgacgaggagggcatggccttctgcttcgagtacgccagaggcgagaagaagcccagatgggtgaagatcttcaccccctacttcaactacatgcacgagtgcttcgagagagtgttctgcgagctgaagtggagaaaggagaacatcttccagatggccagaagccagcagagagacgtggccacctag

SEQ ID NO: 100394 - DNA, 2640 bp, synthetic construct
  misc_feature 1..2640: note = Description of Artificial Sequence: Synthetic coding sequence
  source 1..2640: mol_type = other DNA
atggccggcggcggcggcgacctgagcaccagaagactgaacgagtgcatcagccccgtggccaacgagatgaaccacctgcccgcccacagccacgacctgcagagaatgttcaccgaggaccagggcgtggacgacagactgctgtacgacatcgtgttcaagcacttcaagagaaacaaggtggagatcagcaacgccatcaagaagaccttccccttcctggagggcctgagagacagagacctgatcaccaacaagatgttcgaggacagccaggacagctgcagaaacctggtgcccgtgcagagagtggtgtacaacgtgctgagcgagctggagaagaccttcaacctgcccgtgctggaggccctgttcagcgacgtgaacatgcaggagtaccccgacctgatccacatctacaagggcttcgagaacgtgatccacgacaagctgcccctgcaggagagcgaggaggaggagagagaggagagaagcggcctgcagctgagcctggagcagggcaccggcgagaacagcttcagaagcctgacctggccccccagcggcagccccagccacgccggcaccaccccccccgagaacggcctgagcgagcacccctgcgagaccgagcagatcaacgccaagagaaaggacaccaccagcgacaaggacgacagcctgggcagccagcagaccaacgagcagtgcgcccagaaggccgagcccaccgagagctgcgagcagatcgccgtgcaggtgaacaacggcgacgccggcagagagatgccctgccccctgccctgcgacgaggagagccccgaggccgagctgcacaaccacggcatccagatcaacagctgcagcgtgagactggtggacatcaagaaggagaagcccttcagcaacagcaaggtggagtgccaggcccaggccagaacccaccacaaccaggccagcgacatcatcgtgatcagcagcgaggacagcgagggcagcaccgacgtggacgagcccctggaggtgttcatcagcgcccccagaagcgagcccgtgatcaacaacgacaaccccctggagagcaacgacgagaaggagggccaggaggccacctgcagcagaccccagatcgtgcccgagcccatggacttcagaaagctgagcaccttcagagagagcttcaagaagagagtgatcggccaggaccacgacttcagcgagagcagcgaggaggaggcccccgccgaggccagcagcggcgccctgagaagcaagcacggcgagaaggcccccatgaccagcagaagcaccagcacctggagaatccccagcagaaagagaagattcagcagcagcgacttcagcgacctgagcaacggcgaggagctgcaggagacctgcagcagcagcctgagaagaggcagcggcagccagccccaggagcccgagaacaagaagtgcagctgcgtgatgtgcttccccaagggcgtgcccagaagccaggaggccagaaccgagagcagccaggccagcgacatgatggacaccatggacgtggagaacaacagcaccctggagaagcacagcggcaagagaagaaagaagagaagacacagaagcaaggtgaacggcctgcagagaggcagaaagaaggacagacccagaaagcacctgaccctgaacaacaaggtgcagaagaagagatggcagcagagaggcagaaaggccaacaccagacccctgaagagaagaagaaagagaggccccagaatccccaaggacgagaacatcaacttcaagcagagcgagctgcccgtgacctgcggcgaggtgaagggcaccctgtacaaggagagattcaagcagggcaccagcaagaagtgcatccagagcgaggacaagaagtggttcacccccagagagttcgagatcgagggcgacagaggcgccagcaagaactggaagctgagcatcagatgcggcggctacaccctgaaggtgctgatggagaacaagttcctgcccgagccccccagcaccagaaagaagagaatcctggagagccacaacaacaccctggtggacccctgcgaggagcacaagaagaagaaccccgacgccagcgtgaagttcagcgagttcctgaagaagtgcagcgagacctggaagaccatcttcgccaaggagaagggcaagttcgaggacatggccaaggccgacaaggcccactacgagagagagatgaagacctacatcccccccaagggcgagaagaagaagaagttcaaggaccccaacgcccccaagagaccccccctggccttcttcctgttctgcagcgagtacagacccaagatcaagggcgagcaccccggcctgagcatcgacgacgtggtgaagaagctggccggcatgtggaacaacaccgccgccgccgacaagcagttctacgagaagaaggccgccaagctgaaggagaagtacaagaaggacatcgccgcctacagagccaagggcaagcccaacagcgccaagaagagagtggtgaaggccgagaagagcaagaagaagaaggaggaggaggaggacgaggaggacgagcaggaggaggagaacgaggaggacgacgacaagtag

SEQ ID NO: 100395 - DNA, 2658 bp, synthetic construct
  misc_feature 1..2658: note = Description of Artificial Sequence: Synthetic coding sequence
  source 1..2658: mol_type = other DNA
atggccggcggcggcggcgacctgagcaccagaagactgaacgagtgcatcagccccgtggccaacgagatgaaccacctgcccgcccacagccacgacctgcagagaatgttcaccgaggaccagggcgtggacgacagactgctgtacgacatcgtgttcaagcacttcaagagaaacaaggtggagatcagcaacgccatcaagaagaccttccccttcctggagggcctgagagacagagacctgatcaccaacaagatgttcgaggacagccaggacagctgcagaaacctggtgcccgtgcagagagtggtgtacaacgtgctgagcgagctggagaagaccttcaacctgcccgtgctggaggccctgttcagcgacgtgaacatgcaggagtaccccgacctgatccacatctacaagggcttcgagaacgtgatccacgacaagctgcccctgcaggagagcgaggaggaggagagagaggagagaagcggcctgcagctgagcctggagcagggcaccggcgagaacagcttcagaagcctgacctggccccccagcggcagccccagccacgccggcaccaccccccccgagaacggcctgagcgagcacccctgcgagaccgagcagatcaacgccaagagaaaggacaccaccagcgacaaggacgacagcctgggcagccagcagaccaacgagcagtgcgcccagaaggccgagcccaccgagagctgcgagcagatcgccgtgcaggtgaacaacggcgacgccggcagagagatgccctgccccctgccctgcgacgaggagagccccgaggccgagctgcacaaccacggcatccagatcaacagctgcagcgtgagactggtggacatcaagaaggagaagcccttcagcaacagcaaggtggagtgccaggcccaggccagaacccaccacaaccaggccagcgacatcatcgtgatcagcagcgaggacagcgagggcagcaccgacgtggacgagcccctggaggtgttcatcagcgcccccagaagcgagcccgtgatcaacaacgacaaccccctggagagcaacgacgagaaggagggccaggaggccacctgcagcagaccccagatcgtgcccgagcccatggacttcagaaagctgagcaccttcagagagagcttcaagaagagagtgatcggccaggaccacgacttcagcgagagcagcgaggaggaggcccccgccgaggccagcagcggcgccctgagaagcaagcacggcgagaaggcccccatgaccagcagaagcaccagcacctggagaatccccagcagaaagagaagattcagcagcagcgacttcagcgacctgagcaacggcgaggagctgcaggagacctgcagcagcagcctgagaagaggcagcggcagccagccccaggagcccgagaacaagaagtgcagctgcgtgatgtgcttccccaagggcgtgcccagaagccaggaggccagaaccgagagcagccaggccagcgacatgatggacaccatggacgtggagaacaacagcaccctggagaagcacagcggcaagagaagaaagaagagaagacacagaagcaaggtgaacggcctgcagagaggcagaaagaaggacagacccagaaagcacctgaccctgaacaacaaggtgcagaagaagagatggcagcagagaggcagaaaggccaacaccagacccctgaagagaagaagaaagagaggccccagaatccccaaggacgagaacatcaacttcaagcagagcgagctgcccgtgacctgcggcgaggtgaagggcaccctgtacaaggagagattcaagcagggcaccagcaagaagtgcatccagagcgaggacaagaagtggttcacccccagagagttcgagatcgagggcgacagaggcgccagcaagaactggaagctgagcatcagatgcggcggctacaccctgaaggtgctgatggagaacaagttcctgcccgagccccccagcaccagaaagaagagaatcctggagagccacaacaacaccctggtggacccctgccccgagaacagcaacatctgcgaggtgtgcaacaagtggggcagactgttctgctgcgacacctgccccagaagcttccacgagcactgccacatccccagcgtggaggccaacaagaacccctggagctgcatcttctgcagaatcaagaccatccaggagagatgccccgagagccagagcggccaccaggagagcgaggtgctgatgagacagatgctgcccgaggagcagctgaagtgcgagttcctgctgctgaaggtgtactgcgacagcaagagctgcttcttcgccagcgagccctactacaacagagagggcagccagggcccccagaagcccatgtggctgaacaaggtgaagaccagcctgaacgagcagatgtacaccagagtggagggcttcgtgcaggacatgagactgatcttccacaaccacaaggagttctacagagaggacaagttcaccagactgggcatccaggtgcaggacatcttcgagaagaacttcagaaacatcttcgccatccaggagaccagcaagaacatcatcatgttcatctag

SEQ ID NO: 100396 - DNA, 1422 bp, synthetic construct
  misc_feature 1..1422: note = Description of Artificial Sequence: Synthetic coding sequence
  source 1..1422: mol_type = other DNA
atggccggcggcggcggcgacctgagcaccagaagactgaacgagtgcatcagccccgtggccaacgagatgaaccacctgcccgcccacagccacgacctgcagagaatgttcaccgaggaccagggcgtggacgacagactgctgtacgacatcgtgttcaagcacttcaagagaaacaaggtggagatcagcaacgccatcaagaagaccttccccttcctggagggcctgagagacagagacctgatcaccaacaagatgttcgaggacagccaggacagctgcagaaacctggtgcccgtgcagagagtggtgtacaacgtgctgagcgagctggagaagaccttcaacctgcccgtgctggaggccctgttcagcgacgtgaacatgcaggagtaccccgacctgatccacatctacaagggcttcgagaacgtgatccacgacaagctgcccctgcaggagagcgaggaggaggagagagaggagagaagcggcctgcagctgagcctggagcagggcaccggcgagaacagcttcagaagcctgacctggccccccagcggcagccccagccacgccggcaccaccccccccgagaacggcctgagcgagcacccctgcgagaccgagcagatcaacgccaagagaaaggacaccaccagcgacaaggacgacagcctgggcagccagcagaccaacgagcagtgcgcccagaaggccgagcccaccgagagctgcgagcagatcgccgtgcaggtgaacaacggcgacgccggcagagagatgccctgccccctgccctgcgacgaggagagccccgaggccgagctgcacaaccacggcatccagatcaacagctgcagcgtgagactggtggacatcaagaaggagaagcccttcagcaacagcaaggtggagtgccaggcccaggccagaacccaccacaaccaggccagcgacatcatcgtgatcagcagcgaggacagcgagggcagcaccgacgtggacgagcccctggaggtgttcatcagcgcccccagaagcgagcccgtgatcaacaacgacaaccccctggagagcaacgacgagaaggagggccaggaggccacctgcagcagaccccagatcgtgcccgagcccatggacttcagaaagctgagcaccttcagagagagcttcaagaagagagtgatcggccaggaccacgacttcagcgagagcagcgaggaggaggcccccgccgaggccagcagcggcgccctgagaagcaagcacggcgagaaggcccccatgaccagcagaagcaccagcacctggagaatccccagcagaaagagacagctgaagaagaagaagaagaagaagcagtgccacccccagccccagccccagagaggcctgctggagcagagctag

SEQ ID NO: 100397 - DNA, 2067 bp, synthetic construct
  misc_feature 1..2067: note = Description of Artificial Sequence: Synthetic coding sequence
  source 1..2067: mol_type = other DNA
atggccggcggcggcggcgacctgagcaccagaagactgaacgagtgcatcagccccgtggccaacgagatgaaccacctgcccgcccacagccacgacctgcagagaatgttcaccgaggaccagggcgtggacgacagactgctgtacgacatcgtgttcaagcacttcaagagaaacaaggtggagatcagcaacgccatcaagaagaccttccccttcctggagggcctgagagacagagacctgatcaccaacaagatgttcgaggacagccaggacagctgcagaaacctggtgcccgtgcagagagtggtgtacaacgtgctgagcgagctggagaagaccttcaacctgcccgtgctggaggccctgttcagcgacgtgaacatgcaggagtaccccgacctgatccacatctacaagggcttcgagaacgtgatccacgacaagctgcccctgcaggagagcgaggaggaggagagagaggagagaagcggcctgcagctgagcctggagcagggcaccggcgagaacagcttcagaagcctgacctggccccccagcggcagccccagccacgccggcaccaccccccccgagaacggcctgagcgagcacccctgcgagaccgagcagatcaacgccaagagaaaggacaccaccagcgacaaggacgacagcctgggcagccagcagaccaacgagcagtgcgcccagaaggccgagcccaccgagagctgcgagcagatcgccgtgcaggtgaacaacggcgacgccggcagagagatgccctgccccctgccctgcgacgaggagagccccgaggccgagctgcacaaccacggcatccagatcaacagctgcagcgtgagactggtggacatcaagaaggagaagcccttcagcaacagcaaggtggagtgccaggcccaggccagaacccaccacaaccaggccagcgacatcatcgtgatcagcagcgaggacagcgagggcagcaccgacgtggacgagcccctggaggtgttcatcagcgcccccagaagcgagcccgtgatcaacaacgacaaccccctggagagcaacgacgagaaggagggccaggaggccacctgcagcagaccccagatcgtgcccgagcccatggacttcagaaagctgagcaccttcagagagagcttcaagaagagagtgatcggccaggaccacgacttcagcgagagcagcgaggaggaggcccccgccgaggccagcagcggcgccctgagaagcaagcacggcgagaaggcccccatgaccagcagaagcaccagcacctggagaatccccagcagaaagagaagattcagcagcagcgacttcagcgacctgagcaacggcgaggagctgcaggagacctgcagcagcagcctgagaagaggcagcggcagccagccccaggagcccgagaacaagaagtgcagctgcgtgatgtgcttccccaagggcgtgcccagaagccaggaggccagaaccgagagcagccaggccagcgacatgatggacaccatggacgtggagaacaacagcaccctggagaagcacagcggcaagagaagaaagaagagaagacacagaagcaaggtgaacggcctgcagagaggcagaaagaaggacagacccagaaagcacctgaccctgaacaacaaggtgcagaagaagagatggcagcagagaggcagaaaggccaacaccagacccctgaagagaagaagaaagagaggccccagaatccccaaggacgagaacatcaacttcaagcagagcgagctgcccgtgacctgcggcgaggtgaagggcaccctgtacaaggagagattcaagcagggcaccagcaagaagtgcatccagagcgaggacaagaagtggttcacccccagagagttcgagatcgagggcgacagaggcgccagcaagaactggaagctgagcatcagatgcggcggctacaccctgaaggtgctgatggagaacaagttcctgcccgagccccccagcaccagaaagaaggtgatgatcaagtag

SEQ ID NO: 100398 - DNA, 1443 bp, synthetic construct
  misc_feature 1..1443: note = Description of Artificial Sequence: Synthetic coding sequence
  source 1..1443: mol_type = other DNA
atggccggcggcggcggcgacctgagcaccagaagactgaacgagtgcatcagccccgtggccaacgagatgaaccacctgcccgcccacagccacgacctgcagagaatgttcaccgaggaccagggcgtggacgacagactgctgtacgacatcgtgttcaagcacttcaagagaaacaaggtggagatcagcaacgccatcaagaagaccttccccttcctggagggcctgagagacagagacctgatcaccaacaagatgttcgaggacagccaggacagctgcagaaacctggtgcccgtgcagagagtggtgtacaacgtgctgagcgagctggagaagaccttcaacctgcccgtgctggaggccctgttcagcgacgtgaacatgcaggagtaccccgacctgatccacatctacaagggcttcgagaacgtgatccacgacaagctgcccctgcaggagagcgaggaggaggagagagaggagagaagcggcctgcagctgagcctggagcagggcaccggcgagaacagcttcagaagcctgacctggccccccagcggcagccccagccacgccggcaccaccccccccgagaacggcctgagcgagcacccctgcgagaccgagcagatcaacgccaagagaaaggacaccaccagcgacaaggacgacagcctgggcagccagcagaccaacgagcagtgcgcccagaaggccgagcccaccgagagctgcgagcagatcgccgtgcaggtgaacaacggcgacgccggcagagagatgccctgccccctgccctgcgacgaggagagccccgaggccgagctgcacaaccacggcatccagatcaacagctgcagcgtgagactggtggacatcaagaaggagaagcccttcagcaacagcaaggtggagtgccaggcccaggccagaacccaccacaaccaggccagcgacatcatcgtgatcagcagcgaggacagcgagggcagcaccgacgtggacgagcccctggaggtgttcatcagcgcccccagaagcgagcccgtgatcaacaacgacaaccccctggagagcaacgacgagaaggagggccaggaggccacctgcagcagaccccagatcgtgcccgagcccatggacttcagaaagctgagcaccttcagagagagcttcaagaagagagtgatcggccaggaccacgacttcagcgagagcagcgaggaggaggcccccgccgaggccagcagcggcgccctgagaagcaagcacggcgagaaggcccccatgaccagcagaagcaccagcacctggagaatccccagcagaaagagaagattcagcagcagcgacttcagcgacctgagcaacggcgaggagctgcaggagacctgcagcagcagcctgagaagaggcagcggcaaggaggactag

SEQ ID NO: 100399 - DNA, 1068 bp, synthetic construct
  misc_feature 1..1068: note = Description of Artificial Sequence: Synthetic coding sequence
  source 1..1068: mol_type = other DNA
atggacgtggagaacaacagcaccctggagaagcacagcggcaagagaagaaagaagagaagacacagaagcaaggtgaacggcctgcagagaggcagaaagaaggacagacccagaaagcacctgaccctgaacaacaaggtgcagaagaagagatggcagcagagaggcagaaaggccaacaccagacccctgaagagaagaagaaagagaggccccagaatccccaaggacgagaacatcaacttcaagcagagcgagctgcccgtgacctgcggcgaggtgaagggcaccctgtacaaggagagattcaagcagggcaccagcaagaagtgcatccagagcgaggacaagaagtggttcacccccagagagttcgagatcgagggcgacagaggcgccagcaagaactggaagctgagcatcagatgcggcggctacaccctgaaggtgctgatggagagaatcctggagagccacaacaacaccctggtggacccctgccccgagaacagcaacatctgcgaggtgtgcaacaagtggggcagactgttctgctgcgacacctgccccagaagcttccacgagcactgccacatccccagcgtggaggccaacaagaacccctggagctgcatcttctgcagaatcaagaccatccaggagagatgccccgagagccagagcggccaccaggagagcgaggtgctgatgagacagatgctgcccgaggagcagctgaagtgcgagttcctgctgctgaaggtgtactgcgacagcaagagctgcttcttcgccagcgagccctactacaacagagagggcagccagggcccccagaagcccatgtggctgaacaaggtgaagaccagcctgaacgagcagatgtacaccagagtggagggcttcgtgcaggacatgagactgatcttccacaaccacaaggagttctacagagaggacaagttcaccagactgggcatccaggtgcaggacatcttcgagaagaacttcagaaacatcttcgccatccaggagaccagcaagaacatcatcatgttcatctag

SEQ ID NO: 100400 - DNA, 1359 bp, synthetic construct
  misc_feature 1..1359: note = Description of Artificial Sequence: Synthetic coding sequence
  source 1..1359: mol_type = other DNA
atggccggcggcggcggcgacctgagcaccagaatgttcaccgaggaccagggcgtggacgacagactgctgtacgacatcgtgttcaagcacttcaagagaaacaaggtggagatcagcaacgccatcaagaagaccttccccttcctggagggcctgagagacagagacctgatcaccaacaagatgttcgaggacagccaggacagctgcagaaacctggtgcccgtgcagagagtggtgtacaacgtgctgagcgagctggagaagaccttcaacctgcccgtgctggaggccctgttcagcgacgtgaacatgcaggagtaccccgacctgatccacatctacaagggcttcgagaacgtgatccacgacaagctgcccctgcaggagagcgaggaggaggagagagaggagagaagcggcctgcagctgagcctggagcagggcaccggcgagaacagcttcagaagcctgacctggccccccagcggcagccccagccacgccggcaccaccccccccgagaacggcctgagcgagcacccctgcgagaccgagcagatcaacgccaagagaaaggacaccaccagcgacaaggacgacagcctgggcagccagcagaccaacgagcagtgcgcccagaaggccgagcccaccgagagctgcgagcagatcgccgtgcaggtgaacaacggcgacgccggcagagagatgccctgccccctgccctgcgacgaggagagccccgaggccgagctgcacaaccacggcatccagatcaacagctgcagcgtgagactggtggacatcaagaaggagaagcccttcagcaacagcaaggtggagtgccaggcccaggccagaacccaccacaaccaggccagcgacatcatcgtgatcagcagcgaggacagcgagggcagcaccgacgtggacgagcccctggaggtgttcatcagcgcccccagaagcgagcccgtgatcaacaacgacaaccccctggagagcaacgacgagaaggagggccaggaggccacctgcagcagaccccagatcgtgcccgagcccatggacttcagaaagctgagcaccttcagagagagcttcaagaagagagtgatcggccaggaccacgacttcagcgagagcagcgaggaggaggcccccgccgaggccagcagcggcgccctgagaagcaagcacgcccccatgaccagcagaagcaccagcacctggagaatccccagcagaaagagaagattcagcagcagcgacttcagcgacctgagcaacggcgaggagctgcaggagacctgcagcagcagcctgagaagaggcagcggcaaggaggactag

SEQ ID NO: 100401 - DNA, 1338 bp, synthetic construct
  misc_feature 1..1338: note = Description of Artificial Sequence: Synthetic coding sequence
  source 1..1338: mol_type = other DNA
atgatgttcaccgaggaccagggcgtggacgacagactgctgtacgacatcgtgttcaagcacttcaagagaaacaaggtggagatcagcaacgccatcaagaagaccttccccttcctggagggcctgagagacagagacctgatcaccaacaagatgttcgaggacagccaggacagctgcagaaacctggtgcccgtgcagagagtggtgtacaacgtgctgagcgagctggagaagaccttcaacctgcccgtgctggaggccctgttcagcgacgtgaacatgcaggagtaccccgacctgatccacatctacaagggcttcgagaacgtgatccacgacaagctgcccctgcaggagagcgaggaggaggagagagaggagagaagcggcctgcagctgagcctggagcagggcaccggcgagaacagcttcagaagcctgacctggccccccagcggcagccccagccacgccggcaccaccccccccgagaacggcctgagcgagcacccctgcgagaccgagcagatcaacgccaagagaaaggacaccaccagcgacaaggacgacagcctgggcagccagcagaccaacgagcagtgcgcccagaaggccgagcccaccgagagctgcgagcagatcgccgtgcaggtgaacaacggcgacgccggcagagagatgccctgccccctgccctgcgacgaggagagccccgaggccgagctgcacaaccacggcatccagatcaacagctgcagcgtgagactggtggacatcaagaaggagaagcccttcagcaacagcaaggtggagtgccaggcccaggccagaacccaccacaaccaggccagcgacatcatcgtgatcagcagcgaggacagcgagggcagcaccgacgtggacgagcccctggaggtgttcatcagcgcccccagaagcgagcccgtgatcaacaacgacaaccccctggagagcaacgacgagaaggagggccaggaggccacctgcagcagaccccagatcgtgcccgagcccatggacttcagaaagctgagcaccttcagagagagcttcaagaagagagtgatcggccaggaccacgacttcagcgagagcagcgaggaggaggcccccgccgaggccagcagcggcgccctgagaagcaagcacggcgagaaggcccccatgaccagcagaagcaccagcacctggagaatccccagcagaaagagaagattcagcagcagcgacttcagcgacctgagcaacggcgaggagctgcaggagacctgcagcagcagcctgagaagaggcagcggcaaggaggactag

SEQ ID NO: 100402 - DNA, 2142 bp, synthetic construct
  misc_feature 1..2142: note = Description of Artificial Sequence: Synthetic coding sequence
  source 1..2142: mol_type = other DNA
atgttcaccatgaccagagccatggaggaggccctgttccagcacttcatgcaccagaagctgggcatcgcctacgccatccacaagcccttccccttcttcgagggcctgctggacaacagcatcatcaccaagagaatgtacatggagagcctggaggcctgcagaaacctgatccccgtgagcagagtggtgcacaacatcctgacccagctggagagaaccttcaacctgagcctgctggtgaccctgttcagccagatcaacctgagagagtaccccaacctggtgaccatctacagaagcttcaagagagtgggcgccagctacgagtggcagagcagagacacccccatcctgctggaggcccccaccggcctggccgagggcagcagcctgcacacccccctggccctgccccccccccagcccccccagcccagctgcagcccctgcgcccccagagtgagcgagcccggcaccagcagccagcagagcgacgagatcctgagcgagagccccagccccagcgaccccgtgctgcccctgcccgccctgatccaggagggcagaagcaccagcgtgaccaacgacaagctgaccagcaagatgaacgccgaggaggacagcgaggagatgcccagcctgctgaccagcaccgtgcaggtggccagcgacaacctgatcccccagatcagagacaaggaggacccccaggagatgccccacagccccctgggcagcatgcccgagatcagagacaacagccccgagcccaacgaccccgaggagccccaggaggtgagcagcacccccagcgacaagaagggcaagaagagaaagagatgcatctggagcacccccaagagaagacacaagaagaagagcctgcccggcggcaccgccagcagcagacacggcatccagaagaagctgaagagagtggaccaggtgccccagaagaaggacgacagcacctgcaacagcaccgtggagaccagagcccagaaggccagaaccgagtgcgccagaaagagcagaagcgaggagatcatcgacggcaccagcgagatgaacgagggcaagagaagccagaagacccccagcacccccagaagagtgacccagggcgccgccagccccggccacggcatccaggagaagctgcaggtggtggacaaggtgacccagagaaaggacgacagcacctggaacagcgaggtgatgatgagagtgcagaaggccagaaccaagtgcgccagaaagagcagactgaaggagaagaagaaggagaaggacatctgcagcagcagcaagagaagattccagaagaacatccacagaagaggcaagcccaagagcgacaccgtggacttccactgcagcaagctgcccgtgacctgcggcgaggccaagggcatcctgtacaagaagaagatgaagcacggcagcagcgtgaagtgcatcagaaacgaggacggcacctggctgacccccaacgagttcgaggtggagggcaagggcagaaacgccaagaactggaagagaaacatcagatgcgagggcatgaccctgggcgagctgctgaagagaaagaacagcgacgagtgcgaggtgtgctgccagggcggccagctgctgtgctgcggcacctgccccagagtgttccacgaggactgccacatcccccccgtggaggccaagagaatgctgtggagctgcaccttctgcagaatgaagagaagcagcggcagccagcagtgccaccacgtgagcaagaccctggagagacagatgcagccccaggaccagctgaagtgcgagttcctgctgctgaaggcctactgccacccccagagcagcttcttcaccggcatccccttcaacatcagagactacggcgagcccttccaggaggccatgtggctggacctggtgaaggagagactgatcaccgagatgtacaccgtggcctggttcgtgagagacatgagactgatgttcagaaaccacaagaccttctacaaggccagcgacttcggccaggtgggcctggacctggaggccgagttcgagaaggacctgaaggacgtgctgggcttccacgaggccaacgacggcggcttctggaccctgccctag

SEQ ID NO: 100403 - DNA, 1650 bp, synthetic construct
  misc_feature 1..1650: note = Description of Artificial Sequence: Synthetic coding sequence
  source 1..1650: mol_type = other DNA
atgttcaccatgaccagagccatggaggaggccctgttccagcacttcatgcaccagaagctgggcatcgcctacgccatccacaagcccttccccttcttcgagggcctgctggacaacagcatcatcaccaagagaatgtacatggagagcctggaggcctgcagaaacctgatccccgtgagcagagtggtgcacaacatcctgacccagctggagagaaccttcaacctgagcctgctggtgaccctgttcagccagatcaacctgagagagtaccccaacctggtgaccatctacagaagcttcaagagagtgggcgccagctacgagtggcagagcagagacacccccatcctgctggaggcccccaccggcctggccgagggcagcagcctgcacacccccctggccctgccccccccccagcccccccagcccagctgcagcccctgcgcccccagagtgagcgagcccggcaccagcagccagcagagcgacgagatcctgagcgagagccccagccccagcgaccccgtgctgcccctgcccgccctgatccaggagggcagaagcaccagcgtgaccaacgacaagctgaccagcaagatgaacgccgaggaggacagcgaggagatgcccagcctgctgaccagcaccgtgcaggtggccagcgacaacctgatcccccagatcagagacaaggaggacccccaggagatgccccacagccccctgggcagcatgcccgagatcagagacaacagccccgagcccaacgaccccgaggagccccaggaggtgagcagcacccccagcgacaagaagggcaagaagagaaagagatgcatctggagcacccccaagagaagacacaagaagaagagcctgcccggcggcaccgccagcagcagacacggcatccagaagaagctgaagagagtggaccaggtgccccagaagaaggacgacagcacctgcaacagcaccgtggagaccagagcccagaaggccagaaccgagtgcgccagaaagagcagaagcgaggagatcatcgacggcaccagcgagatgaacgagggcaagagaagccagaagacccccagcacccccagaagagtgacccagggcgccgccagccccggccacggcatccaggagaagctgcaggtggtggacaaggtgacccagagaaaggacgacagcacctggaacagcgaggtgatgatgagagtgcagaaggccagaaccaagtgcgccagaaagagcagactgaaggagaagaagaaggagaaggacatctgcagcagcagcaagagaagattccagaagaacatccacagaagaggcaagcccaagagcgacaccgtggacttccactgcagcaagctgcccgtgacctgcggcgaggccaagggcatcctgtacaagaagaagatgaagcacggcagcagcgtgaagtgcatcagaaacgaggacggcacctggctgacccccaacgagttcgaggtggagggcaagggcagaaacgccaagaactggaagagaaacatcagatgcgagggcatgaccctgggcgagctgctgaagagcggcctgctgctgtgcccccccagaatcaacctgaagagagagctgaacagcaagtag

SEQ ID NO: 100404 - DNA, 756 bp, synthetic construct
  misc_feature 1..756: note = Description of Artificial Sequence: Synthetic coding sequence
  source 1..756: mol_type = other DNA
atgcccgagatcagagacaacagccccgagcccaacgaccccgaggagccccaggaggtgagcagcacccccagcgacaagaagggcaagaagagaaagagatgcatctggagcacccccaagagaagacacaagaagaagagcctgcccggcgagatcatcgacggcaccagcgagatgaacgagggcaagagaagccagaagacccccagcacccccagaagagtgacccagggcgccgccagccccggccacggcatccaggagaagctgcaggtggtggacaaggtgacccagagaaaggacgacagcacctggaacagcgaggtgatgatgagagtgcagaaggccagaaccaagtgcgccagaaagagcagactgaaggagaagaagaaggagaaggacatctgcagcagcagcaagagaagattccagaagaacatccacagaagaggcaagcccaagagcgacaccgtggacttccactgcagcaagctgcccgtgacctgcggcgaggccaagggcatcctgtacaagaagaagatgaagcacggcagcagcgtgaagtgcatcagaaacgaggacggcacctggctgacccccaacgagttcgaggtggagggcaagggcagaaacgccaagaactggaagagaaacatcagatgcgagggcatgaccctgggcgagctgctgaagagcggcctgctgctgtgcccccccagaatcaacctgaagagagagctgaacagcaagtag

SEQ ID NO: 100405 - DNA, 2070 bp, synthetic construct
  misc_feature 1..2070: note = Description of Artificial Sequence: Synthetic coding sequence
  source 1..2070: mol_type = other DNA
atgttcaccatgaccagagccatggaggaggccctgttccagcacttcatgcaccagaagctgggcatcgcctacgccatccacaagcccttccccttcttcgagggcctgctggacaacagcatcatcaccaagagaatgtacatggagagcctggaggcctgcagaaacctgatccccgtgagcagagtggtgcacaacatcctgacccagctggagagaaccttcaacctgagcctgctggtgaccctgttcagccagatcaacctgagagagtaccccaacctggtgaccatctacagaagcttcaagagagtgggcgccagctacgagtggcagagcagagacacccccatcctgctggaggcccccaccggcctggccgagggcagcagcctgcacacccccctggccctgccccccccccagcccccccagcccagctgcagcccctgcgcccccagagtgagcgagcccggcaccagcagccagcagagcgacgagatcctgagcgagagccccagccccagcgaccccgtgctgcccctgcccgccctgatccaggagggcagaagcaccagcgtgaccaacgacaagctgaccagcaagatgaacgccgaggaggacagcgaggagatgcccagcctgctgaccagcaccgtgcaggtggccagcgacaacctgatcccccagatcagagacaaggaggacccccaggagatgccccacagccccctgggcagcatgcccgagatcagagacaacagccccgagcccaacgaccccgaggagccccaggaggtgagcagcacccccagcgacaagaagggcaagaagagaaagagatgcatctggagcacccccaagagaagacacaagaagaagagcctgcccggcggcaccgccagcagcagacacggcatccagaagaagctgaagagagtggaccaggtgccccagaagaaggacgacagcacctgcaacagcaccgtggagaccagagcccagaaggccagaaccgagtgcgccagaaagagcagaagcgaggagatcatcgacggcaccagcgagatgaacgagggcaagagaagccagaagacccccagcacccccagaagagtgacccagggcgccgccagccccggccacggcatccaggagaagctgcaggtggtggacaaggtgacccagagaaaggacgacagcacctggaacagcgaggtgatgatgagagtgcagaaggccagaaccaagtgcgccagaaagagcagactgaaggagaagaagaaggagaaggacatctgcagcagcagcaagagaagattccagaagaacatccacagaagaggcaagcccaagagcgacaccgtggacttccactgcagcaagctgcccgtgacctgcggcgaggccaagggcatcctgtacaagaagaagatgaagcacggcagcagcgtgaagtgcatcagaaacgaggacggcacctggctgacccccaacgagttcgaggtggagggcaagggcagaaacgccaagaactggaagagaaacatcagatgcgagggcatgaccctgggcgagctgctgaagagaaagaacagcgacgagtgcgaggtgtgctgccagggcggccagctgctgtgctgcggcacctgccccagagtgttccacgaggactgccacatcccccccgtggaggccaagagaatgctgtggagctgcaccttctgcagaatgaagagaagcagcggcagccagcagtgccaccacgtgagcaagaccctggagagacagatgcagccccaggaccagctgatcagagactacggcgagcccttccaggaggccatgtggctggacctggtgaaggagagactgatcaccgagatgtacaccgtggcctggttcgtgagagacatgagactgatgttcagaaaccacaagaccttctacaaggccagcgacttcggccaggtgggcctggacctggaggccgagttcgagaaggacctgaaggacgtgctgggcttccacgaggccaacgacggcggcttctggaccctgccctag

SEQ ID NO: 100406 - DNA, 1644 bp, synthetic construct
  misc_feature 1..1644: note = Description of Artificial Sequence: Synthetic coding sequence
  source 1..1644: mol_type = other DNA
atgttcaccatgaccagagccatggaggaggccctgttccagcacttcatgcaccagaagctgggcatcgcctacgccatccacaagcccttccccttcttcgagggcctgctggacaacagcatcatcaccaagagaatgtacatggagagcctggaggcctgcagaaacctgatccccgtgagcagagtggtgcacaacatcctgacccagctggagagaaccttcaacctgagcctgctggtgaccctgttcagccagatcaacctgagagagtaccccaacctggtgaccatctacagaagcttcaagagagtgggcgccagctacgagtggcagagcagagacacccccatcctgctggaggcccccaccggcctggccgagggcagcagcctgcacacccccctggccctgccccccccccagcccccccagcccagctgcagcccctgcgcccccagagtgagcgagcccggcaccagcagccagcagagcgacgagatcctgagcgagagccccagccccagcgaccccgtgctgcccctgcccgccctgatccaggagggcagaagcaccagcgtgaccaacgacaagctgaccagcaagatgaacgccgaggaggacagcgaggagatgcccagcctgctgaccagcaccgtgcaggtggccagcgacaacctgatcccccagatcagagacaaggaggacccccaggagatgccccacagccccctgggcagcatgcccgagatcagagacaacagccccgagcccaacgaccccgaggagccccaggaggtgagcagcacccccagcgacaagaagggcaagaagagaaagagatgcatctggagcacccccaagagaagacacaagaagaagagcctgcccggcgccagcagcagacacggcatccagaagaagctgaagagagtggaccaggtgccccagaagaaggacgacagcacctgcaacagcaccgtggagaccagagcccagaaggccagaaccgagtgcgccagaaagagcagaagcgaggagatcatcgacggcaccagcgagatgaacgagggcaagagaagccagaagacccccagcacccccagaagagtgacccagggcgccgccagccccggccacggcatccaggagaagctgcaggtggtggacaaggtgacccagagaaaggacgacagcacctggaacagcgaggtgatgatgagagtgcagaaggccagaaccaagtgcgccagaaagagcagactgaaggagaagaagaaggagaaggacatctgcagcagcagcaagagaagattccagaagaacatccacagaagaggcaagcccaagagcgacaccgtggacttccactgcagcaagctgcccgtgacctgcggcgaggccaagggcatcctgtacaagaagaagatgaagcacggcagcagcgtgaagtgcatcagaaacgaggacggcacctggctgacccccaacgagttcgaggtggagggcaagggcagaaacgccaagaactggaagagaaacatcagatgcgagggcatgaccctgggcgagctgctgaagagcggcctgctgctgtgcccccccagaatcaacctgaagagagagctgaacagcaagtag

SEQ ID NO: 100407 - DNA, 666 bp, synthetic construct
  misc_feature 1..666: note = Description of Artificial Sequence: Synthetic coding sequence
  source 1..666: mol_type = other DNA
atgttcaccatgaccagagccatggaggaggccctgttccagcacttcatgcaccagaagctgggcatcgcctacgccatccacaagcccttccccttcttcgagggcctgctggacaacagcatcatcaccaagagaatgtacatggagagcctggaggcctgcagaaacctgatccccgtgagcagagtggtgcacaacatcctgacccagctggagagaaccttcaacctgagcctgctggtgaccctgttcagccagatcaacctgagagagtaccccaacctggtgaccatctacagaagcttcaagagagtgggcgccagctacgagtggcagagcagagacacccccatcctgctggaggcccccaccggcctggccgagggcagcagcctgcacacccccctggccctgccccccccccagcccccccagcccagctgcagcccctgcgcccccagagtgagcgagcccggcaccagcagccagcagagcgacgagatcctgagcgagagccccagccccagcgaccccgtgctgcccctgcccgccctgatccaggagggcagaagcaccagcgtgaccaacgacaagctgaccagcaagatgaacgccgaggaggacagcgaggagatgcccagcctgctgaccagcaccgtgtag

SEQ ID NO: 100408 - DNA, 306 bp, synthetic construct
  misc_feature 1..306: note = Description of Artificial Sequence: Synthetic coding sequence
  source 1..306: mol_type = other DNA
atgttcaccatgaccagagccatggaggaggccctgttccagcacttcatgcaccagaagctgggcatcgcctacgccatccacaagcccttccccttcttcgagggcctgctggacaacagcatcatcaccaagagaatgtacatggagagcctggaggcctgcagaaacctgatccccgtgagcagagtggtgcacaacatcctgacccagctggagagaaccttcaacctgagcctgctggtgaccctgttcagccagatcaacctgagagagtaccccaacctggtgaccatctacagatag

SEQ ID NO: 100409 - DNA, 1668 bp, synthetic construct
  misc_feature 1..1668: note = Description of Artificial Sequence: Synthetic coding sequence
  source 1..1668: mol_type = other DNA
atgggcagaggcttcagaatgttcaccatgaccagagccatggaggaggccctgttccagcacttcatgcaccagaagctgggcatcgcctacgccatccacaagcccttccccttcttcgagggcctgctggacaacagcatcatcaccaagagaatgtacatggagagcctggaggcctgcagaaacctgatccccgtgagcagagtggtgcacaacatcctgacccagctggagagaaccttcaacctgagcctgctggtgaccctgttcagccagatcaacctgagagagtaccccaacctggtgaccatctacagaagcttcaagagagtgggcgccagctacgagtggcagagcagagacacccccatcctgctggaggcccccaccggcctggccgagggcagcagcctgcacacccccctggccctgccccccccccagcccccccagcccagctgcagcccctgcgcccccagagtgagcgagcccggcaccagcagccagcagagcgacgagatcctgagcgagagccccagccccagcgaccccgtgctgcccctgcccgccctgatccaggagggcagaagcaccagcgtgaccaacgacaagctgaccagcaagatgaacgccgaggaggacagcgaggagatgcccagcctgctgaccagcaccgtgcaggtggccagcgacaacctgatcccccagatcagagacaaggaggacccccaggagatgccccacagccccctgggcagcatgcccgagatcagagacaacagccccgagcccaacgaccccgaggagccccaggaggtgagcagcacccccagcgacaagaagggcaagaagagaaagagatgcatctggagcacccccaagagaagacacaagaagaagagcctgcccggcggcaccgccagcagcagacacggcatccagaagaagctgaagagagtggaccaggtgccccagaagaaggacgacagcacctgcaacagcaccgtggagaccagagcccagaaggccagaaccgagtgcgccagaaagagcagaagcgaggagatcatcgacggcaccagcgagatgaacgagggcaagagaagccagaagacccccagcacccccagaagagtgacccagggcgccgccagccccggccacggcatccaggagaagctgcaggtggtggacaaggtgacccagagaaaggacgacagcacctggaacagcgaggtgatgatgagagtgcagaaggccagaaccaagtgcgccagaaagagcagactgaaggagaagaagaaggagaaggacatctgcagcagcagcaagagaagattccagaagaacatccacagaagaggcaagcccaagagcgacaccgtggacttccactgcagcaagctgcccgtgacctgcggcgaggccaagggcatcctgtacaagaagaagatgaagcacggcagcagcgtgaagtgcatcagaaacgaggacggcacctggctgacccccaacgagttcgaggtggagggcaagggcagaaacgccaagaactggaagagaaacatcagatgcgagggcatgaccctgggcgagctgctgaagagcggcctgctgctgtgcccccccagaatcaacctgaagagagagctgaacagcaagtag

SEQ ID NO: 100410 - DNA, 2346 bp, synthetic construct
  misc_feature 1..2346: note = Description of Artificial Sequence: Synthetic coding sequence
  source 1..2346: mol_type = other DNA
atgaccgcccccgagaagcccgtgaagcaggaggagatggccgccctggacgtggacagcggcggcggcggcggcggcggcggcggccacggcgagtacctgcagcagcagcagcagcacggcaacggcgccgtggccgccgccgccgccgcccaggacacccagcccagccccctggccctgctggccgccacctgcagcaagatcggcccccccagccccggcgacgacgaggaggaggccgccgccgccgccggcgcccccgccgccgccggcgccaccggcgacctggccagcgcccagctgggcggcgcccccaacagatgggaggtgctgagcgccacccccaccaccatcaaggacgaggccggcaacctggtgcagatccccagcgccgccaccagcagcggccagtacgtgctgcccctgcagaacctgcagaaccagcagatcttcagcgtggcccccggcagcgacagcagcaacggcaccgtgagcagcgtgcagtaccaggtgatcccccagatccagagcgccgacggccagcaggtgcagatcggcttcaccggcagcagcgacaacggcggcatcaaccaggagagcagccagatccagatcatccccggcagcaaccagaccctgctggccagcggcacccccagcgccaacatccagaacctgatcccccagaccggccaggtgcaggtgcagggcgtggccatcggcggcagcagcttccccggccagacccaggtggtggccaacgtgcccctgggcctgcccggcaacatcaccttcgtgcccatcaacagcgtggacctggacagcctgggcctgagcggcagcagccagaccatgaccgccggcatcaacgccgacggccacctgatcaacaccggccaggccatggacagcagcgacaacagcgagagaaccggcgagagagtgagccccgacatcaacgagaccaacaccgacaccgacctgttcgtgcccaccagcagcagcagccagctgcccgtgaccatcgacagcaccggcatcctgcagcagaacaccaacagcctgaccaccagcagcggccaggtgcacagcagcgacctgcagggcaactacatccagagccccgtgagcgaggagacccaggcccagaacatccaggtgagcaccgcccagcccgtggtgcagcacctgcagctgcaggagagccagcagcccaccagccaggcccagatcgtgcagggcatcaccccccagaccatccacggcgtgcaggccagcggccagaacatcagccagcaggccctgcagaacctgcagctgcagctgaaccccggcaccttcctgatccaggcccagaccgtgacccccagcggccaggtgacctggcagaccttccaggtgcagggcgtgcagaacctgcagaacctgcagatccagaacaccgccgcccagcagatcaccctgacccccgtgcagaccctgaccctgggccaggtggccgccggcggcgccttcaccagcacccccgtgagcctgagcaccggccagctgcccaacctgcagaccgtgaccgtgaacagcatcgacagcgccggcatccagctgcaccccggcgagaacgccgacagccccgccgacatcagaatcaaggaggaggagcccgaccccgaggagtggcagctgagcggcgacagcaccctgaacaccaacgacctgacccacctgagagtgcaggtggtggacgaggagggcgaccagcagcaccaggagggcaagagactgagaagagtggcctgcacctgccccaactgcaaggagggcggcggcagaggcaccaacctgggcaagaagaagcagcacatctgccacatccccggctgcggcaaggtgtacggcaagaccagccacctgagagcccacctgagatggcacagcggcgagagacccttcgtgtgcaactggatgtactgcggcaagagattcaccagaagcgacgagctgcagagacacagaagaacccacaccggcgagaagaagttcgtgtgccccgagtgcagcaagagattcatgagaagcgaccacctggccaagcacatcaagacccaccagaacaagaagggcatccacagcagcagcaccgtgctggccagcgtggaggccgccagagacgacaccctgatcaccgccggcggcaccaccctgatcctggccaacatccagcagggcagcgtgagcggcatcggcaccgtgaacaccagcgccaccagcaaccaggacatcctgaccaacaccgagatccccctgcagctggtgaccgtgagcggcaacgagaccatggagtag

SEQ ID NO: 100411 - DNA, 2217 bp, synthetic construct
  misc_feature 1..2217: note = Description of Artificial Sequence: Synthetic coding sequence
  source 1..2217: mol_type = other DNA
tgacccgagaagcccgtgaagcaggaggagatggccgccctggacgtggacagcggcggcggcggcggcggcggcggcggccacggcgagtacctgcagcagcagcagcagcacggcaacggcgccgtggccgccgccgccgccgcccagaccggcgacctggccagcgcccagctgggcggcgcccccaacagatgggaggtgctgagcgccacccccaccaccatcaaggacgaggccggcaacctggtgcagatccccagcgccgccaccagcagcggccagtacgtgctgcccctgcagaacctgcagaaccagcagatcttcagcgtggcccccggcagcgacagcagcaacggcaccgtgagcagcgtgcagtaccaggtgatcccccagatccagagcgccgacggccagcaggtgcagatcggcttcaccggcagcagcgacaacggcggcatcaaccaggagagcagccagatccagatcatccccggcagcaaccagaccctgctggccagcggcacccccagcgccaacatccagaacctgatcccccagaccggccaggtgcaggtgcagggcgtggccatcggcggcagcagcttccccggccagacccaggtggtggccaacgtgcccctgggcctgcccggcaacatcaccttcgtgcccatcaacagcgtggacctggacagcctgggcctgagcggcagcagccagaccatgaccgccggcatcaacgccgacggccacctgatcaacaccggccaggccatggacagcagcgacaacagcgagagaaccggcgagagagtgagccccgacatcaacgagaccaacaccgacaccgacctgttcgtgcccaccagcagcagcagccagctgcccgtgaccatcgacagcaccggcatcctgcagcagaacaccaacagcctgaccaccagcagcggccaggtgcacagcagcgacctgcagggcaactacatccagagccccgtgagcgaggagacccaggcccagaacatccaggtgagcaccgcccagcccgtggtgcagcacctgcagctgcaggagagccagcagcccaccagccaggcccagatcgtgcagggcatcaccccccagaccatccacggcgtgcaggccagcggccagaacatcagccagcaggccctgcagaacctgcagctgcagctgaaccccggcaccttcctgatccaggcccagaccgtgacccccagcggccaggtgacctggcagaccttccaggtgcagggcgtgcagaacctgcagaacctgcagatccagaacaccgccgcccagcagatcaccctgacccccgtgcagaccctgaccctgggccaggtggccgccggcggcgccttcaccagcacccccgtgagcctgagcaccggccagctgcccaacctgcagaccgtgaccgtgaacagcatcgacagcgccggcatccagctgcaccccggcgagaacgccgacagccccgccgacatcagaatcaaggaggaggagcccgaccccgaggagtggcagctgagcggcgacagcaccctgaacaccaacgacctgacccacctgagagtgcaggtggtggacgaggagggcgaccagcagcaccaggagggcaagagactgagaagagtggcctgcacctgccccaactgcaaggagggcggcggcagaggcaccaacctgggcaagaagaagcagcacatctgccacatccccggctgcggcaaggtgtacggcaagaccagccacctgagagcccacctgagatggcacagcggcgagagacccttcgtgtgcaactggatgtactgcggcaagagattcaccagaagcgacgagctgcagagacacagaagaacccacaccggcgagaagaagttcgtgtgccccgagtgcagcaagagattcatgagaagcgaccacctggccaagcacatcaagacccaccagaacaagaagggcatccacagcagcagcaccgtgctggccagcgtggaggccgccagagacgacaccctgatcaccgccggcggcaccaccctgatcctggccaacatccagcagggcagcgtgagcggcatcggcaccgtgaacaccagcgccaccagcaaccaggacatcctgaccaacaccgagatccccctgcagctggtgaccgtgagcggcaacgagaccatggagtag

SEQ ID NO: 100412 - DNA, 2142 bp, synthetic construct
  misc_feature 1..2142: note = Description of Artificial Sequence: Synthetic coding sequence
  source 1..2142: mol_type = other DNA
atcggcccccccagccccggcgacgacgaggaggaggccgccgccgccgccggcgcccccgccgccgccggcgccaccggcgacctggccagcgcccagctgggcggcgcccccaacagatgggaggtgctgagcgccacccccaccaccatcaaggacgaggccggcaacctggtgcagatccccagcgccgccaccagcagcggccagtacgtgctgcccctgcagaacctgcagaaccagcagatcttcagcgtggcccccggcagcgacagcagcaacggcaccgtgagcagcgtgcagtaccaggtgatcccccagatccagagcgccgacggccagcaggtgcagatcggcttcaccggcagcagcgacaacggcggcatcaaccaggagagcagccagatccagatcatccccggcagcaaccagaccctgctggccagcggcacccccagcgccaacatccagaacctgatcccccagaccggccaggtgcaggtgcagggcgtggccatcggcggcagcagcttccccggccagacccaggtggtggccaacgtgcccctgggcctgcccggcaacatcaccttcgtgcccatcaacagcgtggacctggacagcctgggcctgagcggcagcagccagaccatgaccgccggcatcaacgccgacggccacctgatcaacaccggccaggccatggacagcagcgacaacagcgagagaaccggcgagagagtgagccccgacatcaacgagaccaacaccgacaccgacctgttcgtgcccaccagcagcagcagccagctgcccgtgaccatcgacagcaccggcatcctgcagcagaacaccaacagcctgaccaccagcagcggccaggtgcacagcagcgacctgcagggcaactacatccagagccccgtgagcgaggagacccaggcccagaacatccaggtgagcaccgcccagcccgtggtgcagcacctgcagctgcaggagagccagcagcccaccagccaggcccagatcgtgcagggcatcaccccccagaccatccacggcgtgcaggccagcggccagaacatcagccagcaggccctgcagaacctgcagctgcagctgaaccccggcaccttcctgatccaggcccagaccgtgacccccagcggccaggtgacctggcagaccttccaggtgcagggcgtgcagaacctgcagaacctgcagatccagaacaccgccgcccagcagatcaccctgacccccgtgcagaccctgaccctgggccaggtggccgccggcggcgccttcaccagcacccccgtgagcctgagcaccggccagctgcccaacctgcagaccgtgaccgtgaacagcatcgacagcgccggcatccagctgcaccccggcgagaacgccgacagccccgccgacatcagaatcaaggaggaggagcccgaccccgaggagtggcagctgagcggcgacagcaccctgaacaccaacgacctgacccacctgagagtgcaggtggtggacgaggagggcgaccagcagcaccaggagggcaagagactgagaagagtggcctgcacctgccccaactgcaaggagggcggcggcagaggcaccaacctgggcaagaagaagcagcacatctgccacatccccggctgcggcaaggtgtacggcaagaccagccacctgagagcccacctgagatggcacagcggcgagagacccttcgtgtgcaactggatgtactgcggcaagagattcaccagaagcgacgagctgcagagacacagaagaacccacaccggcgagaagaagttcgtgtgccccgagtgcagcaagagattcatgagaagcgaccacctggccaagcacatcaagacccaccagaacaagaagggcatccacagcagcagcaccgtgctggccagcgtggaggccgccagagacgacaccctgatcaccgccggcggcaccaccctgatcctggccaacatccagcagggcagcgtgagcggcatcggcaccgtgaacaccagcgccaccagcaaccaggacatcctgaccaacaccgagatccccctgcagctggtgaccgtgagcggcaacgagaccatggagtag

SEQ ID NO: 100413 - DNA, 2187 bp, synthetic construct
  misc_feature 1..2187: note = Description of Artificial Sequence: Synthetic coding sequence
  source 1..2187: mol_type = other DNA
atggccgccctggacgtggacagcggcggcggcggcggcggcggcggcggccacggcgagtacctgcagcagcagcagcagcacggcaacggcgccgtggccgccgccgccgccgcccagaccggcgacctggccagcgcccagctgggcggcgcccccaacagatgggaggtgctgagcgccacccccaccaccatcaaggacgaggccggcaacctggtgcagatccccagcgccgccaccagcagcggccagtacgtgctgcccctgcagaacctgcagaaccagcagatcttcagcgtggcccccggcagcgacagcagcaacggcaccgtgagcagcgtgcagtaccaggtgatcccccagatccagagcgccgacggccagcaggtgcagatcggcttcaccggcagcagcgacaacggcggcatcaaccaggagagcagccagatccagatcatccccggcagcaaccagaccctgctggccagcggcacccccagcgccaacatccagaacctgatcccccagaccggccaggtgcaggtgcagggcgtggccatcggcggcagcagcttccccggccagacccaggtggtggccaacgtgcccctgggcctgcccggcaacatcaccttcgtgcccatcaacagcgtggacctggacagcctgggcctgagcggcagcagccagaccatgaccgccggcatcaacgccgacggccacctgatcaacaccggccaggccatggacagcagcgacaacagcgagagaaccggcgagagagtgagccccgacatcaacgagaccaacaccgacaccgacctgttcgtgcccaccagcagcagcagccagctgcccgtgaccatcgacagcaccggcatcctgcagcagaacaccaacagcctgaccaccagcagcggccaggtgcacagcagcgacctgcagggcaactacatccagagccccgtgagcgaggagacccaggcccagaacatccaggtgagcaccgcccagcccgtggtgcagcacctgcagctgcaggagagccagcagcccaccagccaggcccagatcgtgcagggcatcaccccccagaccatccacggcgtgcaggccagcggccagaacatcagccagcaggccctgcagaacctgcagctgcagctgaaccccggcaccttcctgatccaggcccagaccgtgacccccagcggccaggtgacctggcagaccttccaggtgcagggcgtgcagaacctgcagaacctgcagatccagaacaccgccgcccagcagatcaccctgacccccgtgcagaccctgaccctgggccaggtggccgccggcggcgccttcaccagcacccccgtgagcctgagcaccggccagctgcccaacctgcagaccgtgaccgtgaacagcatcgacagcgccggcatccagctgcaccccggcgagaacgccgacagccccgccgacatcagaatcaaggaggaggagcccgaccccgaggagtggcagctgagcggcgacagcaccctgaacaccaacgacctgacccacctgagagtgcaggtggtggacgaggagggcgaccagcagcaccaggagggcaagagactgagaagagtggcctgcacctgccccaactgcaaggagggcggcggcagaggcaccaacctgggcaagaagaagcagcacatctgccacatccccggctgcggcaaggtgtacggcaagaccagccacctgagagcccacctgagatggcacagcggcgagagacccttcgtgtgcaactggatgtactgcggcaagagattcaccagaagcgacgagctgcagagacacagaagaacccacaccggcgagaagaagttcgtgtgccccgagtgcagcaagagattcatgagaagcgaccacctggccaagcacatcaagacccaccagaacaagaagggcatccacagcagcagcaccgtgctggccagcgtggaggccgccagagacgacaccctgatcaccgccggcggcaccaccctgatcctggccaacatccagcagggcagcgtgagcggcatcggcaccgtgaacaccagcgccaccagcaaccaggacatcctgaccaacaccgagatccccctgcagctggtgaccgtgagcggcaacgagaccatggagtag

SEQ ID NO: 100414 - DNA, 1545 bp, synthetic construct
  misc_feature 1..1545: note = Description of Artificial Sequence: Synthetic coding sequence
  source 1..1545: mol_type = other DNA
atggtgtgggaggtgaagaccaaccagatgcccaacgccgtgcagaagctgctgctggtgatggacaagagagccagcggcatgaacgacagcctggagctgctgcagtgcaacgagaacctgcccagcagccccggctacaacagctgcgacgagcacatggagctggacgacctgcccgagctgcaggccgtgcagagcgaccccacccagagcggcatgtaccagctgagcagcgacgtgagccaccaggagtaccccagaagcagctggaaccagaacaccagcgacatccccgagaccacctacagagagaacgaggtggactggctgaccgagctggccaacatcgccaccagcccccagagccccctgatgcagtgcagcttctacaacagaagcagccccgtgcacatcatcgccaccagcaagagcctgcacagctacgccagacccccccccgtgagcagcagcagcaagagcgagcccgccttcccccaccaccactggaaggaggagacccccgtgagacacgagagagccaacagcgagagcgagagcggcatcttctgcatgagcagcctgagcgacgacgacgacctgggctggtgcaacagctggcccagcaccgtgtggcactgcttcctgaagggcaccagactgtgcttccacaagggcagcaacaaggagtggcaggacgtggaggacttcgccagagccgagggctgcgacaacgaggaggacctgcagatgggcatccacaagggctacggcagcgacggcctgaagctgctgagccacgaggagagcgtgagcttcggcgagagcgtgctgaagctgaccttcgaccccggcaccgtggaggacggcctgctgaccgtggagtgcaagctggaccaccccttctacgtgaagaacaagggctggagcagcttctaccccagcctgaccgtggtgcagcacggcatcccctgctgcgaggtgcacatcggcgacgtgtgcctgccccccggccaccccgacgccatcaacttcgacgacagcggcgtgttcgacaccttcaagagctacgacttcacccccatggacagcagcgccgtgtacgtgctgagcagcatggccagacagagaagagccagcctgagctgcggcggccccggcggccaggacttcgccagaagcggcttcagcaagaactgcggcagccccggcagcagccagctgagcagcaacagcctgtacgccaaggccgtgaagaaccacagcagcggcaccgtgagcgccaccagccccaacaagtgcaagagacccatgaacgccttcatgctgttcgccaagaagtacagagtggagtacacccagatgtaccccggcaaggacaacagagccatcagcgtgatcctgggcgacagatggaagaagatgaagaacgaggagagaagaatgtacaccctggaggccaaggccctggccgaggagcagaagagactgaaccccgactgctggaagagaaagagaaccaacagcggcagccagcagcactag

SEQ ID NO: 100415 - DNA, 432 bp, synthetic construct
  misc_feature 1..432: note = Description of Artificial Sequence: Synthetic coding sequence
  source 1..432: mol_type = other DNA
atgagcgaccagaagaaggaggaggaggaggaggccgccgccgccgccgccatggccaccgagggcggcaagaccagcgagcccgagaacaacaacaagaagcccaagaccagcggcagccaggacagccagcccagccccctggccctgctggccgccacctgcagcaagatcggcacccccggcgagaaccaggccaccggccagcagcagagaaacctgctggagaccctgggcaacctgctgccccccctgctgctgctgcagaagagaatcaccttcctgaaccagcccctggtgagactggtgctgcccgccgtgatcaccggcgtgcacctgctgcagaagctgaaccaggtgatcctgccccccctggtgaacttcaagagctacaagtacaagatccaggtggtggtgtacagcaccaagtag

SEQ ID NO: 100416 - DNA, 1296 bp, synthetic construct
  misc_feature 1..1296: note = Description of Artificial Sequence: Synthetic coding sequence
  source 1..1296: mol_type = other DNA
atggccagcagcctgctggaggaggaggtgcactacggcagcagccccctggccatgctgaccgccgcctgcagcaagttcggcggcagcagccccctgagagacagcaccaccctgggcaaggccggcaccaagaagccctacagcgtgggcagcgacctgagcgccagcaagaccatgggcgacgcctaccccgcccccttcaccagcaccaacggcctgctgagccccgccggcagcccccccgcccccaccagcggctacgccaacgactacccccccttcagccacagcttccccggccccaccggcacccaggaccccggcctgctggtgcccaagggccacagcagcagcgactgcctgcccagcgtgtacaccagcctggacatgacccacccctacggcagctggtacaaggccggcatccacgccggcatcagccccggccccggcaacacccccaccccctggtgggacatgcaccccggcggcaactggctgggcggcggccagggccagggcgacggcctgcagggcaccctgcccaccggccccgcccagccccccctgaacccccagctgcccacctaccccagcgacttcgcccccctgaaccccgccccctaccccgccccccacctgctgcagcccggcccccagcacgtgctgccccaggacgtgtacaagcccaaggccgtgggcaacagcggccagctggagggcagcggcggcgccaagccccccagaggcgccagcaccggcggcagcggcggctacggcggcagcggcgccggcagaagcagctgcgactgccccaactgccaggagctggagagactgggcgccgccgccgccggcctgagaaagaagcccatccacagctgccacatccccggctgcggcaaggtgtacggcaaggccagccacctgaaggcccacctgagatggcacaccggcgagagacccttcgtgtgcaactggctgttctgcggcaagagattcaccagaagcgacgagctggagagacacgtgagaacccacaccagagagaagaagttcacctgcctgctgtgcagcaagagattcaccagaagcgaccacctgagcaagcaccagagaacccacggcgagcccggccccggccccccccccagcggccccaaggagctgggcgagggcagaagcaccggcgaggaggaggccagccagacccccagacccagcgccagccccgccacccccgagaaggcccccggcggcagccccgagcagagcaacctgctggagatctag

SEQ ID NO: 100417 - DNA, 1296 bp, synthetic construct; identical to SEQ ID NO: 100416
  misc_feature 1..1296: note = Description of Artificial Sequence: Synthetic coding sequence
  source 1..1296: mol_type = other DNA

SEQ ID NO: 100418 - DNA, 1242 bp, synthetic construct
  misc_feature 1..1242: note = Description of Artificial Sequence: Synthetic coding sequence
  source 1..1242: mol_type = other DNA
atgctgaccgccgcctgcagcaagttcggcggcagcagccccctgagagacagcaccaccctgggcaaggccggcaccaagaagccctacagcgtgggcagcgacctgagcgccagcaagaccatgggcgacgcctaccccgcccccttcaccagcaccaacggcctgctgagccccgccggcagcccccccgcccccaccagcggctacgccaacgactacccccccttcagccacagcttccccggccccaccggcacccaggaccccggcctgctggtgcccaagggccacagcagcagcgactgcctgcccagcgtgtacaccagcctggacatgacccacccctacggcagctggtacaaggccggcatccacgccggcatcagccccggccccggcaacacccccaccccctggtgggacatgcaccccggcggcaactggctgggcggcggccagggccagggcgacggcctgcagggcaccctgcccaccggccccgcccagccccccctgaacccccagctgcccacctaccccagcgacttcgcccccctgaaccccgccccctaccccgccccccacctgctgcagcccggcccccagcacgtgctgccccaggacgtgtacaagcccaaggccgtgggcaacagcggccagctggagggcagcggcggcgccaagccccccagaggcgccagcaccggcggcagcggcggctacggcggcagcggcgccggcagaagcagctgcgactgccccaactgccaggagctggagagactgggcgccgccgccgccggcctgagaaagaagcccatccacagctgccacatccccggctgcggcaaggtgtacggcaaggccagccacctgaaggcccacctgagatggcacaccggcgagagacccttcgtgtgcaactggctgttctgcggcaagagattcaccagaagcgacgagctggagagacacgtgagaacccacaccagagagaagaagttcacctgcctgctgtgcagcaagagattcaccagaagcgaccacctgagcaagcaccagagaacccacggcgagcccggccccggccccccccccagcggccccaaggagctgggcgagggcagaagcaccggcgaggaggaggccagccagacccccagacccagcgccagccccgccacccccgagaaggcccccggcggcagccccgagcagagcaacctgctggagatctag

SEQ ID NO: 100419 - DNA, 1401 bp, synthetic construct
  misc_feature 1..1401: note = Description of Artificial Sequence: Synthetic coding sequence
  source 1..1401: mol_type = other DNA
atggccaccagcctgctgggcgaggagcccagactgggcagcacccccctggccatgctggccgccacctgcaacaagatcggcagccccagccccagccccagcagcctgagcgacagcagcagcagcttcggcaagggcttccacccctggaagagaagcagcagcagcagcagcgccagctgcaacgtggtgggcagcagcctgagcagcttcggcgtgagcggcgccagcagaaacggcggcagcagcagcgccgccgccgccgccgccgccgccgccgccgccgccgccgccctggtgagcgacagcttcagctgcggcggcagccccggcagcagcgccttcagcctgaccagcagcggcggcagcagcgcccacagccaggacggcagccaccagcccgtgttcatcagcaaggtgcacaccagcgtggacggcctgcagggcatctaccccagagtgggcatggcccacccctacgagagctggttcaagcccagccaccccggcctgggcgccgccggcgaggtgggcagcgccggcgccagcagctggtgggacgtgggcgccggctggatcgacgtgcagaaccccaacagcgccgccgccctgcccggcagcctgcaccccgccgccggcggcctgcagaccagcctgcacagccccctgggcggctacaacagcgactacagcggcctgagccacagcgccttcagcagcggcgccagcagccacctgctgagccccgccggccagcacctgatggacggcttcaagcccgtgctgcccggcagctaccccgacagcgcccccagccccctggccggcgccggcggcagcatgctgagcgccggccccagcgcccccctgggcggcagccccagaagcagcgccagaagatacagcggcagagccacctgcgactgccccaactgccaggaggccgagagactgggccccgccggcgccagcctgagaagaaagggcctgcacagctgccacatccccggctgcggcaaggtgtacggcaagaccagccacctgaaggcccacctgagatggcacaccggcgagagacccttcgtgtgcaactggctgttctgcggcaagagattcaccagaagcgacgagctgcagagacacctgagaacccacaccggcgagaagagattcgcctgccccgtgtgcaacaagagattcatgagaagcgaccacctgagcaagcacgtgaagacccacagcggcggcggcggcggcggcggcagcgccggcagcggcagcggcggcaagaagggcagcgacaccgacagcgagcacagcgccgccggcagccccccctgccacagccccgagctgctgcagccccccgagcccggccacagaaacggcctggagtag

SEQ ID NO: 100420 - DNA, 1473 bp, synthetic construct
  misc_feature 1..1473: note = Description of Artificial Sequence: Synthetic coding sequence
  source 1..1473: mol_type = other DNA
atgctggccgccacctgcaacaagatcggcagccccagccccagccccagcagcctgagcgacagcagcagcagcttcggcaagggcttccacccctggaagagaagcagcagcagcagcagcgccagctgcaacgtggtgggcagcagcctgagcagcttcggcgtgagcggcgccagcagaaacggcggcagcagcagcgccgccgccgccgccgccgccgccgccgccgccgccgccgccctggtgagcgacagcttcagctgcggcggcagccccggcagcagcgccttcagcctgaccagcagcagcgccgccgccgccgccgccgccgccgccgccgccgccagcagcagccccttcgccaacgactacagcgtgttccaggcccccggcgtgagcggcggcagcggcggcggcggcggcggcggcggcggcggcagcagcgcccacagccaggacggcagccaccagcccgtgttcatcagcaaggtgcacaccagcgtggacggcctgcagggcatctaccccagagtgggcatggcccacccctacgagagctggttcaagcccagccaccccggcctgggcgccgccggcgaggtgggcagcgccggcgccagcagctggtgggacgtgggcgccggctggatcgacgtgcagaaccccaacagcgccgccgccctgcccggcagcctgcaccccgccgccggcggcctgcagaccagcctgcacagccccctgggcggctacaacagcgactacagcggcctgagccacagcgccttcagcagcggcgccagcagccacctgctgagccccgccggccagcacctgatggacggcttcaagcccgtgctgcccggcagctaccccgacagcgcccccagccccctggccggcgccggcggcagcatgctgagcgccggccccagcgcccccctgggcggcagccccagaagcagcgccagaagatacagcggcagagccacctgcgactgccccaactgccaggaggccgagagactgggccccgccggcgccagcctgagaagaaagggcctgcacagctgccacatccccggctgcggcaaggtgtacggcaagaccagccacctgaaggcccacctgagatggcacaccggcgagagacccttcgtgtgcaactggctgttctgcggcaagagattcaccagaagcgacgagctgcagagacacctgagaacccacaccggcgagaagagattcgcctgccccgtgtgcaacaagagattcatgagaagcgaccacctgagcaagcacgtgaagacccacagcggcggcggcggcggcggcggcagcgccggcagcggcagcggcggcaagaagggcagcgacaccgacagcgagcacagcgccgccggcagccccccctgccacagccccgagctgctgcagccccccgagcccggccacagaaacggcctggagtag

SEQ ID NO: 100421 - DNA, 1527 bp, synthetic construct
  misc_feature 1..1527: note = Description of Artificial Sequence: Synthetic coding sequence
  source 1..1527: mol_type = other DNA
atggccaccagcctgctgggcgaggagcccagactgggcagcacccccctggccatgctggccgccacctgcaacaagatcggcagccccagccccagccccagcagcctgagcgacagcagcagcagcttcggcaagggcttccacccctggaagagaagcagcagcagcagcagcgccagctgcaacgtggtgggcagcagcctgagcagcttcggcgtgagcggcgccagcagaaacggcggcagcagcagcgccgccgccgccgccgccgccgccgccgccgccgccgccgccctggtgagcgacagcttcagctgcggcggcagccccggcagcagcgccttcagcctgaccagcagcagcgccgccgccgccgccgccgccgccgccgccgccgccagcagcagccccttcgccaacgactacagcgtgttccaggcccccggcgtgagcggcggcagcggcggcggcggcggcggcggcggcggcggcagcagcgcccacagccaggacggcagccaccagcccgtgttcatcagcaaggtgcacaccagcgtggacggcctgcagggcatctaccccagagtgggcatggcccacccctacgagagctggttcaagcccagccaccccggcctgggcgccgccggcgaggtgggcagcgccggcgccagcagctggtgggacgtgggcgccggctggatcgacgtgcagaaccccaacagcgccgccgccctgcccggcagcctgcaccccgccgccggcggcctgcagaccagcctgcacagccccctgggcggctacaacagcgactacagcggcctgagccacagcgccttcagcagcggcgccagcagccacctgctgagccccgccggccagcacctgatggacggcttcaagcccgtgctgcccggcagctaccccgacagcgcccccagccccctggccggcgccggcggcagcatgctgagcgccggccccagcgcccccctgggcggcagccccagaagcagcgccagaagatacagcggcagagccacctgcgactgccccaactgccaggaggccgagagactgggccccgccggcgccagcctgagaagaaagggcctgcacagctgccacatccccggctgcggcaaggtgtacggcaagaccagccacctgaaggcccacctgagatggcacaccggcgagagacccttcgtgtgcaactggctgttctgcggcaagagattcaccagaagcgacgagctgcagagacacctgagaacccacaccggcgagaagagattcgcctgccccgtgtgcaacaagagattcatgagaagcgaccacctgagcaagcacgtgaagacccacagcggcggcggcggcggcggcggcagcgccggcagcggcagcggcggcaagaagggcagcgacaccgacagcgagcacagcgccgccggcagccccccctgccacagccccgagctgctgcagccccccgagcccggccacagaaacggcctggagtag

SEQ ID NO: 100422 - DNA, 294 bp, synthetic construct
  misc_feature 1..294: note = Description of Artificial Sequence: Synthetic coding sequence
  source 1..294: mol_type = other DNA
atggacaagcagagcagcgccggcggcgtgaagagaagcgtgccctgcgacagcaacgaggccaacgagatgatgcccgagacccccaccggcgacagcgacccccagcccgcccccaagaagatgaagaccagcgagagcagcaccatcctggtggtgagatacagaagaaacttcaagagaaccagccccgaggagctgctgaacgaccacgccagagagaacagaatcaaccccctgcagatggaggaggaggagttcatggagatcatggtggagatccccgccaagtag

SEQ ID NO: 100423 - DNA, 294 bp, synthetic construct
  misc_feature 1..294: note = Description of Artificial Sequence: Synthetic coding sequence
  source 1..294: mol_type = other DNA
atggacaagcagagcagcgccggcggcgtgaagagaagcgtgccctgcgagagcaacgaggtgaacgagaccatgcccgagacccccaccggcgacagcgacccccagcccgcccccaagaagatgaagaccagcgagagcagcaccatcctggtggtgagatacagaagaaacgtgaagagaaccagccccgaggagctgctgaacgaccacgccagagagaacagaatcaaccccctgcagatggaggaggaggagttcatggagatcatggtggagatccccgccaagtag

SEQ ID NO: 100424 - DNA, 1308 bp, synthetic construct
  misc_feature 1..1308: note = Description of Artificial Sequence: Synthetic coding sequence
  source 1..1308: mol_type = other DNA
atgctgcccgccagatgcgccagactgctgaccccccacctgctgctggtgctggtgcagctgagccccgccagaggccacagaaccaccggccccagattcctgatcagcgacagagacccccagtgcaacctgcactgcagcagaacccagcccaagcccatctgcgccagcgacggcagaagctacgagagcatgtgcgagtaccagagagccaagtgcagagaccccaccctgggcgtggtgcacagaggcagatgcaaggacgccggccagagcaagtgcagactggagagagcccaggccctggagcaggccaagaagccccaggaggccgtgttcgtgcccgagtgcggcgaggacggcagcttcacccaggtgcagtgccacacctacaccggctactgctggtgcgtgacccccgacggcaagcccatcagcggcagcagcgtgcagaacaagacccccgtgtgcagcggcagcgtgaccgacaagcccctgagccagggcaacagcggcagaaaggacgacggcagcaagcccacccccaccatggagacccagcccgtgttcgacggcgacgagatcaccgcccccaccctgtggatcaagcacctggtgatcaaggacagcaagctgaacaacaccaacatcagaaacagcgagaaggtgtacagctgcgaccaggagagacagagcgccctggaggaggcccagcagaaccccagagagggcatcgtgatccccgagtgcgcccccggcggcctgtacaagcccgtgcagtgccaccagagcaccggctactgctggtgcgtgctggtggacaccggcagacccctgcccggcaccagcaccagatacgtgatgcccagctgcgagagcgacgccagagccaagaccaccgaggccgacgaccccttcaaggacagagagctgcccggctgccccgagggcaagaagatggagttcatcaccagcctgctggacgccctgaccaccgacatggtgcaggccatcaacagcgccgcccccaccggcggcggcagattcagcgagcccgaccccagccacaccctggaggagagagtggtgcactggtacttcagccagctggacagcaacagcagcaacgacatcaacaagagagagatgaagcccttcaagagatacgtgaagaagaaggccaagcccaagaagtgcgccagaagattcaccgactactgcgacctgaacaaggacaaggtgatcagcctgcccgagctgaagggctgcctgggcgtgagcaaggaggtgggcagactggtgtag

SEQ ID NO: 100425 - DNA, 1305 bp, synthetic construct
  misc_feature 1..1305: note = Description of Artificial Sequence: Synthetic coding sequence
  source 1..1305: mol_type = other DNA
atgctgcccgccagatgcgccagactgctgaccccccacctgctgctggtgctggtgcagctgagccccgccagaggccacagaaccaccggccccagattcctgatcagcgacagagacccccagtgcaacctgcactgcagcagaacccagcccaagcccatctgcgccagcgacggcagaagctacgagagcatgtgcgagtaccagagagccaagtgcagagaccccaccctgggcgtggtgcacagaggcagatgcaaggacgccggccagagcaagtgcagactggagagagcccaggccctggagcaggccaagaagccccaggaggccgtgttcgtgcccgagtgcggcgaggacggcagcttcacccaggtgcagtgccacacctacaccggctactgctggtgcgtgacccccgacggcaagcccatcagcggcagcagcgtgcagaacaagacccccgtgtgcagcggcagcgtgaccgacaagcccctgagccagggcaacagcggcagaaaggacgacggcagcaagcccacccccaccatggagacccagcccgtgttcgacggcgacgagatcaccgcccccaccctgtggatcaagcacctggtgatcaaggacagcaagctgaacaacaccaacatcagaaacagcgagaaggtgtacagctgcgaccaggagagacagagcgccctggaggaggcccagcagaaccccagagagggcatcgtgatccccgagtgcgcccccggcggcctgtacaagcccgtgcagtgccaccagagcaccggctactgctggtgcgtgctggtggacaccggcagacccctgcccggcaccagcaccagatacgtgatgcccagctgcgagagcgacgccagagccaagaccaccgaggccgacgaccccttcaaggacagagagctgcccggctgccccgagggcaagaagatggagttcatcaccagcctgctggacgccctgaccaccgacatggtgcaggccatcaacagcgccgcccccaccggcggcggcagattcagcgagcccgaccccagccacaccctggaggagagagtggtgcactggtacttcagccagctggacagcaacagcagcaacgacatcaacaagagagagatgaagcccttcaagagatacgtgaagaagaaggccaagcccaagaagtgcgccagaagattcaccgactactgcgacctgaacaaggacaaggtgatcagcctgcccgagctgaagggctgcctgggcgtgagcaaggagggcagactggtgtag

SEQ ID NO: 100426 - DNA, 1374 bp, synthetic construct
  misc_feature 1..1374: note = Description of Artificial Sequence: Synthetic coding sequence
  source 1..1374: mol_type = other DNA
atgctgctgccccagctgtgctggctgcccctgctggccggcctgctgccccccgtgcccgcccagaagttcagcgccctgaccttcctgagagtggaccaggacaaggacaaggactgcagcctggactgcgccggcagcccccagaagcccctgtgcgccagcgacggcagaaccttcctgagcagatgcgagttccagagagccaagtgcaaggacccccagctggagatcgcctacagaggcaactgcaaggacgtgagcagatgcgtggccgagagaaagtacacccaggagcaggccagaaaggagttccagcaggtgttcatccccgagtgcaacgacgacggcacctacagccaggtgcagtgccacagctacaccggctactgctggtgcgtgacccccaacggcagacccatcagcggcaccgccgtggcccacaagacccccagatgccccggcagcgtgaacgagaagctgccccagagagagggcaccggcaagaccgtgagcctgcagatcttcagcgtgctgaacagcgacgacgccgccgcccccgccctggagacccagccccagggcgacgaggaggacatcgccagcagataccccaccctgtggaccgagcaggtgaagagcagacagaacaagaccaacaagaacagcgtgagcagctgcgaccaggagcaccagagcgccctggaggaggccaagcagcccaagaacgacaacgtggtgatccccgagtgcgcccacggcggcctgtacaagcccgtgcagtgccaccccagcaccggctactgctggtgcgtgctggtggacaccggcagacccatccccggcaccagcaccagatacgagcagcccaagtgcgacaacaccgccagagcccaccccgccaaggccagagacctgtacaagggcagacagctgcagggctgccccggcgccaagaagcacgagttcctgaccagcgtgctggacgccctgagcaccgacatggtgcacgccgccagcgaccccagcagcagcagcggcagactgagcgagcccgaccccagccacaccctggaggagagagtggtgcactggtacttcaagctgctggacaagaacagcagcggcgacatcggcaagaaggagatcaagcccttcaagagattcctgagaaagaagagcaagcccaagaagtgcgtgaagaagttcgtggagtactgcgacgtgaacaacgacaagagcatcagcgtgcaggagctgatgggctgcctgggcgtggccaaggaggacggcaaggccgacaccaagaagagacacacccccagaggccacgccgagagcaccagcaacagacagcccagaaagcagggctag

SEQ ID NO: 100427 - DNA, 1341 bp, synthetic construct
  misc_feature 1..1341: note = Description of Artificial Sequence: Synthetic coding sequence
  source 1..1341: mol_type = other DNA
atgctgctgccccagctgtgctggctgcccctgctggccggcctgctgccccccgtgcccgcccagaagttcagcgccctgaccttcctgagagtggaccaggacaaggacaaggactgcagcctggactgcgccggcagcccccagaagcccctgtgcgccagcgacggcagaaccttcctgagcagatgcgagttccagagagccaagtgcaaggacccccagctggagatcgcctacagaggcaactgcaaggacgtgagcagatgcgtggccgagagaaagtacacccaggagcaggccagaaaggagttccagcaggtgttcatccccgagtgcaacgacgacggcacctacagccaggtgcagtgccacagctacaccggctactgctggtgcgtgacccccaacggcagacccatcagcggcaccgccgtggcccacaagacccccagatgccccggcagcgtgaacgagaagctgccccagagagagggcaccggcaagaccgacgacgccgccgcccccgccctggagacccagccccagggcgacgaggaggacatcgccagcagataccccaccctgtggaccgagcaggtgaagagcagacagaacaagaccaacaagaacagcgtgagcagctgcgaccaggagcaccagagcgccctggaggaggccaagcagcccaagaacgacaacgtggtgatccccgagtgcgcccacggcggcctgtacaagcccgtgcagtgccaccccagcaccggctactgctggtgcgtgctggtggacaccggcagacccatccccggcaccagcaccagatacgagcagcccaagtgcgacaacaccgccagagcccaccccgccaaggccagagacctgtacaagggcagacagctgcagggctgccccggcgccaagaagcacgagttcctgaccagcgtgctggacgccctgagcaccgacatggtgcacgccgccagcgaccccagcagcagcagcggcagactgagcgagcccgaccccagccacaccctggaggagagagtggtgcactggtacttcaagctgctggacaagaacagcagcggcgacatcggcaagaaggagatcaagcccttcaagagattcctgagaaagaagagcaagcccaagaagtgcgtgaagaagttcgtggagtactgcgacgtgaacaacgacaagagcatcagcgtgcaggagctgatgggctgcctgggcgtggccaaggaggacggcaaggccgacaccaagaagagacacacccccagaggccacgccgagagcaccagcaacagacagcccagaaagcagggctag

SEQ ID NO: 100428 - DNA, 1347 bp, synthetic construct
  misc_feature 1..1347: note = Description of Artificial Sequence: Synthetic coding sequence
  source 1..1347: mol_type = other DNA
atgctgctgccccagctgtgctggctgcccctgctggccggcctgctgccccccgtgcccgcccagaagttcagcgccctgaccttcctgagagtggaccaggacaaggacaaggactgcagcctggactgcgccggcagcccccagaagcccctgtgcgccagcgacggcagaaccttcctgagcagatgcgagttccagagagccaagtgcaaggacccccagctggagatcgcctacagaggcaactgcaaggacgtgagcagatgcgtggccgagagaaagtacacccaggagcaggccagaaaggagttccagcaggtgttcatccccgagtgcaacgacgacggcacctacagccaggtgcagtgccacagctacaccggctactgctggtgcgtgacccccaacggcagacccatcagcggcaccgccgtggcccacaagacccccagatgccccggcagcgtgaacgagaagctgccccagagagagggcaccggcaagaccgacgacgccgccgcccccgccctggagacccagccccagggcgacgaggaggacatcgccagcagataccccaccctgtggaccgagcaggtgaagagcagacagaacaagaccaacaagaacagcgtgagcagctgcgaccaggagcaccagagcgccctggaggaggccaagcagcccaagaacgacaacgtggtgatccccgagtgcgcccacggcggcctgtacaagcccgtgcagtgccaccccagcaccggctactgctggtgcgtgctggtggacaccggcagacccatccccggcaccagcaccagatacgagcagcccaagtgcgacaacaccgccagagcccaccccgccaaggccagagacctgtacaagggcagacagctgcagggctgccccggcgccaagaagcacgagttcctgaccagcgtgctggacgccctgagcaccgacatggtgcacgccgccagcgaccccagcagcagcagcggcagactgagcgagcccgaccccagccacaccctggaggagagagtggtgcactggtacttcaagctgctggacaagaacagcagcggcgacatcggcaagaaggagatcaagcccttcaagagattcctgagaaagaagagcaagcccaagaagtgcgtgaagaagttcgtggagtactgcgacgtgaacaacgacaagagcatcagcgtgcaggagctgatgggctgcctgggcgtggccaaggaggacggcaaggccgacaccaagaagagacacacccccagaggccacgccgagagcaccagcaacagacaggagaaccccagaaaggagggctag

SEQ ID NO: 100429 - DNA, 255 bp, synthetic construct
  misc_feature 1..255: note = Description of Artificial Sequence: Synthetic coding sequence
  source 1..255: mol_type = other DNA
aagaagagcaagcccaagaagtgcgtgaagaagttcgtggagtactgcgacgtgaacaacgacaagagcatcagcgtgcaggagctgatgggctgcctgggcgtggccaaggaggacggcaaggccgacaccaagaagagacacacccccagaggccacgccgagagcaccagcaacagacaggacgccatggtggtgagcagcagacccaaggccaccacccacagaaagagcagaaccctgagcagaagatag

SEQ ID NO: 100430 - DNA, 1275 bp, synthetic construct
  misc_feature 1..1275: note = Description of Artificial Sequence: Synthetic coding sequence
  source 1..1275: mol_type = other DNA
atgagagcccccggctgcggcagactggtgctgcccctgctgctgctggccgccgccgccctggccgagggcgacgccaagggcctgaaggagggcgagacccccggcaacttcatggaggacgagcagtggctgagcagcatcagccagtacagcggcaagatcaagcactggaacagattcagagacgaggtggaggacgactacatcaagagctgggaggacaaccagcagggcgacgaggccctggacaccaccaaggacccctgccagaaggtgaagtgcagcagacacaaggtgtgcatcgcccagggctaccagagagccatgtgcatcagcagaaagaagctggagcacagaatcaagcagcccaccgtgaagctgcacggcaacaaggacagcatctgcaagccctgccacatggcccagctggccagcgtgtgcggcagcgacggccacacctacagcagcgtgtgcaagctggagcagcaggcctgcctgagcagcaagcagctggccgtgagatgcgagggcccctgcccctgccccaccgagcaggccgccaccagcaccgccgacggcaagcccgagacctgcaccggccaggacctggccgacctgggcgacagactgagagactggttccagctgctgcacgagaacagcaagcagaacggcagcgccagcagcgtggccggccccgccagcggcctggacaagagcctgggcgccagctgcaaggacagcatcggctggatgttcagcaagctggacaccagcgccgacctgttcctggaccagaccgagctggccgccatcaacctggacaagtacgaggtgtgcatcagacccttcttcaacagctgcgacacctacaaggacggcagagtgagcaccgccgagtggtgcttctgcttctggagagagaagcccccctgcctggccgagctggagagaatccagatccaggaggccgccaagaagaagcccggcatcttcatccccagctgcgacgaggacggctactacagaaagatgcagtgcgaccagagcagcggcgactgctggtgcgtggaccagctgggcctggagctgaccggcaccagaacccacggcagccccgactgcgacgacatcgtgggcttcagcggcgacttcggcagcggcgtgggctgggaggacgaggaggagaaggagaccgaggaggccggcgaggaggccgaggaggaggagggcgaggccggcgaggccgacgacggcggctacatctggtag

SEQ ID NO: 100431 - DNA, 1266 bp, synthetic construct
  misc_feature 1..1266: note = Description of Artificial Sequence: Synthetic coding sequence
  source 1..1266: mol_type = other DNA
atgagagcccccggctgcggcagactggtgctgcccctgctgctgctggccgccgccgccctggccgagggcgacgccaagggcctgaaggagggcgagacccccggcaacttcatggaggacgagcagtggctgagcagcatcagccagtacagcggcaagatcaagcactggaacagattcagagacgacgactacatcaagagctgggaggacaaccagcagggcgacgaggccctggacaccaccaaggacccctgccagaaggtgaagtgcagcagacacaaggtgtgcatcgcccagggctaccagagagccatgtgcatcagcagaaagaagctggagcacagaatcaagcagcccaccgtgaagctgcacggcaacaaggacagcatctgcaagccctgccacatggcccagctggccagcgtgtgcggcagcgacggccacacctacagcagcgtgtgcaagctggagcagcaggcctgcctgagcagcaagcagctggccgtgagatgcgagggcccctgcccctgccccaccgagcaggccgccaccagcaccgccgacggcaagcccgagacctgcaccggccaggacctggccgacctgggcgacagactgagagactggttccagctgctgcacgagaacagcaagcagaacggcagcgccagcagcgtggccggccccgccagcggcctggacaagagcctgggcgccagctgcaaggacagcatcggctggatgttcagcaagctggacaccagcgccgacctgttcctggaccagaccgagctggccgccatcaacctggacaagtacgaggtgtgcatcagacccttcttcaacagctgcgacacctacaaggacggcagagtgagcaccgccgagtggtgcttctgcttctggagagagaagcccccctgcctggccgagctggagagaatccagatccaggaggccgccaagaagaagcccggcatcttcatccccagctgcgacgaggacggctactacagaaagatgcagtgcgaccagagcagcggcgactgctggtgcgtggaccagctgggcctggagctgaccggcaccagaacccacggcagccccgactgcgacgacatcgtgggcttcagcggcgacttcggcagcggcgtgggctgggaggacgaggaggagaaggagaccgaggaggccggcgaggaggccgaggaggaggagggcgaggccggcgaggccgacgacggcggctacatctggtag

SEQ ID NO: 100432 - DNA, 234 bp, synthetic construct
  misc_feature 1..234: note = Description of Artificial Sequence: Synthetic coding sequence
  source 1..234: mol_type = other DNA
atgagagcccccggctgcggcagactggtgctgcccctgctgctgctggccgccgccgccctggccgagggcgacgccaagggcctgaaggagggcgagacccccggcaacttcatggaggacgagcagtggctgagcagcatcagccagtacagcggcaagatcaagcactggaacagattcagagacgtgcccagcagcgacccccccagcaccacccaggccaccccctag

SEQ ID NO: 100433 - DNA, 1275 bp, synthetic construct
  misc_feature 1..1275: note = Description of Artificial Sequence: Synthetic coding sequence
  source 1..1275: mol_type = other DNA
atgagagcccccggctgcggcagactggtgctgcccctgctgctgctggccgccgccgccctggccgagggcgacgccaagggcctgaaggagggcgagacccccggcaacttcatggaggacgagcagtggctgagcagcatcagccagtacagcggcaagatcaagcactggaacagattcagagacggcatcgaggacgactacatcaagagctgggaggacaaccagcagggcgacgaggccctggacaccaccaaggacccctgccagaaggtgaagtgcagcagacacaaggtgtgcatcgcccagggctaccagagagccatgtgcatcagcagaaagaagctggagcacagaatcaagcagcccaccgtgaagctgcacggcaacaaggacagcatctgcaagccctgccacatggcccagctggccagcgtgtgcggcagcgacggccacacctacagcagcgtgtgcaagctggagcagcaggcctgcctgagcagcaagcagctggccgtgagatgcgagggcccctgcccctgccccaccgagcaggccgccaccagcaccgccgacggcaagcccgagacctgcaccggccaggacctggccgacctgggcgacagactgagagactggttccagctgctgcacgagaacagcaagcagaacggcagcgccagcagcgtggccggccccgccagcggcctggacaagagcctgggcgccagctgcaaggacagcatcggctggatgttcagcaagctggacaccagcgccgacctgttcctggaccagaccgagctggccgccatcaacctggacaagtacgaggtgtgcatcagacccttcttcaacagctgcgacacctacaaggacggcagagtgagcaccgccgagtggtgcttctgcttctggagagagaagcccccctgcctggccgagctggagagaatccagatccaggaggccgccaagaagaagcccggcatcttcatccccagctgcgacgaggacggctactacagaaagatgcagtgcgaccagagcagcggcgactgctggtgcgtggaccagctgggcctggagctgaccggcaccagaacccacggcagccccgactgcgacgacatcgtgggcttcagcggcgacttcggcagcggcgtgggctgggaggacgaggaggagaaggagaccgaggaggccggcgaggaggccgaggaggaggagggcgaggccggcgaggccgacgacggcggctacatctggtag

SEQ ID NO: 100434 - DNA, 1311 bp, synthetic construct
  misc_feature 1..1311: note = Description of Artificial Sequence: Synthetic coding sequence
  source 1..1311: mol_type = other DNA
atgctgaaggtgagcgccgtgctgtgcgtgtgcgccgccgcctggtgcagccagagcctggccgccgccgccgccgtggccgccgccggcggcagaagcgacggcggcaacttcctggacgacaagcagtggctgaccaccatcagccagtacgacaaggaggtgggccagtggaacaagttcagagacgaggtggaggacgactacttcagaacctggagccccggcaagcccttcgaccaggccctggaccccgccaaggacccctgcctgaagatgaagtgcagcagacacaaggtgtgcatcgcccaggacagccagaccgccgtgtgcatcagccacagaagactgacccacagaatgaaggaggccggcgtggaccacagacagtggagaggccccatcctgagcacctgcaagcagtgccccgtggtgtaccccagccccgtgtgcggcagcgacggccacacctacagcttccagtgcaagctggagtaccaggcctgcgtgctgggcaagcagatcagcgtgaagtgcgagggccactgcccctgccccagcgacaagcccaccagcaccagcagaaacgtgaagagagcctgcagcgacctggagttcagagaggtggccaacagactgagagactggttcaaggccctgcacgagagcggcagccagaacaagaagaccaagaccctgctgagacccgagagaagcagattcgacaccagcatcctgcccatctgcaaggacagcctgggctggatgttcaacagactggacaccaactacgacctgctgctggaccagagcgagctgagaagcatctacctggacaagaacgagcagtgcaccaaggccttcttcaacagctgcgacacctacaaggacagcctgatcagcaacaacgagtggtgctactgcttccagagacagcaggaccccccctgccagaccgagctgagcaacatccagaagagacagggcgtgaagaagctgctgggccagtacatccccctgtgcgacgaggacggctactacaagcccacccagtgccacggcagcgtgggccagtgctggtgcgtggacagatacggcaacgaggtgatgggcagcagaatcaacggcgtggccgactgcgccatcgacttcgagatcagcggcgacttcgccagcggcgacttccacgagtggaccgacgacgaggacgacgaggacgacatcatgaacgacgaggacgagatcgaggacgacgacgaggacgagggcgacgacgacgacggcggcgacgaccacgacgtgtacatctag

SEQ ID NO: 100435 - DNA, 1302 bp, synthetic construct
  misc_feature 1..1302: note = Description of Artificial Sequence: Synthetic coding sequence
  source 1..1302: mol_type = other DNA
atgctgaaggtgagcgccgtgctgtgcgtgtgcgccgccgcctggtgcagccagagcctggccgccgccgccgccgtggccgccgccggcggcagaagcgacggcggcaacttcctggacgacaagcagtggctgaccaccatcagccagtacgacaaggaggtgggccagtggaacaagttcagagacgacgactacttcagaacctggagccccggcaagcccttcgaccaggccctggaccccgccaaggacccctgcctgaagatgaagtgcagcagacacaaggtgtgcatcgcccaggacagccagaccgccgtgtgcatcagccacagaagactgacccacagaatgaaggaggccggcgtggaccacagacagtggagaggccccatcctgagcacctgcaagcagtgccccgtggtgtaccccagccccgtgtgcggcagcgacggccacacctacagcttccagtgcaagctggagtaccaggcctgcgtgctgggcaagcagatcagcgtgaagtgcgagggccactgcccctgccccagcgacaagcccaccagcaccagcagaaacgtgaagagagcctgcagcgacctggagttcagagaggtggccaacagactgagagactggttcaaggccctgcacgagagcggcagccagaacaagaagaccaagaccctgctgagacccgagagaagcagattcgacaccagcatcctgcccatctgcaaggacagcctgggctggatgttcaacagactggacaccaactacgacctgctgctggaccagagcgagctgagaagcatctacctggacaagaacgagcagtgcaccaaggccttcttcaacagctgcgacacctacaaggacagcctgatcagcaacaacgagtggtgctactgcttccagagacagcaggaccccccctgccagaccgagctgagcaacatccagaagagacagggcgtgaagaagctgctgggccagtacatccccctgtgcgacgaggacggctactacaagcccacccagtgccacggcagcgtgggccagtgctggtgcgtggacagatacggcaacgaggtgatgggcagcagaatcaacggcgtggccgactgcgccatcgacttcgagatcagcggcgacttcgccagcggcgacttccacgagtggaccgacgacgaggacgacgaggacgacatcatgaacgacgaggacgagatcgaggacgacgacgaggacgagggcgacgacgacgacggcggcgacgaccacgacgtgtacatctag

SEQ ID NO: 100436 - DNA, 1158 bp, synthetic construct
  misc_feature 1..1158: note = Description of Artificial Sequence: Synthetic coding sequence
  source 1..1158: mol_type = other DNA
atgatcacccaggaccacatccacatgagcagcggcctgagccaggacgactacttcagaacctggagccccggcaagcccttcgaccaggccctggaccccgccaaggacccctgcctgaagatgaagtgcagcagacacaaggtgtgcatcgcccaggacagccagaccgccgtgtgcatcagccacagaagactgacccacagaatgaaggaggccggcgtggaccacagacagtggagaggccccatcctgagcacctgcaagcagtgccccgtggtgtaccccagccccgtgtgcggcagcgacggccacacctacagcttccagtgcaagctggagtaccaggcctgcgtgctgggcaagcagatcagcgtgaagtgcgagggccactgcccctgccccagcgacaagcccaccagcaccagcagaaacgtgaagagagcctgcagcgacctggagttcagagaggtggccaacagactgagagactggttcaaggccctgcacgagagcggcagccagaacaagaagaccaagaccctgctgagacccgagagaagcagattcgacaccagcatcctgcccatctgcaaggacagcctgggctggatgttcaacagactggacaccaactacgacctgctgctggaccagagcgagctgagaagcatctacctggacaagaacgagcagtgcaccaaggccttcttcaacagctgcgacacctacaaggacagcctgatcagcaacaacgagtggtgctactgcttccagagacagcaggaccccccctgccagaccgagctgagcaacatccagaagagacagggcgtgaagaagctgctgggccagtacatccccctgtgcgacgaggacggctactacaagcccacccagtgccacggcagcgtgggccagtgctggtgcgtggacagatacggcaacgaggtgatgggcagcagaatcaacggcgtggccgactgcgccatcgacttcgagatcagcggcgacttcgccagcggcgacttccacgagtggaccgacgacgaggacgacgaggacgacatcatgaacgacgaggacgagatcgaggacgacgacgaggacgagggcgacgacgacgacggcggcgacgaccacgacgtgtacatctag

SEQ ID NO: 100437 - DNA, 1311 bp, synthetic construct; identical to SEQ ID NO: 100434
  misc_feature 1..1311: note = Description of Artificial Sequence: Synthetic coding sequence
  source 1..1311: mol_type = other DNA

SEQ ID NO: 100438 - DNA, 1302 bp, synthetic construct; identical to SEQ ID NO: 100435
  misc_feature 1..1302: note = Description of Artificial Sequence: Synthetic coding sequence
  source 1..1302: mol_type = other DNA

SEQ ID NO: 100439 - DNA, 348 bp, synthetic construct
  misc_feature 1..348: note = Description of Artificial Sequence: Synthetic coding sequence
  source 1..348: mol_type = other DNA
atgctgaaggtgagcgccgtgctgtgcgtgtgcgccgccgcctggtgcagccagagcctggccgccgccgccgccgtggccgccgccggcggcagaagcgacggcggcaacttcctggacgacaagcagtggctgaccaccatcagccagtacgacaaggaggtgggccagtggaacaagttcagagacgaggtggaggacgactacttcagaacctggagccccggcaagcccttcgaccaggccctggaccccgccaaggacccctgcctgaagatgaagtgcagcagacacaaggtgtgcatcgcccaggacagccagaccgccgtgtgcatcagccacagatag

SEQ ID NO: 100440 - DNA, 1311 bp, synthetic construct; identical to SEQ ID NO: 100434
  misc_feature 1..1311: note = Description of Artificial Sequence: Synthetic coding sequence
  source 1..1311: mol_type = other DNA

SEQ ID NO: 100441 - DNA, 486 bp, synthetic construct
  misc_feature 1..486: note = Description of Artificial Sequence: Synthetic coding sequence
  source 1..486: mol_type = other DNA
atgctgaaggtgagcgccgtgctgtgcgtgtgcgccgccgcctggtgcagccagagcctggccgccgccgccgccgtggccgccgccggcggcagaagcgacggcggcaacttcctggacgacaagcagtggctgaccaccatcagccagtacgacaaggaggtgggccagtggaacaagttcagagacgacgactacttcagaacctggagccccggcaagcccttcgaccaggccctggaccccgccaaggacccctgcctgaagatgaagtgcagcagacacaaggtgtgcatcgcccaggacagccagaccgccgtgtgcatcagccacagaagactgacccacagaatgaaggaggccggcgtggaccacagacagtggagaggccccatcctgagcacctgcaagcagtgccccgtggtgtaccccagccccgtgtgcggcagcgacggccacacctacagcttccagtgcaagctgtag

SEQ ID NO: 100442 - DNA, 522 bp, synthetic construct
  misc_feature 1..522: note = Description of Artificial Sequence: Synthetic coding sequence
  source 1..522: mol_type = other DNA
atgctgaaggtgagcgccgtgctgtgcgtgtgcgccgccgcctggtgcagccagagcctggccgccgccgccgccgtggccgccgccggcggcagaagcgacggcggcaacttcctggacgacaagcagtggctgaccaccatcagccagtacgacaaggaggtgggccagtggaacaagttcagagacgacgactacttcagaacctggagccccggcaagcccttcgaccaggcctgcagcgacctggagttcagagaggtggccaacagactgagagactggttcaaggccctgcacgagagcggcagccagaacaagaagaccaagaccctgctgagacccgagagaagcagattcgacaccagcatcctgcccatctgcaaggacagcctgggctggatgttcaacagactggacaccaactacgacctgctgctggaccagagcgagctgagaagcatctacctggacaagaacgagcagtgcaccaaggccttcttcaacagctgcgacacctag

SEQ ID NO: 100443 - DNA, 1182 bp, synthetic construct
  misc_feature 1..1182: note = Description of Artificial Sequence: Synthetic coding sequence
  source 1..1182: mol_type = other DNA
atgctgaaggtgagcgccgtgctgtgcgtgtgcgccgccgcctggtgcagccagagcctggccgccgccgccgccgtggccgccgccggcggcagaagcgacggcggcaacttcctggacgacaagcagtggctgaccaccatcagccagtacgacaaggaggtgggccagtggaacaagttcagagacgacgactacttcagaacctggagccccggcaagcccttcgaccaggccctggaccccgccaaggacccctgcctgaagatgaagtgcagcagacacaaggtgtgcatcgcccaggacagccagaccgccgtgtgcatcagccacagaagactgacccacagaatgaaggaggccggcgtggaccacagacagtggagaggccccatcctgagcacctgcaagcagtgccccgtggtgtaccccagccccgtgtgcggcagcgacggccacacctacagcttccagtgcaagctggagtaccaggcctgcgtgctgggcaagcagatcagcgtgaagtgcgagggccactgcccctgccccagcgacaagcccaccagcaccagcagaaacgtgaagagaggcttcgacaccagcatcctgcccatctgcaaggacagcctgggctggatgttcaacagactggacaccaactacgacctgctgctggaccagagcgagctgagaagcatctacctggacaagaacgagcagtgcaccaaggccttcttcaacagctgcgacacctacaaggacagcctgatcagcaacaacgagtggtgctactgcttccagagacagcaggaccccccctgccagaccgagctgagcaacatccagaagagacagggcgtgaagaagctgctgggccagtacatccccctgtgcgacgaggacggctactacaagcccacccagtgccacggcagcgtgggccagtgctggtgcgtggacagatacggcaacgaggtgatgggcagcagaatcaacggcgtggccgactgcgccatcgacttcgagatcagcggcgacttcgccagcggcgacttccacgagtggaccgacgacgaggacgacgaggacgacatcatgaacgacgaggacgagatcgaggacgacgacgaggacgagggcgacgacgacgacggcggcgacgaccacgacgtgtacatctag

SEQ ID NO: 100444 - DNA, 1302 bp, synthetic construct; identical to SEQ ID NO: 100435
  misc_feature 1..1302: note = Description of Artificial Sequence: Synthetic coding sequence
  source 1..1302: mol_type = other DNA

SEQ ID NO: 100445 - DNA, 1311 bp, synthetic construct; identical to SEQ ID NO: 100434
  misc_feature 1..1311: note = Description of Artificial Sequence: Synthetic coding sequence
  source 1..1311: mol_type = other DNA

SEQ ID NO: 100446 - DNA, 348 bp, synthetic construct; identical to SEQ ID NO: 100439
  misc_feature 1..348: note = Description of Artificial Sequence: Synthetic coding sequence
  source 1..348: mol_type = other DNA

SEQ ID NO: 100447 - DNA, 942 bp, synthetic construct
  misc_feature 1..942: note = Description of Artificial Sequence: Synthetic coding sequence
  source 1..942: mol_type = other DNA
atgctgaaggtgagcgccgtgctgtgcgtgtgcgccgccgcctggtgcagccagagcctggccgccgccgccgccgtggccgccgccggcggcagaagcgacggcggcaacttcctggacgacaagcagtggctgaccaccatcagccagtacgacaaggaggtgggccagtggaacaagttcagagacgacgactacttcagaacctggagccccggcaagcccttcgaccaggccctggaccccgccaaggacccctgcctgaagatgaagtgcagcagacacaaggtgtgcatcgcccaggacagccagaccgccgtgtgcatcagccacagaagactgacccacagaatgaaggaggccggcgtggaccacagacagtggagaggccccatcctgagcacctgcaagcagtgccccgtggtgtaccccagccccgtgtgcggcagcgacggccacacctacagcttccagtgcaagctggagtaccaggcctgcgtgctgggcaagcagatcagcgtgaagtgcgagggccactgcccctgccccagcgacaagcccaccagcaccagcagaaacgtgaagagagcctgcagcgacctggagttcagagaggtggccaacagactgagagactggttcaaggccctgcacgagagcggcagccagaacaagaagaccaagaccctgctgagacccgagagaagcagattcgacaccagcatcctgcccatctgcaaggacagcctgggctggatgttcaacagactggacaccaactacgacctgctgctggaccagagcgagctgagaagcatctacctggacaagaacgagcagtgcaccaaggccttcttcaacagctgcgacacctacaaggacagcctgatcagcaacaacgagtggtgctactgcttccagagacagcagggcaagagatag

SEQ ID NO: 100448 - DNA, 1017 bp, synthetic construct
  misc_feature 1..1017: note = Description of Artificial Sequence: Synthetic coding sequence
  source 1..1017: mol_type = other DNA
atgctgaaggtgagcgccgtgctgtgcgtgtgcgccgccgcctggtgcagccagagcctggccgccgccgccgccgtggccgccgccggcggcagaagcgacggcggcaacttcctggacgacaagcagtggctgaccaccatcagccagtacgacaaggaggtgggccagtggaacaagttcagagactgcaagctggagtaccaggcctgcgtgctgggcaagcagatcagcgtgaagtgcgagggccactgcccctgccccagcgacaagcccaccagcaccagcagaaacgtgaagagagcctgcagcgacctggagttcagagaggtggccaacagactgagagactggttcaaggccctgcacgagagcggcagccagaacaagaagaccaagaccctgctgagacccgagagaagcagattcgacaccagcatcctgcccatctgcaaggacagcctgggctggatgttcaacagactggacaccaactacgacctgctgctggaccagagcgagctgagaagcatctacctggacaagaacgagcagtgcaccaaggccttcttcaacagctgcgacacctacaaggacagcctgatcagcaacaacgagtggtgctactgcttccagagacagcaggaccccccctgccagaccgagctgagcaacatccagaagagacagggcgtgaagaagctgctgggccagtacatccccctgtgcgacgaggacggctactacaagcccacccagtgccacggcagcgtgggccagtgctggtgcgtggacagatacggcaacgaggtgatgggcagcagaatcaacggcgtggccgactgcgccatcgacttcgagatcagcggcgacttcgccagcggcgacttccacgagtggaccgacgacgaggacgacgaggacgacatcatgaacgacgaggacgagatcgaggacgacgacgaggacgagggcgacgacgacgacggcggcgacgaccacgacgtgtacatctag

SEQ ID NO: 100449 - DNA, 1023 bp, synthetic construct
  misc_feature 1..1023: note = Description of Artificial Sequence: Synthetic coding sequence
  source 1..1023: mol_type = other DNA
atgatcaacaacggcagcccccagagcctgagcatgaccagaaagagcgacagcggcaccaacagcgagaccatgaaggaggccggcgtggaccacagacagtggagaggccccatcctgagcacctgcaagcagtgccccgtggtgtaccccagccccgtgtgcggcagcgacggccacacctacagcttccagtgcaagctggagtaccaggcctgcgtgctgggcaagcagatcagcgtgaagtgcgagggccactgcccctgccccagcgacaagcccaccagcaccagcagaaacgtgaagagagcctgcagcgacctggagttcagagaggtggccaacagactgagagactggttcaaggccctgcacgagagcggcagccagaacaagaagaccaagaccctgctgagacccgagagaagcagattcgacaccagcatcctgcccatctgcaaggacagcctgggctggatgttcaacagactggacaccaactacgacctgctgctggaccagagcgagctgagaagcatctacctggacaagaacgagcagtgcaccaaggccttcttcaacagctgcgacacctacaaggacagcctgatcagcaacaacgagtggtgctactgcttccagagacagcaggaccccccctgccagaccgagctgagcaacatccagaagagacagggcgtgaagaagctgctgggccagtacatccccctgtgcgacgaggacggctactacaagcccacccagtgccacggcagcgtgggccagtgctggtgcgtggacagatacggcaacgaggtgatgggcagcagaatcaacggcgtggccgactgcgccatcgacttcgagatcagcggcgacttcgccagcggcgacttccacgagtggaccgacgacgaggacgacgaggacgacatcatgaacgacgaggacgagatcgaggacgacgacgaggacgagggcgacgacgacgacggcggcgacgaccacgacgtgtacatctag

SEQ ID NO: 100450 - DNA, 915 bp, synthetic construct
  misc_feature 1..915: note = Description of Artificial Sequence: Synthetic coding sequence
  source 1..915: mol_type = other DNA
atgaagtgcagcagacacaaggtgtgcatcgcccaggacagccagaccgccgtgtgcatcagccacagaagactgacccacagaatgaaggaggccggcgtggaccacagacagtggagaggccccatcctgagcacctgcaagcagtgccccgtggtgtaccccagccccgtgtgcggcagcgacggccacacctacagcttccagtgcaagctggagtaccaggcctgcgtgctgggcaagcagatcagcgtgaagtgcgagggccactgcccctgccccagcgacaagcccaccagcaccagcagaaacgtgaagagaggcttcgacaccagcatcctgcccatctgcaaggacagcctgggctggatgttcaacagactggacaccaactacgacctgctgctggaccagagcgagctgagaagcatctacctggacaagaacgagcagtgcaccaaggccttcttcaacagctgcgacacctacaaggacagcctgatcagcaacaacgagtggtgctactgcttccagagacagcaggaccccccctgccagaccgagctgagcaacatccagaagagacagggcgtgaagaagctgctgggccagtacatccccctgtgcgacgaggacggctactacaagcccacccagtgccacggcagcgtgggccagtgctggtgcgtggacagatacggcaacgaggtgatgggcagcagaatcaacggcgtggccgactgcgccatcgacttcgagatcagcggcgacttcgccagcggcgacttccacgagtggaccgacgacgaggacgacgaggacgacatcatgaacgacgaggacgagatcgaggacgacgacgaggacgagggcgacgacgacgacggcggcgacgaccacgacgtgtacatctag

SEQ ID NO: 100451 - DNA, 951 bp, synthetic construct
  misc_feature 1..951: note = Description of Artificial Sequence: Synthetic coding sequence
  source 1..951: mol_type = other DNA
atgaaggaggccggcgtggaccacagacagtggagaggccccatcctgagcacctgcaagcagtgccccgtggtgtaccccagccccgtgtgcggcagcgacggccacacctacagcttccagtgcaagctggagtaccaggcctgcgtgctgggcaagcagatcagcgtgaagtgcgagggccactgcccctgccccagcgacaagcccaccagcaccagcagaaacgtgaagagagcctgcagcgacctggagttcagagaggtggccaacagactgagagactggttcaaggccctgcacgagagcggcagccagaacaagaagaccaagaccctgctgagacccgagagaagcagattcgacaccagcatcctgcccatctgcaaggacagcctgggctggatgttcaacagactggacaccaactacgacctgctgctggaccagagcgagctgagaagcatctacctggacaagaacgagcagtgcaccaaggccttcttcaacagctgcgacacctacaaggacagcctgatcagcaacaacgagtggtgctactgcttccagagacagcaggaccccccctgccagaccgagctgagcaacatccagaagagacagggcgtgaagaagctgctgggccagtacatccccctgtgcgacgaggacggctactacaagcccacccagtgccacggcagcgtgggccagtgctggtgcgtggacagatacggcaacgaggtgatgggcagcagaatcaacggcgtggccgactgcgccatcgacttcgagatcagcggcgacttcgccagcggcgacttccacgagtggaccgacgacgaggacgacgaggacgacatcatgaacgacgaggacgagatcgaggacgacgacgaggacgagggcgacgacgacgacggcggcgacgaccacgacgtgtacatctag

SEQ ID NO: 100452 - DNA, 1017 bp, synthetic construct; identical to SEQ ID NO: 100448
  misc_feature 1..1017: note = Description of Artificial Sequence: Synthetic coding sequence
  source 1..1017: mol_type = other DNA

SEQ ID NO: 100453 - DNA, 13740 bp, synthetic construct
  misc_feature 1..13740: note = Description of Artificial Sequence: Synthetic coding sequence
  source 1..13740: mol_type = other DNA
atggagaccaaggagaacagatgggtgcccgtgaccgtgctgcccggctgcgtgggctgcagaaccgtggccgccctggccagctggaccgtgagagacgtgaaggagagaatcttcgccgagaccggcttccccgtgagcgagcagagactgtggagaggcggcagagagctgagcgactggatcaagatcggcgacctgaccagcaagaactgccacctgttcgtgaacctgcagagcaagggcctgaagggcggcggcagattcggccagaccaccccccccctggtggacttcctgaaggacatcctgagaagataccccgagggcggccagatcctgaaggagctgatccagaacgccgaggacgccggcgccaccgaggtgaagttcctgtacgacgagacccagtacggcaccgagaccctgtggagcaaggacatggccccctaccagggccccgccctgtacgtgtacaacaacgccgtgttcacccccgaggactggcacggcatccaggagatcgccagaagcagaaagaaggacgaccccctgaaggtgggcagattcggcatcggcttcaacagcgtgtaccacatcaccgacgtgccctgcatcttcagcggcgaccagatcggcatgctggacccccaccagaccctgttcggcccccacgagagcggccagtgctggaacctgaaggacgacagcaaggagatcagcgagctgagcgaccagttcgcccccttcgtgggcatcttcggcagcaccaaggagaccttcatcaacggcaacttccccggcaccttcttcagattccccctgagactgcagcccagccagctgagcagcaacctgtacaacaagcagaaggtgctggagctgttcgagagcttcagagccgacgccgacaccgtgctgctgttcctgaagagcgtgcaggacgtgagcctgtacgtgagagaggccgacggcaccgagaagctggtgttcagagtgaccagcagcgagagcaaggccctgaagcacgagagacccaacagcatcaagatcctgggcaccgccatcagcaactactgcaagaagacccccagcaacaacatcacctgcgtgacctaccacgtgaacatcgtgctggaggaggagagcaccaaggacgcccagaagaccagctggctggtgtgcaacagcgtgggcggcagaggcatcagcagcaagctggacagcctggccgacgagctgaagttcgtgcccatcatcggcatcgccatgcccctgagcagcagagacgacgaggccaagggcgccaccagcgacttcagcggcaaggccttctgcttcctgcccctgccccccggcgaggagagcagcaccggcctgcccgtgcacatcagcggcttcttcggcctgaccgacaacagaagaagcatcaagtggagagagctggaccagtggagagaccccgccgccctgtggaacgagttcctggtgatgaacgtggtgcccaaggcctacgccaccctgatcctggacagcatcaagagactggagatggagaagagcagcgacttccccctgagcgtggacgtgatctacaagctgtggcccgaggccagcaaggtgaaggtgcactggcagcccgtgctggagcccctgttcagcgagctgctgcagaacgccgtgatctacagcatcagctgcgactgggtgagactggagcaggtgtacttcagcgagctggacgagaacctggagtacaccaagaccgtgctgaactacctgcagagcagcggcaagcagatcgccaaggtgcccggcaacgtggacgccgccgtgcagctgaccgccgccagcggcaccacccccgtgagaaaggtgacccccgcctgggtgagacaggtgctgagaaagtgcgcccacctgggctgcgccgaggagaagctgcacctgctggagttcgtgctgagcgaccaggcctacagcgagctgctgggcctggagctgctgcccctgcagaacggcaacttcgtgcccttcagcagcagcgtgagcgaccaggacgtgatctacatcaccagcgccgagtaccccagaagcctgttccccagcctggagggcagattcatcctggacaacctgaagccccacctggtggccgccctgaaggaggccgcccagaccagaggcagaccctgcacccagctgcagctgctgaaccccgagagattcgccagactgatcaaggaggtgatgaacaccttctggcccggcagagagctgatcgtgcagtggtaccccttcgacgagaacagaaaccaccccagcgtgagctggctgaagatggtgtggaagaacctgtacatccacttcagcgaggacctgaccctgttcgacgagatgcccctgatccccagaaccatcctggaggagggccagacctgcgtggagctgatcagactgagaatccccagcctggtgatcctggacgacgagagcgaggcccagctgcccgagttcctggccgacatcgtgcagaagctgggcggcttcgtgctgaagaagctggacgccagcatccagcaccccctgatcaagaagtacatccacagccccctgcccagcgccgtgctgcagatcatggagaagatgcccctgcagaagctgtgcaaccagatcaccagcctgctgcccacccacaaggacgccctgagaaagttcctggccagcctgaccgacagcagcgagaaggagaagagaatcatccaggagctggccatcttcaagagaatcaaccacagcagcgaccagggcatcagcagctacaccaagctgaagggctgcaaggtgctgcaccacaccgccaagctgcccgccgacctgagactgagcatcagcgtgatcgacagcagcgacgaggccaccatcagactggccaacatgctgaagatcgagcagctgaagaccaccagctgcctgaagctggtgctgaaggacatcgagaacgccttctacagccacgaggaggtgacccagctgatgctgtgggtgctggagaacctgagcagcctgaagaacgagaaccccaacgtgctggagtggctgacccccctgaagttcatccagatcagccaggagcagatggtgagcgccggcgagctgttcgaccccgacatcgaggtgctgaaggacctgttctgcaacgaggagggcacctacttcccccccagcgtgttcaccagccccgacatcctgcacagcctgagacagatcggcctgaagaacgaggccagcctgaaggagaaggacgtggtgcaggtggccaagaagatcgaggccctgcaggtgggcgcctgccccgaccaggacgtgctgctgaagaaggccaagaccctgctgctggtgctgaacaagaaccacaccctgctgcagagcagcgagggcaagatgaccctgaagaagatcaagtgggtgcccgcctgcaaggagagaccccccaactaccccggcagcctggtgtggaagggcgacctgtgcaacctgtgcgccccccccgacatgtgcgacgtgggccacgccatcctgatcggcagcagcctgcccctggtggagagcatccacgtgaacctggagaaggccctgggcatcttcaccaagcccagcctgagcgccgtgctgaagcacttcaagatcgtggtggactggtacagcagcaagaccttcagcgacgaggactactaccagttccagcacatcctgctggagatctacggcttcatgcacgaccacctgaacgagggcaaggacagcttcagagccctgaagttcccctgggtgtggaccggcaagaagttctgccccctggcccaggccgtgatcaagcccatccacgacctggacctgcagccctacctgcacaacgtgcccaagaccatggccaagttccaccagctgttcaaggtgtgcggcagcatcgaggagctgaccagcgaccacatcagcatggtgatccagaagatctacctgaagagcgaccaggacctgagcgagcaggagagcaagcagaacctgcacctgatgctgaacatcatcagatggctgtacagcaaccagatccccgccagccccaacacccccgtgcccatccaccacagcaagaaccccagcaagctgatcatgaagcccatccacgagtgctgctactgcgacatcaaggtggacgacctgaacgacctgctggaggacagcgtggagcccatcatcctggtgcacgaggacatccccatgaagaccgccgagtggctgaaggtgccctgcctgagcaccagactgatcaaccccgagaacatgggcttcgagcagagcggccagagagagcccctgaccgtgagaatcaagaacatcctggaggagtaccccagcgtgagcgacatcttcaaggagctgctgcagaacgccgacgacgccaacgccaccgagtgcagcttcctgatcgacatgagaagaaacatggacatcagagagaacctgctggaccccggcatggccgcctgccacggccccgccctgtggagcttcaacaacagccagttcagcgacagcgacttcgtgaacatcaccagactgggcgagagcctgaagagaggcgaggtggacaaggtgggcaagttcggcctgggcttcaacagcgtgtaccacatcaccgacatccccatcatcatgagcagagagttcatgatcatgttcgaccccaacatcaaccacatcagcaagcacatcaaggacaagagcaaccccggcatcaagatcaactggagcaagcagcagaagagactgagaaagttccccaaccagttcaagcccttcatcgacgtgttcggctgccagctgcccctgaccgtggaggccccctacagctacaacggcaccctgttcagactgagcttcagaacccagcaggaggccaaggtgagcgaggtgagcagcacctgctacaacaccgccgacatctacagcctggtggacgagttcagcctgtgcggccacagactgatcatcttcacccagagcgtgaagagcatgtacctgaagtacctgaagatcgaggagaccaaccccagcctggcccaggacaccgtgatcatcaagaagaagagctgcagcagcaaggccctgaacacccccgtgctgagcgtgctgaaggaggccgccaagctgatgaagacctgcagcagcagcaacaagaagctgcccagcgacgagcccaagagcagctgcatcctgcagatcaccgtggaggagttccaccacgtgttcagaagaatcgccgacctgcagagccccctgttcagaggccccgacgacgaccccgccgccctgttcgagatggccaagagcggccagagcaagaagcccagcgacgagctgagccagaagaccgtggagtgcaccacctggctgctgtgcacctgcatggacaccggcgaggccctgaagttcagcctgagcgagagcggcagaagactgggcctggtgccctgcggcgccgtgggcgtgcagctgagcgagatccaggaccagaagtggaccgtgaagccccacatcggcgaggtgttctgctacctgcccctgagaatcaagaccggcctgcccgtgcacatcaacggctgcttcgccgtgaccagcaacagaaaggagatctggaagaccgacaccaagggcagatggaacaccaccttcatgagacacgtgatcgtgaaggcctacctgcaggtgctgagcgtgctgagagacctggccaccagcggcgagctgatggactacacctactacgccgtgtggcccgaccccgacctggtgcacgacgacttcagcgtgatctgccagggcttctacgaggacatcgcccacggcaagggcaaggagctgaccaaggtgttcagcgacggcagcacctgggtgagcatgaagaacgtgagattcctggacgacagcatcctgaagagaagagacgtgggcagcgccgccttcaagatcttcctgaagtacctgaagaagaccggcagcaagaacctgtgcgccgtggagctgcccagcagcgtgaagctgggcttcgaggaggccggctgcaagcagatcctgctggagaacaccttcagcgagaagcagttcttcagcgaggtgttcttccccaacatccaggagatcgaggccgagctgagagaccccctgatgatcttcgtgctgaacgagaaggtggacgagttcagcggcgtgctgagagtgaccccctgcatcccctgcagcctggagggccaccccctggtgctgcccagcagactgatccaccccgagggcagagtggccaagctgttcgacatcaaggacggcagattcccctacggcagcacccaggactacctgaaccccatcatcctgatcaagctggtgcagctgggcatggccaaggacgacatcctgtgggacgacatgctggagagagccgtgagcgtggccgagatcaacaagagcgaccacgtggccgcctgcctgagaagcagcatcctgctgagcctgatcgacgagaagctgaagatcagagaccccagagccaaggacttcgccgccaagtaccagaccatcagattcctgcccttcctgaccaagcccgccggcttcagcctggactggaagggcaacagcttcaagcccgagaccatgttcgccgccaccgacctgtacaccgccgagcaccaggacatcgtgtgcctgctgcagcccatcctgaacgagaacagccacagcttcagaggctgcggcagcgtgagcctggccgtgaaggagttcctgggcctgctgaagaagcccaccgtggacctggtgatcaaccagctgaaggaggtggccaagagcgtggacgacggcatcaccctgtaccaggagaacatcaccaacgcctgctacaagtacctgcacgaggccctgatgcagaacgagatcaccaagatgagcatcatcgacaagctgaagcccttcagcttcatcctggtggagaacgcctacgtggacagcgagaaggtgagcttccacctgaacttcgaggccgccccctacctgtaccagctgcccaacaagtacaagaacaacttcagagagctgttcgagaccgtgggcgtgagacagagctgcaccgtggaggacttcgccctggtgctggagagcatcgaccaggagagaggcaccaagcagatcaccgaggagaacttccagctgtgcagaagaatcatcagcgagggcatctggagcctgatcagagagaagaagcaggagttctgcgagaagaactacggcaagatcctgctgcccgacaccaacctgatgctgctgcccgccaagagcctgtgctacaacgactgcccctggatcaaggtgaaggacaccaccgtgaagtactgccacgccgacatccccagagaggtggccgtgaagctgggcgccgtgcccaagagacacaaggccctggagagatacgccagcaacgtgtgcttcaccaccctgggcaccgagttcggccagaaggagaagctgaccagcagaatcaagagcatcctgaacgcctaccccagcgagaaggagatgctgaaggagctgctgcagaacgccgacgacgccaaggccaccgagatctgcttcgtgttcgaccccagacagcaccccgtggacagaatcttcgacgacaagtgggcccccctgcagggccccgccctgtgcgtgtacaacaaccagcccttcaccgaggacgacgtgagaggcatccagaacctgggcaagggcaccaaggagggcaacccctacaagaccggccagtacggcatcggcttcaacagcgtgtaccacatcaccgactgccccagcttcatcagcggcaacgacatcctgtgcatcttcgacccccacgccagatacgcccccggcgccaccagcatcagccccggcagaatgttcagagacctggacgccgacttcagaacccagttcagcgacgtgctggacctgtacctgggcacccacttcaagctggacaactgcaccatgttcagattccccctgagaaacgccgagatggccaaggtgagcgagatcagcagcgtgcccgccagcgacagaatggtgcagaacctgctggacaagctgagaagcgacggcgccgagctgctgatgttcctgaaccacatggagaagatcagcatctgcgagatcgacaagagcaccggcgccctgaacgtgctgtacagcgtgaagggcaagatcaccgacggcgacagactgaagagaaagcagttccacgccagcgtgatcgacagcgtgaccaagaagagacagctgaaggacatccccgtgcagcagatcacctacaccatggacaccgaggacagcgagggcaacctgaccacctggctgatctgcaacagaagcggcttcagcagcatggagaaggtgagcaagagcgtgatcagcgcccacaagaaccaggacatcaccctgttccccagaggcggcgtggccgcctgcatcacccacaactacaagaagccccacagagccttctgcttcctgcccctgagcctggagaccggcctgcccttccacgtgaacggccacttcgccctggacagcgccagaagaaacctgtggagagacgacaacggcgtgggcgtgagaagcgactggaacaacagcctgatgaccgccctgatcgcccccgcctacgtggagctgctgatccagctgaagaagagatacttccccggcagcgaccccaccctgagcgtgctgcagaacacccccatccacgtggtgaaggacaccctgaagaagttcctgagcttcttccccgtgaacagactggacctgcagcccgacctgtactgcctggtgaaggccctgtacaactgcatccacgaggacatgaagagactgctgcccgtggtgagagcccccaacatcgacggcagcgacctgcacagcgccgtgatcatcacctggatcaacatgagcaccagcaacaagaccagacccttcttcgacaacctgctgcaggacgagctgcagcacctgaagaacgccgactacaacatcaccaccagaaagaccgtggccgagaacgtgtacagactgaagcacctgctgctggagatcggcttcaacctggtgtacaactgcgacgagaccgccaacctgtaccactgcctgatcgacgccgacatccccgtgagctacgtgacccccgccgacatcagaagcttcctgatgaccttcagcagccccgacaccaactgccacatcggcaagctgccctgcagactgcagcagaccaacctgaagctgttccacagcctgaagctgctggtggactactgcttcaaggacgccgaggagaacgagatcgaggtggagggcctgcccctgctgatcaccctggacagcgtgctgcagaccttcgacgccaagagacccaagttcctgaccacctaccacgagctgatccccagcagaaaggacctgttcatgaacaccctgtacctgaagtacagcaacatcctgctgaactgcaaggtggccaaggtgttcgacatcagcagcttcgccgacctgctgagcagcgtgctgcccagagagtacaagaccaagagctgcaccaagtggaaggacaacttcgccagcgagagctggctgaagaacgcctggcacttcatcagcgagagcgtgagcgtgaaggaggaccaggaggagaccaagcccaccttcgacatcgtggtggacaccctgaaggactgggccctgctgcccggcaccaagttcaccgtgagcgccaaccagctggtggtgcccgagggcgacgtgctgctgcccctgagcctgatgcacatcgccgtgttccccaacgcccagagcgacaaggtgttccacgccctgatgaaggccggctgcatccagctggccctgaacaagatctgcagcaaggacagcgccttcgtgcccctgctgagctgccacaccgccaacatcgagagccccaccagcatcctgaaggccctgcactacatggtgcagaccagcaccttcagagccgagaagctggtggagaacgacttcgaggccctgctgatgtacttcaactgcaacctgaaccacctgatgagccaggacgacatcaagatcctgaagagcctgccctgctacaagagcatcagcggcagatacgtgagcatcggcaagttcggcacctgctacgtgctgaccaagagcatccccagcgccgaggtggagaagtggacccagagcagcagcagcgccttcctggaggagaagatccacctgaaggagctgtacgaggtgatcggctgcgtgcccgtggacgacctggaggtgtacctgaagcacctgctgcccaagatcgagaacctgagctacgacgccaagctggagcacctgatctacctgaagaacagactgagcagcgccgaggagctgagcgagatcaaggagcagctgttcgagaagctggagagcctgctgatcatccacgacgccaacagcagactgaagcaggccaagcacttctacgacagaaccgtgagagtgttcgaggtgatgctgcccgagaagctgttcatccccaacgacttcttcaagaagctggagcagctgatcaagcccaagaaccacgtgaccttcatgaccagctgggtggagttcctgagaaacatcggcctgaagtacatcctgagccagcagcagctgctgcagttcgccaaggagatcagcgtgagagccaacaccgagaactggagcaaggagaccctgcagaacaccgtggacatcctgctgcaccacatcttccaggagagaatggacctgctgagcggcaacttcctgaaggagctgagcctgatccccttcctgtgccccgagagagcccccgccgagttcatcagattccacccccagtaccaggaggtgaacggcaccctgcccctgatcaagttcaacggcgcccaggtgaaccccaagttcaagcagtgcgacgtgctgcagctgctgtggaccagctgccccatcctgcccgagaaggccacccccctgagcatcaaggagcaggagggcagcgacctgggcccccaggagcagctggagcaggtgctgaacatgctgaacgtgaacctggacccccccctggacaaggtgatcaacaactgcagaaacatctgcaacatcaccaccctggacgaggagatggtgaagaccagagccaaggtgctgagaagcatctacgagttcctgagcgccgagaagagagagttcagattccagctgagaggcgtggccttcgtgatggtggaggacggctggaagctgctgaagcccgaggaggtggtgatcaacctggagtacgagagcgacttcaagccctacctgtacaagctgcccctggagctgggcaccttccaccagctgttcaagcacctgggcaccgaggacatcatcagcaccaagcagtacgtggaggtgctgagcagaatcttcaagaacagcgagggcaagcagctggaccccaacgagatgagaaccgtgaagagagtggtgagcggcctgttcagaagcctgcagaacgacagcgtgaaggtgagaagcgacctggagaacgtgagagacctggccctgtacctgcccagccaggacggcagactggtgaagagcagcatcctggtgttcgacgacgccccccactacaagagcagaatccagggcaacatcggcgtgcagatgctggtggacctgagccagtgctacctgggcaaggaccacggcttccacaccaagctgatcatgctgttcccccagaagctgagacccagactgctgagcagcatcctggaggagcagctggacgaggagacccccaaggtgtgccagttcggcgccctgtgcagcctgcagggcagactgcagctgctgctgagcagcgagcagttcatcaccggcctgatcagaatcatgaagcacgagaacgacaacgccttcctggccaacgaggagaaggccatcagactgtgcaaggccctgagagagggcctgaaggtgagctgcttcgagaagctgcagaccaccctgagagtgaagggcttcaaccccatcccccacagcagaagcgagaccttcgccttcctgaagagattcggcaacgccgtgatcctgctgtacatccagcacagcgacagcaaggacatcaacttcctgctggccctggccatgaccctgaagagcgccaccgacaacctgatcagcgacaccagctacctgatcgccatgctgggctgcaacgacatctacagaatcggcgagaagctggacagcctgggcgtgaagtacgacagcagcgagcccagcaagctggagctgcccatgcccggcacccccatccccgccgagatccactacaccctgctgatggaccccatgaacgtgttctaccccggcgagtacgtgggctacctggtggacgccgagggcggcgacatctacggcagctaccagcccacctacacctacgccatcatcgtgcaggaggtggagagagaggacgccgacaacagcagcttcctgggcaagatctaccagatcgacatcggctacagcgagtacaagatcgtgagcagcctggacctgtacaagttcagcagacccgaggagagcagccagagcagagacagcgcccccagcacccccaccagccccaccgagttcctgacccccggcctgagaagcatcccccccctgttcagcggcagagagagccacaagaccagcagcaagcaccagagccccaagaagctgaaggtgaacagcctgcccgagatcctgaaggaggtgaccagcgtggtggagcaggcctggaagctgcccgagagcgagagaaagaagatcatcagaagactgtacctgaagtggcaccccgacaagaaccccgagaaccacgacatcgccaacgaggtgttcaagcacctgcagaacgagatcaacagactggagaagcaggccttcctggaccagaacgccgacagagccagcagaagaaccttcagcaccagcgccagcagattccagagcgacaagtacagcttccagagattctacaccagctggaaccaggaggccaccagccacaagagcgagagacagcagcagaacaaggagaagtgcccccccagcgccggccagacctacagccagagattcttcgtgccccccaccttcaagagcgtgggcaaccccgtggaggccagaagatggctgagacaggccagagccaacttcagcgccgccagaaacgacctgcacaagaacgccaacgagtgggtgtgcttcaagtgctacctgagcaccaagctggccctgatcgccgccgactacgccgtgagaggcaagagcgacaaggacgtgaagcccaccgccctggcccagaagatcgaggagtacagccagcagctggagggcctgaccaacgacgtgcacaccctggaggcctacggcgtggacagcctgaagaccagataccccgacctgctgcccttcccccagatccccaacgacagattcaccagcgaggtggccatgagagtgatggagtgcaccgcctgcatcatcatcaagctggagaacttcatgcagcagaaggtgtag

SEQ ID NO: 100454 - DNA, 13740 bp, synthetic construct; identical to SEQ ID NO: 100453
  misc_feature 1..13740: note = Description of Artificial Sequence: Synthetic coding sequence
  source 1..13740: mol_type = other DNA

SEQ ID NO: 100455 - DNA, 11490 bp, synthetic construct
  misc_feature 1..11490: note = Description of Artificial Sequence: Synthetic coding sequence
  source 1..11490: mol_type = other DNA
atgaacaccttctggcccggcagagagctgatcgtgcagtggtaccccttcgacgagaacagaaaccaccccagcgtgagctggctgaagatggtgtggaagaacctgtacatccacttcagcgaggacctgaccctgttcgacgagatgcccctgatccccagaaccatcctggaggagggccagacctgcgtggagctgatcagactgagaatccccagcctggtgatcctggacgacgagagcgaggcccagctgcccgagttcctggccgacatcgtgcagaagctgggcggcttcgtgctgaagaagctggacgccagcatccagcaccccctgatcaagaagtacatccacagccccctgcccagcgccgtgctgcagatcatggagaagatgcccctgcagaagctgtgcaaccagatcaccagcctgctgcccacccacaaggacgccctgagaaagttcctggccagcctgaccgacagcagcgagaaggagaagagaatcatccaggagctggccatcttcaagagaatcaaccacagcagcgaccagggcatcagcagctacaccaagctgaagggctgcaaggtgctgcaccacaccgccaagctgcccgccgacctgagactgagcatcagcgtgatcgacagcagcgacgaggccaccatcagactggccaacatgctgaagatcgagcagctgaagaccaccagctgcctgaagctggtgctgaaggacatcgagaacgccttctacagccacgaggaggtgacccagctgatgctgtgggtgctggagaacctgagcagcctgaagaacgagaaccccaacgtgctggagtggctgacccccctgaagttcatccagatcagccaggagcagatggtgagcgccggcgagctgttcgaccccgacatcgaggtgctgaaggacctgttctgcaacgaggagggcacctacttcccccccagcgtgttcaccagccccgacatcctgcacagcctgagacagatcggcctgaagaacgaggccagcctgaaggagaaggacgtggtgcaggtggccaagaagatcgaggccctgcaggtgggcgcctgccccgaccaggacgtgctgctgaagaaggccaagaccctgctgctggtgctgaacaagaaccacaccctgctgcagagcagcgagggcaagatgaccctgaagaagatcaagtgggtgcccgcctgcaaggagagaccccccaactaccccggcagcctggtgtggaagggcgacctgtgcaacctgtgcgccccccccgacatgtgcgacgtgggccacgccatcctgatcggcagcagcctgcccctggtggagagcatccacgtgaacctggagaaggccctgggcatcttcaccaagcccagcctgagcgccgtgctgaagcacttcaagatcgtggtggactggtacagcagcaagaccttcagcgacgaggactactaccagttccagcacatcctgctggagatctacggcttcatgcacgaccacctgaacgagggcaaggacagcttcagagccctgaagttcccctgggtgtggaccggcaagaagttctgccccctggcccaggccgtgatcaagcccatccacgacctggacctgcagccctacctgcacaacgtgcccaagaccatggccaagttccaccagctgttcaaggtgtgcggcagcatcgaggagctgaccagcgaccacatcagcatggtgatccagaagatctacctgaagagcgaccaggacctgagcgagcaggagagcaagcagaacctgcacctgatgctgaacatcatcagatggctgtacagcaaccagatccccgccagccccaacacccccgtgcccatccaccacagcaagaaccccagcaagctgatcatgaagcccatccacgagtgctgctactgcgacatcaaggtggacgacctgaacgacctgctggaggacagcgtggagcccatcatcctggtgcacgaggacatccccatgaagaccgccgagtggctgaaggtgccctgcctgagcaccagactgatcaaccccgagaacatgggcttcgagcagagcggccagagagagcccctgaccgtgagaatcaagaacatcctggaggagtaccccagcgtgagcgacatcttcaaggagctgctgcagaacgccgacgacgccaacgccaccgagtgcagcttcctgatcgacatgagaagaaacatggacatcagagagaacctgctggaccccggcatggccgcctgccacggccccgccctgtggagcttcaacaacagccagttcagcgacagcgacttcgtgaacatcaccagactgggcgagagcctgaagagaggcgaggtggacaaggtgggcaagttcggcctgggcttcaacagcgtgtaccacatcaccgacatccccatcatcatgagcagagagttcatgatcatgttcgaccccaacatcaaccacatcagcaagcacatcaaggacaagagcaaccccggcatcaagatcaactggagcaagcagcagaagagactgagaaagttccccaaccagttcaagcccttcatcgacgtgttcggctgccagctgcccctgaccgtggaggccccctacagctacaacggcaccctgttcagactgagcttcagaacccagcaggaggccaaggtgagcgaggtgagcagcacctgctacaacaccgccgacatctacagcctggtggacgagttcagcctgtgcggccacagactgatcatcttcacccagagcgtgaagagcatgtacctgaagtacctgaagatcgaggagaccaaccccagcctggcccaggacaccgtgatcatcaagaagaagagctgcagcagcaaggccctgaacacccccgtgctgagcgtgctgaaggaggccgccaagctgatgaagacctgcagcagcagcaacaagaagctgcccagcgacgagcccaagagcagctgcatcctgcagatcaccgtggaggagttccaccacgtgttcagaagaatcgccgacctgcagagccccctgttcagaggccccgacgacgaccccgccgccctgttcgagatggccaagagcggccagagcaagaagcccagcgacgagctgagccagaagaccgtggagtgcaccacctggctgctgtgcacctgcatggacaccggcgaggccctgaagttcagcctgagcgagagcggcagaagactgggcctggtgccctgcggcgccgtgggcgtgcagctgagcgagatccaggaccagaagtggaccgtgaagccccacatcggcgaggtgttctgctacctgcccctgagaatcaagaccggcctgcccgtgcacatcaacggctgcttcgccgtgaccagcaacagaaaggagatctggaagaccgacaccaagggcagatggaacaccaccttcatgagacacgtgatcgtgaaggcctacctgcaggtgctgagcgtgctgagagacctggccaccagcggcgagctgatggactacacctactacgccgtgtggcccgaccccgacctggtgcacgacgacttcagcgtgatctgccagggcttctacgaggacatcgcccacggcaagggcaaggagctgaccaaggtgttcagcgacggcagcacctgggtgagcatgaagaacgtgagattcctggacgacagcatcctgaagagaagagacgtgggcagcgccgccttcaagatcttcctgaagtacctgaagaagaccggcagcaagaacctgtgcgccgtggagctgcccagcagcgtgaagctgggcttcgaggaggccggctgcaagcagatcctgctggagaacaccttcagcgagaagcagttcttcagcgaggtgttcttccccaacatccaggagatcgaggccgagctgagagaccccctgatgatcttcgtgctgaacgagaaggtggacgagttcagcggcgtgctgagagtgaccccctgcatcccctgcagcctggagggccaccccctggtgctgcccagcagactgatccaccccgagggcagagtggccaagctgttcgacatcaaggacggcagattcccctacggcagcacccaggactacctgaaccccatcatcctgatcaagctggtgcagctgggcatggccaaggacgacatcctgtgggacgacatgctggagagagccgtgagcgtggccgagatcaacaagagcgaccacgtggccgcctgcctgagaagcagcatcctgctgagcctgatcgacgagaagctgaagatcagagaccccagagccaaggacttcgccgccaagtaccagaccatcagattcctgcccttcctgaccaagcccgccggcttcagcctggactggaagggcaacagcttcaagcccgagaccatgttcgccgccaccgacctgtacaccgccgagcaccaggacatcgtgtgcctgctgcagcccatcctgaacgagaacagccacagcttcagaggctgcggcagcgtgagcctggccgtgaaggagttcctgggcctgctgaagaagcccaccgtggacctggtgatcaaccagctgaaggaggtggccaagagcgtggacgacggcatcaccctgtaccaggagaacatcaccaacgcctgctacaagtacctgcacgaggccctgatgcagaacgagatcaccaagatgagcatcatcgacaagctgaagcccttcagcttcatcctggtggagaacgcctacgtggacagcgagaaggtgagcttccacctgaacttcgaggccgccccctacctgtaccagctgcccaacaagtacaagaacaacttcagagagctgttcgagaccgtgggcgtgagacagagctgcaccgtggaggacttcgccctggtgctggagagcatcgaccaggagagaggcaccaagcagatcaccgaggagaacttccagctgtgcagaagaatcatcagcgagggcatctggagcctgatcagagagaagaagcaggagttctgcgagaagaactacggcaagatcctgctgcccgacaccaacctgatgctgctgcccgccaagagcctgtgctacaacgactgcccctggatcaaggtgaaggacaccaccgtgaagtactgccacgccgacatccccagagaggtggccgtgaagctgggcgccgtgcccaagagacacaaggccctggagagatacgccagcaacgtgtgcttcaccaccctgggcaccgagttcggccagaaggagaagctgaccagcagaatcaagagcatcctgaacgcctaccccagcgagaaggagatgctgaaggagctgctgcagaacgccgacgacgccaaggccaccgagatctgcttcgtgttcgaccccagacagcaccccgtggacagaatcttcgacgacaagtgggcccccctgcagggccccgccctgtgcgtgtacaacaaccagcccttcaccgaggacgacgtgagaggcatccagaacctgggcaagggcaccaaggagggcaacccctacaagaccggccagtacggcatcggcttcaacagcgtgtaccacatcaccgactgccccagcttcatcagcggcaacgacatcctgtgcatcttcgacccccacgccagatacgcccccggcgccaccagcatcagccccggcagaatgttcagagacctggacgccgacttcagaacccagttcagcgacgtgctggacctgtacctgggcacccacttcaagctggacaactgcaccatgttcagattccccctgagaaacgccgagatggccaaggtgagcgagatcagcagcgtgcccgccagcgacagaatggtgcagaacctgctggacaagctgagaagcgacggcgccgagctgctgatgttcctgaaccacatggagaagatcagcatctgcgagatcgacaagagcaccggcgccctgaacgtgctgtacagcgtgaagggcaagatcaccgacggcgacagactgaagagaaagcagttccacgccagcgtgatcgacagcgtgaccaagaagagacagctgaaggacatccccgtgcagcagatcacctacaccatggacaccgaggacagcgagggcaacctgaccacctggctgatctgcaacagaagcggcttcagcagcatggagaaggtgagcaagagcgtgatcagcgcccacaagaaccaggacatcaccctgttccccagaggcggcgtggccgcctgcatcacccacaactacaagaagccccacagagccttctgcttcctgcccctgagcctggagaccggcctgcccttccacgtgaacggccacttcgccctggacagcgccagaagaaacctgtggagagacgacaacggcgtgggcgtgagaagcgactggaacaacagcctgatgaccgccctgatcgcccccgcctacgtggagctgctgatccagctgaagaagagatacttccccggcagcgaccccaccctgagcgtgctgcagaacacccccatccacgtggtgaaggacaccctgaagaagttcctgagcttcttccccgtgaacagactggacctgcagcccgacctgtactgcctggtgaaggccctgtacaactgcatccacgaggacatgaagagactgctgcccgtggtgagagcccccaacatcgacggcagcgacctgcacagcgccgtgatcatcacctggatcaacatgagcaccagcaacaagaccagacccttcttcgacaacctgctgcaggacgagctgcagcacctgaagaacgccgactacaacatcaccaccagaaagaccgtggccgagaacgtgtacagactgaagcacctgctgctggagatcggcttcaacctggtgtacaactgcgacgagaccgccaacctgtaccactgcctgatcgacgccgacatccccgtgagctacgtgacccccgccgacatcagaagcttcctgatgaccttcagcagccccgacaccaactgccacatcggcaagctgccctgcagactgcagcagaccaacctgaagctgttccacagcctgaagctgctggtggactactgcttcaaggacgccgaggagaacgagatcgaggtggagggcctgcccctgctgatcaccctggacagcgtgctgcagaccttcgacgccaagagacccaagttcctgaccacctaccacgagctgatccccagcagaaaggacctgttcatgaacaccctgtacctgaagtacagcaacatcctgctgaactgcaaggtggccaaggtgttcgacatcagcagcttcgccgacctgctgagcagcgtgctgcccagagagtacaagaccaagagctgcaccaagtggaaggacaacttcgccagcgagagctggctgaagaacgcctggcacttcatcagcgagagcgtgagcgtgaaggaggaccaggaggagaccaagcccaccttcgacatcgtggtggacaccctgaaggactgggccctgctgcccggcaccaagttcaccgtgagcgccaaccagctggtggtgcccgagggcgacgtgctgctgcccctgagcctgatgcacatcgccgtgttccccaacgcccagagcgacaaggtgttccacgccctgatgaaggccggctgcatccagctggccctgaacaagatctgcagcaaggacagcgccttcgtgcccctgctgagctgccacaccgccaacatcgagagccccaccagcatcctgaaggccctgcactacatggtgcagaccagcaccttcagagccgagaagctggtggagaacgacttcgaggccctgctgatgtacttcaactgcaacctgaaccacctgatgagccaggacgacatcaagatcctgaagagcctgccctgctacaagagcatcagcggcagatacgtgagcatcggcaagttcggcacctgctacgtgctgaccaagagcatccccagcgccgaggtggagaagtggacccagagcagcagcagcgccttcctggaggagaagatccacctgaaggagctgtacgaggtgatcggctgcgtgcccgtggacgacctggaggtgtacctgaagcacctgctgcccaagatcgagaacctgagctacgacgccaagctggagcacctgatctacctgaagaacagactgagcagcgccgaggagctgagcgagatcaaggagcagctgttcgagaagctggagagcctgctgatcatccacgacgccaacagcagactgaagcaggccaagcacttctacgacagaaccgtgagagtgttcgaggtgatgctgcccgagaagctgttcatccccaacgacttcttcaagaagctggagcagctgatcaagcccaagaaccacgtgaccttcatgaccagctgggtggagttcctgagaaacatcggcctgaagtacatcctgagccagcagcagctgctgcagttcgccaaggagatcagcgtgagagccaacaccgagaactggagcaaggagaccctgcagaacaccgtggacatcctgctgcaccacatcttccaggagagaatggacctgctgagcggcaacttcctgaaggagctgagcctgatccccttcctgtgccccgagagagcccccgccgagttcatcagattccacccccagtaccaggaggtgaacggcaccctgcccctgatcaagttcaacggcgcccaggtgaaccccaagttcaagcagtgcgacgtgctgcagctgctgtggaccagctgccccatcctgcccgagaaggccacccccctgagcatcaaggagcaggagggcagcgacctgggcccccaggagcagctggagcaggtgctgaacatgctgaacgtgaacctggacccccccctggacaaggtgatcaacaactgcagaaacatctgcaacatcaccaccctggacgaggagatggtgaagaccagagccaaggtgctgagaagcatctacgagttcctgagcgccgagaagagagagttcagattccagctgagaggcgtggccttcgtgatggtggaggacggctggaagctgctgaagcccgaggaggtggtgatcaacctggagtacgagagcgacttcaagccctacctgtacaagctgcccctggagctgggcaccttccaccagctgttcaagcacctgggcaccgaggacatcatcagcaccaagcagtacgtggaggtgctgagcagaatcttcaagaacagcgagggcaagcagctggaccccaacgagatgagaaccgtgaagagagtggtgagcggcctgttcagaagcctgcagaacgacagcgtgaaggtgagaagcgacctggagaacgtgagagacctggccctgtacctgcccagccaggacggcagactggtgaagagcagcatcctggtgttcgacgacgccccccactacaagagcagaatccagggcaacatcggcgtgcagatgctggtggacctgagccagtgctacctgggcaaggaccacggcttccacaccaagctgatcatgctgttcccccagaagctgagacccagactgctgagcagcatcctggaggagcagctggacgaggagacccccaaggtgtgccagttcggcgccctgtgcagcctgcagggcagactgcagctgctgctgagcagcgagcagttcatcaccggcctgatcagaatcatgaagcacgagaacgacaacgccttcctggccaacgaggagaaggccatcagactgtgcaaggccctgagagagggcctgaaggtgagctgcttcgagaagctgcagaccaccctgagagtgaagggcttcaaccccatcccccacagcagaagcgagaccttcgccttcctgaagagattcggcaacgccgtgatcctgctgtacatccagcacagcgacagcaaggacatcaacttcctgctggccctggccatgaccctgaagagcgccaccgacaacctgatcagcgacaccagctacctgatcgccatgctgggctgcaacgacatctacagaatcggcgagaagctggacagcctgggcgtgaagtacgacagcagcgagcccagcaagctggagctgcccatgcccggcacccccatccccgccgagatccactacaccctgctgatggaccccatgaacgtgttctaccccggcgagtacgtgggctacctggtggacgccgagggcggcgacatctacggcagctaccagcccacctacacctacgccatcatcgtgcaggaggtggagagagaggacgccgacaacagcagcttcctgggcaagatctaccagatcgacatcggctacagcgagtacaagatcgtgagcagcctggacctgtacaagttcagcagacccgaggagagcagccagagcagagacagcgcccccagcacccccaccagccccaccgagttcctgacccccggcctgagaagcatcccccccctgttcagcggcagagagagccacaagaccagcagcaagcaccagagccccaagaagctgaaggtgaacagcctgcccgagatcctgaaggaggtgaccagcgtggtggagcaggcctggaagctgcccgagagcgagagaaagaagatcatcagaagactgtacctgaagtggcaccccgacaagaaccccgagaaccacgacatcgccaacgaggtgttcaagcacctgcagaacgagatcaacagactggagaagcaggccttcctggaccagaacgccgacagagccagcagaagaaccttcagcaccagcgccagcagattccagagcgacaagtacagcttccagagattctacaccagctggaaccaggaggccaccagccacaagagcgagagacagcagcagaacaaggagaagtgcccccccagcgccggccagacctacagccagagattcttcgtgccccccaccttcaagagcgtgggcaaccccgtggaggccagaagatggctgagacaggccagagccaacttcagcgccgccagaaacgacctgcacaagaacgccaacgagtgggtgtgcttcaagtgctacctgagcaccaagctggccctgatcgccgccgactacgccgtgagaggcaagagcgacaaggacgtgaagcccaccgccctggcccagaagatcgaggagtacagccagcagctggagggcctgaccaacgacgtgcacaccctggaggcctacggcgtggacagcctgaagaccagataccccgacctgctgcccttcccccagatccccaacgacagattcaccagcgaggtggccatgagagtgatggagtgcaccgcctgcatcatcatcaagctggagaacttcatgcagcagaaggtgtag

SEQ ID NO: 100456 - DNA, 7332 bp, synthetic construct
  misc_feature 1..7332: note = Description of Artificial Sequence: Synthetic coding sequence
  source 1..7332: mol_type = other DNA
atggccgccgaggagggcgtggccagcgccgccagcgccggcggcagctggggcaccgccgccatgggcagagtgctgcccatgctgctggtgcccgtgcccgccgaggccatgggccagctgggcagcagagcccagctgagaacccagcccgaggccctgggcagcctgaccgccgccggcagcctgcaggtgctgagcctgacccccggcagcagaggcggcggcagatgctgcctggagggccccttctggcacttcctgtgggaggacagcagaaacagcagcacccccaccgagaagcccaagctgctggccctgggcgagaactacgagctgctgatctacgagttcaacctgaaggacggcagatgcgacgccaccatcctgtacagctgcagcagagaggccctgcagaagctgatcgacgaccaggacatcagcatcagcctgctgagcctgagaatcctgagcttccacaacaacaccagcctgctgttcatcaacaagtgcgtgatcctgcacatcatcttccccgagagagacgccgccatcagagtgctgaactgcttcaccctgcccctgcccgcccaggccgtggacatgatcatcgacacccagctgtgcagaggcatcctgttcgtgctgagcagcctgggctggatctacatcttcgacgtggtggacggcacctacgtggcccacgtggacctggccctgcacaaggaggacatgtgcaacgagcagcagcaggagcccgccaagatcagcagcttcaccagcctgaaggtgagccaggacctggacgtggccgtgatcgtgagcagcagcaacagcgccgtggccctgaacctgaacctgtacttcagacagcaccccggccacctgctgtgcgagagaatcctggaggacctgcccatccagggccccaagggcgtggacgaggacgaccccgtgaacagcgcctacaacatgaagctggccaagttcagcttccagatcgacagaagctggaaggcccagctgagcagcctgaacgagaccatcaagaacagcaagctggaggtgagctgctgcgccccctggttccaggacatcctgcacctggagagccccgagagcggcaaccacagcaccagcgtgcagagctgggccttcatcccccaggacatcatgcacggccagtacaacgtgctgcagaaggaccacgccaagaccagcgaccccggcagaagctggaagatcatgcacatcagcgagcaggaggagcccatcgagctgaagtgcgtgagcgtgaccggcttcaccgccctgttcacctgggaggtggagagaatgggctacaccatcaccctgtgggacctggagacccagggcatgcagtgcttcagcctgggcaccaagtgcatccccgtggacagcagcggcgaccagcagctgtgcttcgtgctgaccgagaacggcctgagcctgatcctgttcggcctgacccaggaggagttcctgaacagactgatgatccacggcagcgccagcaccgtggacaccctgtgccacctgaacggctggggcagatgcagcatccccatccacgccctggaggccggcatcgagaacagacagctggacaccgtgaacttcttcctgaagagcaaggagaacctgttcaaccccagcagcaagagcagcgtgagcgaccagttcgaccacctgagcagccacctgtacctgagaaacgtggaggagctgatccccgccctggacctgctgtgcagcgccatcagagagagctacagcgagccccagagcaagcacttcagcgagcagctgctgaacctgaccctgagcttcctgaacaaccagatcaaggagctgttcatccacaccgaggagctggacgagcacctgcagaagggcgtgaacatcctgaccagctacatcaacgagctgagaaccttcatgatcaagttcccctggaagctgaccgacgccatcgacgagtacgacgtgcacgagaacgtgcccaaggtgaaggagagcaacatctggaagaagctgagcttcgaggaggtgatcgccagcgccatcctgaacaacaagatccccgaggcccagaccttcttcagaatcgacagccacagcgcccagaagctggaggagctgatcggcatcggcctgaacctggtgttcgacaacctgaagaagaacaacatcaaggaggccagcgagctgctgaagaacatgggcttcgacgtgaagggccagctgctgaagatctgcttctacaccaccaacaagaacatcagagacttcctggtggagatcctgaaggagaagaactacttcagcgagaaggagaagagaaccatcgacttcgtgcaccaggtggagaagctgtacctgggccacttccaggagaacatgcagatccagagcttccccagatactggatcaaggagcaggacttcttcaagcacaagagcgtgctggacagcttcctgaagtacgactgcaaggacgagttcaacaagcaggaccacagaatcgtgctgaactgggccctgtggtgggaccagctgacccaggagagcatcctgctgcccagaatcagccccgaggagtacaagagctacagccccgaggccctgtggagatacctgaccgccagacacgactggctgaacatcatcctgtggatcggcgagttccagacccagcacagctacgccagcctgcagcagaacaagtggcccctgctgaccgtggacgtgatcaaccagaacaccagctgcaacaactacatgagaaacgagatcctggacaagctggccagaaacggcgtgttcctggccagcgagctggaggacttcgagtgcttcctgctgagactgagcagaatcggcggcgtgatccaggacaccctgcccgtgcagaactacaagaccaaggagggctgggacttccacagccagttcatcctgtactgcctggagcacagcctgcagcacctgctgtacgtgtacctggactgctacaagctgagccccgagaactgccccttcctggagaagaaggagctgcacgaggcccacccctggttcgagttcctggtgcagtgcagacaggtggccagcaacctgaccgaccccaagctgatcttccaggccagcctggccaacgcccagatcctgatccccaccaaccaggccagcgtgagcagcatgctgctggagggccacaccctgctggccctggccaccaccatgtacagccccggcggcgtgagccaggtggtgcagaacgaggagaacgagaactgcctgaagaaggtggacccccagctgctgaagatggccctgaccccctaccccaagctgaagaccgccctgttcccccagtgcaccccccccagcgtgctgcccagcgacatcaccatctaccacctgatccagagcctgagccccttcgaccccagcagactgttcggctggcagagcgccaacaccctggccatcggcgacgcctggagccacctgccccacttcagcagccccgacctggtgaacaagtacgccatcgtggagagactgaacttcgcctactacctgcacaacggcagacccagcttcgccttcggcaccttcctggtgcaggagctgatcaagagcaagacccccaagcagctgatccagcaggtgggcaacgaggcctacgtgatcggcctgagcagcttccacatccccagcatcggcgccgcctgcgtgtgcttcctggagctgctgggcctggacagcctgaagctgagagtggacatgaaggtggccaacatcatcctgagctacaagtgcagaaacgaggacgcccagtacagcttcatcagagagagcgtggccgagaagctgagcaagctggccgacggcgagaagaccaccaccgaggagctgctggtgctgctggaggagggcacctggaacagcatccagcagcaggagatcaagagactgagcagcgagagcagcagccagtgggccctggtggtgcagttctgcagactgcacaacatgaagctgagcatcagctacctgagagagtgcgccaaggccaacgactggctgcagttcatcatccacagccagctgcacaactaccaccccgccgaggtgaagagcctgatccagtacttcagccccgtgatccaggaccacctgagactggccttcgagaacctgcccagcgtgcccaccagcaagatggacagcgaccaggtgtgcaacaagtgcccccaggagctgcagggcagcaagcaggagatgaccgacctgttcgagatcctgctgcagtgcagcgaggagcccgacagctggcactggctgctggtggaggccgtgaagcagcaggcccccatcctgagcgtgctggccagctgcctgcagggcgccagcgccatcagctgcctgtgcgtgtggatcatcaccagcgtggaggacaacgtggccaccgaggccatgggccacatccaggacagcaccgaggaccacacctggaacctggaggacctgagcgtgatctggagaaccctgctgaccagacagaagagcaagaccctgatcagaggcttccagctgttcttcaaggacagccccctgctgctggtgatggagatgtacgagctgtgcatgttcttcagaaactacaaggaggccgaggccaagctgctggagttccagaagagcctggagaccctgaacaccgccgccaccaaggtgcaccccgtgatccccgccatgtggctggaggaccaggtgtgcttcctgctgaagctgatgctgcagcagtgcaagacccagtacgagctgggcaagctgctgcagctgttcgtggagagagagcacctgttcagcgacggccccgacgtgaagaagctgtgcatcctgtgccagatcctgaaggacaccagcatcgccatcaaccacaccatcatcaccagctacagcatcgagaacctgcagcacgagtgcagaagcatcctggagagactgcagaccgacggccagttcgccctggccagaagagtggccgagctggccgagctgcccgtggacaacctggtgatcaaggagatcacccaggagatgcagaccctgaagcacatcgagcagtggagcctgaagcaggccagaatcgacttctggaagaagtgccacgagaacttcaagaagaacagcatcagcagcaaggccgccagcagcttcttcagcacccaggcccacgtggcctgcgagcaccccaccggctggagcagcatggaggagagacacctgctgctgaccctggccggccactggctggcccaggaggacgtggtgcccctggacaagctggaggagctggagaagcagatctggctgtgcagaatcacccagcacaccctgggcagaaaccaggaggagaccgagcccagattcagcagacagatcagcaccagcggcgagctgagcttcgacagcctggccagcgagttcagcttcagcaagctggccgccctgaacaccagcaagtacctggagctgaacagcctgcccagcaaggagacctgcgagaacagactggactggaaggagcaggagagcctgaacttcctgatcggcagactgctggacgacggctgcgtgcacgaggccagcagagtgtgcagatacttccacttctacaaccccgacgtggccctggtgctgcactgcagagccctggccagcggcgaggccagcatggaggacctgcaccccgagatccacgccctgctgcagagcgccgagctgctggaggaggaggcccccgacatccccctgagaagagtgcacagcaccagcagcctggacagccagaagttcgtgaccgtgcccagcagcaacgaggtggtgaccaacctggaggtgctgaccagcaagtgcctgcacggcaagaactactgcagacaggtgctgtgcctgtacgacctggccaaggagctgggctgcagctacaccgacgtggccgcccaggacggcgaggccatgctgagaaagatcctggccagccagcagcccgacagatgcaagagagcccaggccttcatcagcacccagggcctgaagcccgacaccgtggccgagctggtggccgaggaggtgaccagagagctgctgaccagcagccagggcaccggccacaagcagatgttcaaccccaccgaggagagccagaccttcctgcagctgaccaccctgtgccaggacagaaccctggtgggcatgaagctgctggacaagatcagcagcgtgccccacggcgagctgagctgcaccaccgagctgctgatcctggcccaccactgcttcaccctgacctgccacatggagggcatcatcagagtgctgcaggccgcccacatgctgaccgacaaccacctggcccccagcgaggagtacggcctggtggtgagactgctgaccggcatcggcagatacaacgagatgacctacatcttcgacctgctgcacaagaagcactacttcgaggtgctgatgagaaagaagctggaccccagcggcaccctgaagaccgccctgctggactacatcaagagatgcagacccggcgacagcgagaagcacaacatgatcgccctgtgcttcagcatgtgcagagagatcggcgagaaccacgaggccgccgccagaatccagctgaagctgatcgagagccagccctgggaggacagcctgaaggacggccaccagctgaagcagctgctgctgaaggccctgaccctgatgctggacgccgccgagagctacgccaaggacagctgcgtgagacaggcccagcactgccagagactgaccaagctgatcaccctgcagatccacttcctgaacaccggccagaacaccatgctgatcaacctgggcagacacaagctgatggactgcatcctggccctgcccagattctaccaggccagcatcgtggccgaggcctacgacttcgtgcccgactgggccgagatcctgtaccagcaggtgatcctgaagggcgacttcaactacctggaggagttcaagcagcagagactgctgaagagcagcatcttcgaggagatcagcaagaagtacaagcagcaccagcccaccgacatggtgatggagaacctgaagaagctgctgacctactgcgaggacgtgtacctgtactacaagctggcctacgagcacaagttctacgagatcgtgaacgtgctgctgaaggacccccagaccggctgctgcctgaaggacatgctggccggctag

SEQ ID NO: 100457 - DNA, 6993 bp, synthetic construct
  misc_feature 1..6993: note = Description of Artificial Sequence: Synthetic coding sequence
  source 1..6993: mol_type = other DNA
atggccgccgaggagggcgtggccagcgccgccagcgccggcggcagctggggcaccgccgccatgggcagagtgctgcccatgctgctggtgcccgtgcccgccgaggccatgggccagctgggcagcagagcccagctgagaacccagcccgaggccctgggcagcctgaccgccgccggcagcctgcaggtgctgagcctgacccccggcagcagaggcggcggcagatgctgcctggagggccccttctggcacttcctgtgggaggacagcagaaacagcagcacccccaccgagaagcccaagctgctggccctgggcgagaactacgagctgctgatctacgagttcaacctgaaggacggcagatgcgacgccaccatcctgtacagctgcagcagagaggccctgcagaagctgatcgacgaccaggacatcagcatcagcctgctgagcctgagaatcctgagcttccacaacaacaccagcctgctgttcatcaacaagtgcgtgatcctgcacatcatcttccccgagagagacgccgccatcagagtgctgaactgcttcaccctgcccctgcccgcccaggccgtggacatgatcatcgacacccagctgtgcagaggcatcctgttcgtgctgagcagcctgggctggatctacatcttcgacgtggtggacggcacctacgtggcccacgtggacctggccctgcacaaggaggacatgtgcaacgagcagcagcaggagcccgccaagatcagcagcttcaccagcctgaaggtgagccaggacctggacgtggccgtgatcgtgagcagcagcaacagcgccgtggccctgaacctgaacctgtacttcagacagcaccccggccacctgctgtgcgagagaatcctggaggacctgcccatccagggccccaagggcgtggacgaggacgaccccgtgaacagcgcctacaacatgaagctggccaagttcagcttccagatcgacagaagctggaaggcccagctgagcagcctgaacgagaccatcaagaacagcaagctggaggtgagctgctgcgccccctggttccaggacatcctgcacctggagagccccgagagcggcaaccacagcaccagcgtgcagagctgggccttcatcccccaggacatcatgcacggccagtacaacgtgctgcagaaggaccacgccaagaccagcgaccccggcagaagctggaagatcatgcacatcagcgagcaggaggagcccatcgagctgaagtgcgtgagcgtgaccggcttcaccgccctgttcacctgggaggtggagagaatgggctacaccatcaccctgtgggacctggagacccagggcatgcagtgcttcagcctgggcaccaagtgcatccccgtggacagcagcggcgaccagcagctgtgcttcgtgctgaccgagaacggcctgagcctgatcctgttcggcctgacccaggaggagttcctgaacagactgatgatccacggcagcgccagcaccgtggacaccctgtgccacctgaacggctggggcagatgcagcatccccatccacgccctggaggccggcatcgagaacagacagctggacaccgtgaacttcttcctgaagagcaaggagaacctgttcaaccccagcagcaagagcagcgtgagcgaccagttcgaccacctgagcagccacctgtacctgagaaacgtggaggagctgatccccgccctggacctgctgtgcagcgccatcagagagagctacagcgagccccagagcaagcacttcagcgagcagctgctgaacctgaccctgagcttcctgaacaaccagatcaaggagctgttcatccacaccgaggagctggacgagcacctgcagaagggcgtgaacatcctgaccagctacatcaacgagctgagaaccttcatgatcaagttcccctggaagctgaccgacgccatcgacgagtacgacgtgcacgagaacgtgcccaaggtgaaggagagcaacatctggaagaagctgagcttcgaggaggtgatcgccagcgccatcctgaacaacaagatccccgaggcccagaccttcttcagaatcgacagccacagcgcccagaagctggaggagctgatcggcatcggcctgaacctggtgttcgacaacctgaagaagaacaacatcaaggaggccagcgagctgctgaagaacatgggcttcgacgtgaagggccagctgctgaagatctgcttctacaccaccaacaagaacatcagagacttcctggtggagatcctgaaggagaagaactacttcagcgagaaggagaagagaaccatcgacttcgtgcaccaggtggagaagctgtacctgggccacttccaggagaacatgcagatccagagcttccccagatactggatcaaggagcaggacttcttcaagcacaagagcgtgctggacagcttcctgaagtacgactgcaaggacgagttcaacaagcaggaccacagaatcgtgctgaactgggccctgtggtgggaccagctgacccaggagagcatcctgctgcccagaatcagccccgaggagtacaagagctacagccccgaggccctgtggagatacctgaccgccagacacgactggctgaacatcatcctgtggatcggcgagttccagacccagcacagctacgccagcctgcagcagaacaagtggcccctgctgaccgtggacgtgatcaaccagaacaccagctgcaacaactacatgagaaacgagatcctggacaagctggccagaaacggcgtgttcctggccagcgagctggaggacttcgagtgcttcctgctgagactgagcagaatcggcggcgtgatccaggacaccctgcccgtgcagaactacaagaccaaggagggctgggacttccacagccagttcatcctgtactgcctggagcacagcctgcagcacctgctgtacgtgtacctggactgctacaagctgagccccgagaactgccccttcctggagaagaaggagctgcacgaggcccacccctggttcgagttcctggtgcagtgcagacaggtggccagcaacctgaccgaccccaagctgatcttccaggccagcctggccaacgcccagatcctgatccccaccaaccaggccagcgtgagcagcatgctgctggagggccacaccctgctggccctggccaccaccatgtacagccccggcggcgtgagccaggtggtgcagaacgaggagaacgagaactgcctgaagaaggtggacccccagctgctgaagatggccctgaccccctaccccaagctgaagaccgccctgttcccccagtgcaccccccccagcgtgctgcccagcgacatcaccatctaccacctgatccagagcctgagccccttcgaccccagcagactgttcggctggcagagcgccaacaccctggccatcggcgacgcctggagccacctgccccacttcagcagccccgacctggtgaacaagtacgccatcgtggagagactgaacttcgcctactacctgcacaacggcagacccagcttcgccttcggcaccttcctggtgcaggagctgatcaagagcaagacccccaagcagctgatccagcaggtgggcaacgaggcctacgtgatcggcctgagcagcttccacatccccagcatcggcgccgcctgcgtgtgcttcctggagctgctgggcctggacagcctgaagctgagagtggacatgaaggtggccaacatcatcctgagctacaagtgcagaaacgaggacgcccagtacagcttcatcagagagagcgtggccgagaagctgagcaagctggccgacggcgagaagaccaccaccgaggagctgctggtgctgctggaggagggcacctggaacagcatccagcagcaggagatcaagagactgagcagcgagagcagcagccagtgggccctggtggtgcagttctgcagactgcacaacatgaagctgagcatcagctacctgagagagtgcgccaaggccaacgactggctgcagttcatcatccacagccagctgcacaactaccaccccgccgaggtgaagagcctgatccagtacttcagccccgtgatccaggaccacctgagactggccttcgagaacctgcccagcgtgcccaccagcaagatggacagcgaccaggtgtgcaacaagtgcccccaggagctgcagggcagcaagcaggagatgaccgacctgttcgagatcctgctgcagtgcagcgaggagcccgacagctggcactggctgctggtggaggccgtgaagcagcaggcccccatcctgagcgtgctggccagctgcctgcagggcgccagcgccatcagctgcctgtgcgtgtggatcatcaccagcgtggaggacaacgtggccaccgaggccatgggccacatccaggacagcaccgaggaccacacctggaacctggaggacctgagcgtgatctggagaaccctgctgaccagacagaagagcaagaccctgatcagaggcttccagctgttcttcaaggacagccccctgctgctggtgatggagatgtacgagctgtgcatgttcttcagaaactacaaggaggccgaggccaagctgctggagttccagaagagcctggagaccctgaacaccgccgccaccaaggtgcaccccgtgatccccgccatgtggctggaggaccaggtgtgcttcctgctgaagctgatgctgcagcagtgcaagacccagtacgagctgggcaagctgctgcagctgttcgtggagagagagcacctgttcagcgacggccccgacgtgaagaagctgtgcatcctgtgccagatcctgaaggacaccagcatcgccatcaaccacaccatcatcaccagctacagcatcgagaacctgcagcacgagtgcagaagcatcctggagagactgcagaccgacggccagttcgccctggccagaagagtggccgagctggccgagctgcccgtggacaacctggtgatcaaggagatcacccaggagatgcagaccctgaagcacatcgagcagtggagcctgaagcaggccagaatcgacttctggaagaagtgccacgagaacttcaagaagaacagcatcagcagcaaggccgccagcagcttcttcagcacccaggcccacgtggcctgcgagcaccccaccggctggagcagcatggaggagagacacctgctgctgaccctggccggccactggctggcccaggaggacgtggtgcccctggacaagctggaggagctggagaagcagatctggctgtgcagaatcacccagcacaccctgggcagaaaccaggaggagaccgagcccagattcagcagacagatcagcaccagcggcgagctgagcttcgacagcctggccagcgagttcagcttcagcaagctggccgccctgaacaccagcaagtacctggagctgaacagcctgcccagcaaggagacctgcgagaacagactggactggaaggagcaggagagcctgaacttcctgatcggcagactgctggacgacggctgcgtgcacgaggccagcagagtgtgcagatacttccacttctacaaccccgacgtggccctggtgctgcactgcagagccctggccagcggcgaggccagcatggaggacctgcaccccgagatccacgccctgctgcagagcgccgagctgctggaggaggaggcccccgacatccccctgagaagagtgcacagcagacacaagcagatgttcaaccccaccgaggagagccagaccttcctgcagctgaccaccctgtgccaggacagaaccctggtgggcatgaagctgctggacaagatcagcagcgtgccccacggcgagctgagctgcaccaccgagctgctgatcctggcccaccactgcttcaccctgacctgccacatggagggcatcatcagagtgctgcaggccgcccacatgctgaccgacaaccacctggcccccagcgaggagtacggcctggtggtgagactgctgaccggcatcggcagatacaacgagatgacctacatcttcgacctgctgcacaagaagcactacttcgaggtgctgatgagaaagaagctggaccccagcggcaccctgaagaccgccctgctggactacatcaagagatgcagacccggcgacagcgagaagcacaacatgatcgccctgtgcttcagcatgtgcagagagatcggcgagaaccacgaggccgccgccagaatccagctgaagctgatcgagagccagccctgggaggacagcctgaaggacggccaccagctgaagcagctgctgctgaaggccctgaccctgatgctggacgccgccgagagctacgccaaggacagctgcgtgagacaggcccagcactgccagagactgaccaagctgatcaccctgcagatccacttcctgaacaccggccagaacaccatgctgatcaacctgggcagacacaagctgatggactgcatcctggccctgcccagattctaccaggccagcatcgtggccgaggcctacgacttcgtgcccgactgggccgagatcctgtaccagcaggtgatcctgaagggcgacttcaactacctggaggagttcaagcagcagagactgctgaagagcagcatcttcgaggagatcagcaagaagtacaagcagcaccagcccaccgacatggtgatggagaacctgaagaagctgctgacctactgcgaggacgtgtacctgtactacaagctggcctacgagcacaagttctacgagatcgtgaacgtgctgctgaaggacccccagaccggctgctgcctgaaggacatgctggccggctag

SEQ ID NO: 100458 - DNA, 6240 bp, synthetic construct
  misc_feature 1..6240: note = Description of Artificial Sequence: Synthetic coding sequence
  source 1..6240: mol_type = other DNA
atggccgccgaggagggcgtggccagcgccgccagcgccggcggcagctggggcaccgccgccatgggcagagtgctgcccatgctgctggtgcccgtgcccgccgaggccatgggccagctgggcagcagagcccagctgagaacccagcccgaggccctgggcagcctgaccgccgccggcagcctgcaggtgctgagcctgacccccggcagcagaggcggcggcagatgctgcctggagggccccttctggcacttcctgtgggaggacagcagaaacagcagcacccccaccgagaagcccaagctgctggccctgggcgagaactacgagctgctgatctacgagttcaacctgaaggacggcagatgcgacgccaccatcctgtacagctgcagcagagaggccctgcagaagctgatcgacgaccaggacatcagcatcagcctgctgagcctgagaatcctgagcttccacaacaacaccagcctgctgttcatcaacaagtgcgtgatcctgcacatcatcttccccgagagagacgccgccatcagagtgctgaactgcttcaccctgcccctgcccgcccaggccgtggacatgatcatcgacacccagctgtgcagaggcatcctgttcgtgctgagcagcctgggctggatctacatcttcgacgtggtggacggcacctacgtggcccacgtggacctggccctgcacaaggaggacatgtgcaacgagcagcagcaggagcccgccaagatcagcagcttcaccagcctgaaggtgagccaggacctggacgtggccgtgatcgtgagcagcagcaacagcgccgtggccctgaacctgaacctgtacttcagacagcaccccggccacctgctgtgcgagagaatcctggaggacctgcccatccagggccccaagggcgtggacgaggacgaccccgtgaacagcgcctacaacatgaagctggccaagttcagcttccagatcgacagaagctggaaggcccagctgagcagcctgaacgagaccatcaagaacagcaagctggaggtgagctgctgcgccccctggttccaggacatcctgcacctggagagccccgagagcggcaaccacagcaccagcgtgcagagctgggccttcatcccccaggacatcatgcacggccagtacaacgtgctgcagaaggaccacgccaagaccagcgaccccggcagaagctggaagatcatgcacatcagcgagcaggaggagcccatcgagctgaagtgcgtgagcgtgaccggcttcaccgccctgttcacctgggaggtggagagaatgggctacaccatcaccctgtgggacctggagacccagggcatgcagtgcttcagcctgggcaccaagtgcatccccgtggacagcagcggcgaccagcagctgtgcttcgtgctgaccgagaacggcctgagcctgatcctgttcggcctgacccaggaggagttcctgaacagactgatgatccacggcagcgccagcaccgtggacaccctgtgccacctgaacggctggggcagatgcagcatccccatccacgccctggaggccggcatcgagaacagacagctggacaccgtgaacttcttcctgaagagcaaggagaacctgttcaaccccagcagcaagagcagcgtgagcgaccagttcgaccacctgagcagccacctgtacctgagaaacgtggaggagctgatccccgccctggacctgctgtgcagcgccatcagagagagctacagcgagccccagagcaagcacttcagcgagcagctgctgaacctgaccctgagcttcctgaacaaccagatcaaggagctgttcatccacaccgaggagctggacgagcacctgcagaagggcgtgaacatcctgaccagctacatcaacgagctgagaaccttcatgatcaagttcccctggaagctgaccgacgccatcgacgagtacgacgtgcacgagaacgtgcccaaggtgaaggagagcaacatctggaagaagctgagcttcgaggaggtgatcgccagcgccatcctgaacaacaagatccccgaggcccagaccttcttcagaatcgacagccacagcgcccagaagctggaggagctgatcggcatcggcctgaacctggtgttcgacaacctgaagaagaacaacatcaaggaggccagcgagctgctgaagaacatgggcttcgacgtgaagggccagctgctgaagatctgcttctacaccaccaacaagaacatcagagacttcctggtggagatcctgaaggagaagaactacttcagcgagaaggagaagagaaccatcgacttcgtgcaccaggtggagaagctgtacctgggccacttccaggagaacatgcagatccagagcttccccagatactggatcaaggagcaggacttcttcaagcacaagagcgtgctggacagcttcctgaagtacgactgcaaggacgagttcaacaagcaggaccacagaatcgtgctgaactgggccctgtggtgggaccagctgacccaggagagcatcctgctgcccagaatcagccccgaggagtacaagagctacagccccgaggccctgtggagatacctgaccgccagacacgactggctgaacatcatcctgtggatcggcgagttccagacccagcacagctacgccagcctgcagcagaacaagtggcccctgctgaccgtggacgtgatcaaccagaacaccagctgcaacaactacatgagaaacgagatcctggacaagctggccagaaacggcgtgttcctggccagcgagctggaggacttcgagtgcttcctgctgagactgagcagaatcggcggcgtgatccaggacaccctgcccgtgcagaactacaagaccaaggagggctgggacttccacagccagttcatcctgtactgcctggagcacagcctgcagcacctgctgtacgtgtacctggactgctacaagctgagccccgagaactgccccttcctggagaagaaggagctgcacgaggcccacccctggttcgagttcctggtgcagtgcagacaggtggccagcaacctgaccgaccccaagctgatcttccaggccagcctggccaacgcccagatcctgatccccaccaaccaggccagcgtgagcagcatgctgctggagggccacaccctgctggccctggccaccaccatgtacagccccggcggcgtgagccaggtggtgcagaacgaggagaacgagaactgcctgaagaaggtggacccccagctgctgaagatggccctgaccccctaccccaagctgaagaccgccctgttcccccagtgcaccccccccagcgtgctgcccagcgacatcaccatctaccacctgatccagagcctgagccccttcgaccccagcagactgttcggctggcagagcgccaacaccctggccatcggcgacgcctggagccacctgccccacttcagcagccccgacctggtgaacaagtacgccatcgtggagagactgaacttcgcctactacctgcacaacggcagacccagcttcgccttcggcaccttcctggtgcaggagctgatcaagagcaagacccccaagcagctgatccagcaggtgggcaacgaggcctacgtgatcggcctgagcagcttccacatccccagcatcggcgccgcctgcgtgtgcttcctggagctgctgggcctggacagcctgaagctgagagtggacatgaaggtggccaacatcatcctgagctacaagtgcagaaacgaggacgcccagtacagcttcatcagagagagcgtggccgagaagctgagcaagctggccgacggcgagaagaccaccaccgaggagctgctggtgctgctggaggagggcacctggaacagcatccagcagcaggagatcaagagactgagcagcgagagcagcagccagtgggccctggtggtgcagttctgcagactgcacaacatgaagctgagcatcagctacctgagagagtgcgccaaggccaacgactggctgcagttcatcatccacagccagctgcacaactaccaccccgccgaggtgaagagcctgatccagtacttcagccccgtgatccaggaccacctgagactggccttcgagaacctgcccagcgtgcccaccagcaagatggacagcgaccaggtgtgcaacaagtgcccccaggagctgcagggcagcaagcaggagatgaccgacctgttcgagatcctgctgcagtgcagcgaggagcccgacagctggcactggctgctggtggaggccgtgaagcagcaggcccccatcctgagcgtgctggccagctgcctgcagggcgccagcgccatcagctgcctgtgcgtgtggatcatcaccagcgtggaggacaacgtggccaccgaggccatgggccacatccaggacagcaccgaggaccacacctggaacctggaggacctgagcgtgatctggagaaccctgctgaccagacagaagagcaagaccctgatcagaggcttccagctgttcttcaaggacagccccctgctgctggtgatggagatgtacgagctgtgcatgttcttcagaaactacaaggaggccgaggccaagctgctggagttccagaagagcctggagaccctgaacaccgccgccaccaaggtgcaccccgtgatccccgccatgtggctggaggaccaggtgtgcttcctgctgaagctgatgctgcagcagtgcaagacccagtacgagctgggcaagctgctgcagctgttcgtggagagagagcacctgttcagcgacggccccgacgtgaagaagctgtgcatcctgtgccagatcctgaaggacaccagcatcgccatcaaccacaccatcatcaccagctacagcatcgagaacctgcagcacgagtgcagaagcatcctggagagactgcagaccgacggccagttcgccctggccagaagagtggccgagctggccgagctgcccgtggacaacctggtgatcaaggagatcacccaggagatgcagaccctgaagcacatcgagcagtggagcctgaagcaggccagaatcgacttctggaagaagtgccacgagaacttcaagaagaacagcatcagcagcaaggccgccagcagcttcttcagcacccaggcccacgtggcctgcgagcaccccaccggctggagcagcatggaggagagacacctgctgctgaccctggccggccactggctggcccaggaggacgtggtgcccctggacaagctggaggagctggagaagcagatctggctgtgcagaatcacccagcacaccctgggcagaaaccaggaggagaccgagcccagattcagcagacagatcagcaccagcggcgagctgagcttcgacagcctggccagcgagttcagcttcagcaagctggccgccctgaacaccagcaagtacctggagctgaacagcctgcccagcaaggagacctgcgagaacagactggactggaaggagcaggagagcctgaacttcctgatcggcagactgctggacgacggctgcgtgcacgaggccagcagagtgtgcagatacttccacttctacaaccccgacgtggccctggtgctgcactgcagagccctggccagcggcgaggccagcatggaggacctgcaccccgagatccacgccctgctgcagagcgccgagctgctggaggaggaggcccccgacatccccctgagaagagtgcacagcaccagcagcctggacagccagaagttcgtgaccgtgcccagcagcaacgaggtggtgaccaacctggaggtgctgaccagcaagtgcctgcacggcaagaactactgcagacaggtgctgtgcctgtacgacctggccaaggagctgggctgcagctacaccgacgtggccgcccaggacggcgaggccatgctgagaaagatcctggccagccagcagcccgacagatgcaagagagcccaggccttcatcagcacccagggcctgaagcccgacaccgtggccgagctggtggccgaggaggtgaccagagagctgctgaccagcagccagggcaccggcgccctgccccccggcgacagccagcccctgtag

SEQ ID NO: 100459 - DNA, 2001 bp, synthetic construct
  misc_feature 1..2001: note = Description of Artificial Sequence: Synthetic coding sequence
  source 1..2001: mol_type = other DNA
atggagcaggagccccagaacggcgagcccgccgagatcaagatcatcagagaggcctacaagaaggccttcctgttcgtgaacaagggcctgaacaccgacgagctgggccagaaggaggaggccaagaactactacaagcagggcatcggccacctgctgagaggcatcagcatcagcagcaaggagagcgagcacaccggccccggctgggagagcgccagacagatgcagcagaagatgaaggagaccctgcagaacgtgagaaccagactggagatcctggagaagggcctggccaccagcctgcagaacgacctgcaggaggtgcccaagctgtaccccgagttcccccccaaggacatgtgcgagaagctgcccgagccccagagcttcagcagcgccccccagcacgccgaggtgaacggcaacaccagcacccccagcgccggcgccgtggccgcccccgccagcctgagcctgcccagccagagctgccccgccgaggccccccccgcctacaccccccaggccgccgagggccactacaccgtgagctacggcaccgacagcggcgagttcagcagcgtgggcgaggagttctacagaaaccacagccagcccccccccctggagaccctgggcctggacgccgacgagctgatcctgatccccaacggcgtgcagatcttcttcgtgaaccccgccggcgaggtgagcgcccccagctaccccggctacctgagaatcgtgagattcctggacaacagcctggacaccgtgctgaacagaccccccggcttcctgcaggtgtgcgactggctgtaccccctggtgcccgacagaagccccgtgctgaagtgcaccgccggcgcctacatgttccccgacaccatgctgcaggccgccggctgcttcgtgggcgtggtgctgagcagcgagctgcccgaggacgacagagagctgttcgaggacctgctgagacagatgagcgacctgagactgcaggccaactggaacagagccgaggaggagaacgagttccagatccccggcagaaccagacccagcagcgaccagctgaaggaggccagcggcaccgacgtgaagcagctggaccagggcaacaaggacgtgagacacaagggcaagagaggcaagagagccaaggacaccagcagcgaggaggtgaacctgagccacatcgtgccctgcgagcccgtgcccgaggagaagcccaaggagctgcccgagtggagcgagaaggtggcccacaacatcctgagcggcgccagctgggtgagctggggcctggtgaagggcgccgagatcaccggcaaggccatccagaagggcgccagcaagctgagagagagaatccagcccgaggagaagcccgtggaggtgagccccgccgtgaccaagggcctgtacatcgccaagcaggccaccggcggcgccgccaaggtgagccagttcctggtggacggcgtgtgcaccgtggccaactgcgtgggcaaggagctggccccccacgtgaagaagcacggcagcaagctggtgcccgagagcctgaagaaggacaaggacggcaagagccccctggacggcgccatggtggtggccgccagcagcgtgcagggcttcagcaccgtgtggcagggcctggagtgcgccgccaagtgcatcgtgaacaacgtgagcgccgagaccgtgcagaccgtgagatacaagtacggctacaacgccggcgaggccacccaccacgccgtggacagcgccgtgaacgtgggcgtgaccgcctacaacatcaacaacatcggcatcaaggccatggtgaagaagaccgccacccagaccggccacaccctgctggaggactaccagatcgtggacaacagccagagagagaaccaggagggcgccgccaacgtgaacgtgagaggcgagaaggacgagcagaccaaggaggtgaaggaggccaagaagaaggacaagtag

SEQ ID NO: 100460 - DNA, 2001 bp, synthetic construct; identical to SEQ ID NO: 100459
  misc_feature 1..2001: note = Description of Artificial Sequence: Synthetic coding sequence
  source 1..2001: mol_type = other DNA

SEQ ID NO: 100461 - DNA, 2001 bp, synthetic construct; identical to SEQ ID NO: 100459
  misc_feature 1..2001: note = Description of Artificial Sequence: Synthetic coding sequence
  source 1..2001: mol_type = other DNA

SEQ ID NO: 100462 - DNA, 2001 bp, synthetic construct; identical to SEQ ID NO: 100459
  misc_feature 1..2001: note = Description of Artificial Sequence: Synthetic coding sequence
  source 1..2001: mol_type = other DNA

SEQ ID NO: 100463 - DNA, 846 bp, synthetic construct
  misc_feature 1..846: note = Description of Artificial Sequence: Synthetic coding sequence
  source 1..846: mol_type = other DNA
atgggcgagatcaaggtgagccccgactacaactggttcagaggcaccgtgcccctgaagaagatcatcgtggacgacgacgacagcaagatctggagcctgtacgacgccggccccagaagcatcagatgccccctgatcttcctgccccccgtgagcggcaccgccgacgtgttcttcagacagatcctggccctgaccggctggggctacagagtgatcgccgtgcacctgttcggcgccagcctgggcggcttcctggcccagaagttcgccgagtacacccacaagagccccagagtgcacagcctgatcctgtgcaacagcttcagcgacaccagcatcttcaaccagacctggaccgccaacagcttctggctgatgcccgccttcatgctgaagaagatcgtgctgggcaacttcagcagcggccccgtggaccccatgatggccgacgccatcgacttcatggtggacagactggagagcctgggccagagcgagctggccagcagactgaccctgaactgccagaacagctacgtggagccccacaagatcagagacatccccgtgaccatcatggacgtgttcgaccagagcgccctgagcaccgaggccaaggaggagatgtacaagctgtaccccaacgccagaagagcccacctgaagaccggcggcaacttcccctacctgtgcagaagcgccgaggtgaacctgtacgtgcagatccacctgctgcagttccacggcaccaagtacgccgccatcgaccccagcatggtgagcgccgaggagctggaggtgcagaagggcagcctgggcatcagccaggaggagcagtag

SEQ ID NO: 100464 - DNA, 927 bp, synthetic construct
  misc_feature 1..927: note = Description of Artificial Sequence: Synthetic coding sequence
  source 1..927: mol_type = other DNA
atgggcgagatcaaggtgagccccgactacaactggttcagaggcaccgtgcccctgaagaagatcatcgtggacgacgacgacagcaagatctggagcctgtacgacgccggccccagaagcatcagatgccccctgatcttcctgccccccgtgagcggcaccgccgacgtgttcttcagacagatcctggccctgaccggctggggctacagagtgatcgccctgcagtaccccgtgtactgggaccacctggagttctgcgacggcttcagaaagctgctggaccacctgcagctggacaaggtgcacctgttcggcgccagcctgggcggcttcctggcccagaagttcgccgagtacacccacaagagccccagagtgcacagcctgatcctgtgcaacagcttcagcgacaccagcatcttcaaccagacctggaccgccaacagcttctggctgatgcccgccttcatgctgaagaagatcgtgctgggcaacttcagcagcggccccgtggaccccatgatggccgacgccatcgacttcatggtggacagactggagagcctgggccagagcgagctggccagcagactgaccctgaactgccagaacagctacgtggagccccacaagatcagagacatccccgtgaccatcatggacgtgttcgaccagagcgccctgagcaccgaggccaaggaggagatgtacaagctgtaccccaacgccagaagagcccacctgaagaccggcggcaacttcccctacctgtgcagaagcgccgaggtgaacctgtacgtgcagatccacctgctgcagttccacggcaccaagtacgccgccatcgaccccagcatggtgagcgccgaggagctggaggtgcagaagggcagcctgggcatcagccaggaggagcagtag

SEQ ID NO: 100465 - DNA, 927 bp, synthetic construct; identical to SEQ ID NO: 100464
  misc_feature 1..927: note = Description of Artificial Sequence: Synthetic coding sequence
  source 1..927: mol_type = other DNA

SEQ ID NO: 100466 - DNA, 2388 bp, synthetic construct
  misc_feature 1..2388: note = Description of Artificial Sequence: Synthetic coding sequence
  source 1..2388: mol_type = other DNA
atggccgtgctgctgctgctgctgagagccctgagaagaggccccggccccggccccagacccctgtggggccccggccccgcctggagccccggcttccccgccagacccggcagaggcagaccctacatggccagcagaccccccggcgacctggccgaggccggcggcagagccctgcagagcctgcagctgagactgctgacccccaccttcgagggcatcaacggcctgctgctgaagcagcacctggtgcagaaccccgtgagactgtggcagctgctgggcggcaccttctacttcaacaccagcagactgaagcagaagaacaaggagaaggacaagagcaagggcaaggcccccgaggaggacgaggaggagagaagaagaagagagagagacgaccagatgtacagagagagactgagaaccctgctggtgatcgccgtggtgatgagcctgctgaacgccctgagcaccagcggcggcagcatcagctggaacgacttcgtgcacgagatgctggccaagggcgaggtgcagagagtgcaggtggtgcccgagagcgacgtggtggaggtgtacctgcaccccggcgccgtggtgttcggcagacccagactggccctgatgtacagaatgcaggtggccaacatcgacaagttcgaggagaagctgagagccgccgaggacgagctgaacatcgaggccaaggacagaatccccgtgagctacaagagaaccggcttcttcggcaacgccctgtacagcgtgggcatgaccgccgtgggcctggccatcctgtggtacgtgttcagactggccggcatgaccggcagagagggcggcttcagcgccttcaaccagctgaagatggccagattcaccatcgtggacggcaagatgggcaagggcgtgagcttcaaggacgtggccggcatgcacgaggccaagctggaggtgagagagttcgtggactacctgaagagccccgagagattcctgcagctgggcgccaaggtgcccaagggcgccctgctgctgggcccccccggctgcggcaagaccctgctggccaaggccgtggccaccgaggcccaggtgcccttcctggccatggccggccccgagttcgtggaggtgatcggcggcctgggcgccgccagagtgagaagcctgttcaaggaggccagagccagagccccctgcatcgtgtacatcgacgagatcgacgccgtgggcaagaagagaagcaccaccatgagcggcttcagcaacaccgaggaggagcagaccctgaaccagctgctggtggagatggacggcatgggcaccaccgaccacgtgatcgtgctggccagcaccaacagagccgacatcctggacggcgccctgatgagacccggcagactggacagacacgtgttcatcgacctgcccaccctgcaggagagaagagagatcttcgagcagcacctgaagagcctgaagctgacccagagcagcaccttctacagccagagactggccgagctgacccccggcttcagcggcgccgacatcgccaacatctgcaacgaggccgccctgcacgccgccagagagggccacaccagcgtgcacaccctgaacttcgagtacgccgtggagagagtgctggccggcaccgccaagaagagcaagatcctgagcaaggaggagcagaaggtggtggccttccacgagagcggccacgccctggtgggctggatgctggagcacaccgaggccgtgatgaaggtgagcatcacccccagaaccaacgccgccctgggcttcgcccagatgctgcccagagaccagcacctgttcaccaaggagcagctgttcgagagaatgtgcatggccctgggcggcagagccagcgaggccctgagcttcaacgaggtgaccagcggcgcccaggacgacctgagaaaggtgaccagaatcgcctacagcatggtgaagcagttcggcatggcccccggcatcggccccatcagcttccccgaggcccaggagggcctgatgggcatcggcagaagacccttcagccagggcctgcagcagatgatggaccacgaggccagactgctggtggccaaggcctacagacacaccgagaaggtgctgcaggacaacctggacaagctgcaggccctggccaacgccctgctggagaaggaggtgatcaactacgaggacatcgaggccctgatcggcccccccccccacggccccaagaagatgatcgccccccagagatggatcgacgcccagagagagaagcaggacctgggcgaggaggagaccgaggagacccagcagccccccctgggcggcgaggagcccacctggcccaagtag

SEQ ID NO: 100467 - DNA, 672 bp, synthetic construct
  misc_feature 1..672: note = Description of Artificial Sequence: Synthetic coding sequence
  source 1..672: mol_type = other DNA
atgagactgagatgcaccagaagaggcagagacaccctgccctgcaccctgagcaccagcagcaccccctggagcgccagcagccaggtgcccagagcccagctgggcaaggccgtgggcagctgcagaggcgtgggcagctgctgcgccagacactgcaagacccacctggccagcctgagacagccctgcggcgagagaaccggcgccgcctgcgtgctgctgatctacttcagagtgaccatctacttctacgtggagatcgagaagctgctgatcatcgtggccaagcaggagggcctgagcggcaaccacaagcccgtggagagaaagtacatgacctacctgagcgcccaggaccacgagctgatccaggtggtgcagaacggccacctgcagatgtgcggcaagagcgagaccggcaacgaggccagccccggcctgcccaagagagccagaagctgccccagaaagaacagaaagtggctgagattcatgagcagagccaccccctggtgggccggctgctggagcaccagaagagacgagggcctgcacaaccccagcaccaacgccgccctgggcttcgcccaggccccccagagacccgcccccctgcacgagcagctgttcgagagaatgtgcatggccctgggcggcagagccagctag

SEQ ID NO: 100468 - DNA, 618 bp, synthetic construct
  misc_feature 1..618: note = Description of Artificial Sequence: Synthetic coding sequence
  source 1..618: mol_type = other DNA
ctgggcccccaggcctgcaccgtggtgcccagaagcaagtgcttcgacctggagatggtgagcagcagatgggagcccctgctgctgctgaccgaggtgaccagcgccaacgaggtgtgggtgaccagcaacagcaccgccctggtgttcgtgagcgacaacgtgagagaggagctggaggaggtgcaggacctgctgtgcagaaccctgcccctgcccgtgcagctgagcttccccgaggaggccctggacgtggccagagtggcccacgtgttcgtgagccccttctgcttcagcgccggcagcgaggagagaagaagaagagagagagacgaccagatgtacagagagagactgagaaccctgctggtgatcgccgtggtgatgagcctgctgaacgccctgagcaccagcggcggcagcatcagctggaacgacttcgtgcacgagatgctggccaagggcgaggtgcagagagtgcaggtggtgcccgagagcgacgtggtggaggtgtacctgcaccccggcgccgtggtgttcggcagacccagactggccctgatgtacagaatgcaggtggccaacatcgacaagttcgaggagaagctgagagcctag

SEQ ID NO: 100469 - DNA, 1470 bp, synthetic construct
  misc_feature 1..1470: note = Description of Artificial Sequence: Synthetic coding sequence
  source 1..1470: mol_type = other DNA
atggccgtgctgctgctgctgctgagagccctgagaagaggccccggccccggccccagacccctgtggggccccggccccgcctggagccccggcttccccgccagacccggcagaggcagaccctacatggccagcagaccccccggcgacctggccgaggccggcggcagagccctgcagagcctgcagctgagactgctgacccccaccttcgagggcatcaacggcctgctgctgaagcagcacctggtgcagaaccccgtgagactgtggcagctgctgggcggcaccttctacttcaacaccagcagactgaagcagaagaacaaggagaaggacaagagcaagggcaaggcccccgaggaggacgaggaggagagaagaagaagagagagagacgaccagatgtacagagagagactgagaaccctgctggtgatcgccgtggtgatgagcctgctgaacgccctgagcaccagcggcggcagcatcagctggaacgacttcgtgcacgagatgctggccaagggcgaggtgcagagagtgcaggtggtgcccgagagcgacgtggtggaggtgtacctgcaccccggcgccgtggtgttcggcagacccagactggccctgatgtacagaatgcaggtggccaacatcgacaagttcgaggagaagctgagagccgccgaggacgagctgaacatcgaggccaaggacagaatccccgtgagctacaagagaaccggcttcttcggcaacgccctgtacagcgtgggcatgaccgccgtgggcctggccatcctgtggtacgtgttcagactggccggcatgaccggcagagagggcggcttcagcgccttcaaccagctgaagatggccagattcaccatcgtggacggcaagatgggcaagggcgtgagcttcaaggacgtggccggcatgcacgaggccaagctggaggtgagagagttcgtggactacctgaagagccccgagagattcctgcagctgggcgccaaggtgcccaagggcgccctgctgctgggcccccccggctgcggcaagaccctgctggccaaggccgtggccaccgaggcccaggtgcccttcctggccatggccggccccgagttcgtggaggtgatcggcggcctgggcgccgccagagtgagaagcctgttcaaggaggccagagccagagccccctgcatcgtgtacatcgacgagatcgacgccgtgggcaagaagagaagcaccaccatgagcggcttcagcaacaccgaggaggagcagaccctgaaccagctgctggtggagatggacggcgccagcctggaccagctgcccagccagggcaccatgagaaagctgagaggcaagacccccgcctgcagctgcctgaccgagcccaccggcagcagaagagccatggagggccacagcctgtgctggggctgcctgctgcactag

SEQ ID NO: 100470 - DNA, 1851 bp, synthetic construct
  misc_feature 1..1851: note = Description of Artificial Sequence: Synthetic coding sequence
  source 1..1851: mol_type = other DNA
atgaacagccccggcggcagaggcaagaagaagggcagcggcggcgccagcaaccccgtgccccccagacccccccccccctgcctggcccccgccccccccgccgccggccccgcccccccccccgagagcccccacaagagaaacctgtactacttcagctaccccctgttcgtgggcttcgccctgctgagactggtggccttccacctgggcctgctgttcgtgtggctgtgccagagattcagcagagccctgatggccgccaagagaagcagcggcgccgcccccgcccccgccagcgccagcgcccccgcccccgtgcccggcggcgaggccgagagagtgagagtgttccacaagcaggccttcgagtacatcagcatcgccctgagaatcgacgaggacgagaaggccggccagaaggagcaggccgtggagtggtacaagaagggcatcgaggagctggagaagggcatcgccgtgatcgtgaccggccagggcgagcagtgcgagagagccagaagactgcaggccaagatgatgaccaacctggtgatggccaaggacagactgcagctgctggagaagatgcagcccgtgctgcccttcagcaagagccagaccgacgtgtacaacgacagcaccaacctggcctgcagaaacggccacctgcagagcgagagcggcgccgtgcccaagagaaaggaccccctgacccacaccagcaacagcctgcccagaagcaagaccgtgatgaagaccggcagcgccggcctgagcggccaccacagagcccccagctacagcggcctgagcatggtgagcggcgtgaagcagggcagcggccccgcccccaccacccacaagggcacccccaagaccaacagaaccaacaagcccagcacccccaccaccgccaccagaaagaagaaggacctgaagaacttcagaaacgtggacagcaacctggccaacctgatcatgaacgagatcgtggacaacggcaccgccgtgaagttcgacgacatcgccggccaggacctggccaagcaggccctgcaggagatcgtgatcctgcccagcctgagacccgagctgttcaccggcctgagagcccccgccagaggcctgctgctgttcggcccccccggcaacggcaagaccatgctggccaaggccgtggccgccgagagcaacgccaccttcttcaacatcagcgccgccagcctgaccagcaagtacgtgggcgagggcgagaagctggtgagagccctgttcgccgtggccagagagctgcagcccagcatcatcttcatcgacgaggtggacagcctgctgtgcgagagaagagagggcgagcacgacgccagcagaagactgaagaccgagttcctgatcgagttcgacggcgtgcagagcgccggcgacgacagagtgctggtgatgggcgccaccaacagaccccaggagctggacgaggccgtgctgagaagattcatcaagagagtgtacgtgagcctgcccaacgaggagaccagactgctgctgctgaagaacctgctgtgcaagcagggcagccccctgacccagaaggagctggcccagctggccagaatgaccgacggctacagcggcagcgacctgaccgccctggccaaggacgccgccctgggccccatcagagagctgaagcccgagcaggtgaagaacatgagcgccagcgagatgagaaacatcagactgagcgacttcaccgagagcctgaagaagatcaagagaagcgtgagcccccagaccctggaggcctacatcagatggaacaaggacttcggcgacaccaccgtgtag

SEQ ID NO: 100471 - DNA, 1755 bp, synthetic construct
  misc_feature 1..1755: note = Description of Artificial Sequence: Synthetic coding sequence
  source 1..1755: mol_type = other DNA
atgaacagccccggcggcagaggcaagaagaagggcagcggcggcgccagcaaccccgtgccccccagacccccccccccctgcctggcccccgccccccccgccgccggccccgcccccccccccgagagcccccacaagagaaacctgtactacttcagctaccccctgttcgtgggcttcgccctgctgagactggtggccttccacctgggcctgctgttcgtgtggctgtgccagagattcagcagagccctgatggccgccaagagaagcagcggcgccgcccccgcccccgccagcgccagcgcccccgcccccgtgcccggcggcgaggccgagagagtgagagtgttccacaagcaggccttcgagtacatcagcatcgccctgagaatcgacgaggacgagaaggccggccagaaggagcaggccgtggagtggtacaagaagggcatcgaggagctggagaagggcatcgccgtgatcgtgaccggccagggcgagcagtgcgagagagccagaagactgcaggccaagatgatgaccaacctggtgatggccaaggacagactgcagctgctggagagcggcgccgtgcccaagagaaaggaccccctgacccacaccagcaacagcctgcccagaagcaagaccgtgatgaagaccggcagcgccggcctgagcggccaccacagagcccccagctacagcggcctgagcatggtgagcggcgtgaagcagggcagcggccccgcccccaccacccacaagggcacccccaagaccaacagaaccaacaagcccagcacccccaccaccgccaccagaaagaagaaggacctgaagaacttcagaaacgtggacagcaacctggccaacctgatcatgaacgagatcgtggacaacggcaccgccgtgaagttcgacgacatcgccggccaggacctggccaagcaggccctgcaggagatcgtgatcctgcccagcctgagacccgagctgttcaccggcctgagagcccccgccagaggcctgctgctgttcggcccccccggcaacggcaagaccatgctggccaaggccgtggccgccgagagcaacgccaccttcttcaacatcagcgccgccagcctgaccagcaagtacgtgggcgagggcgagaagctggtgagagccctgttcgccgtggccagagagctgcagcccagcatcatcttcatcgacgaggtggacagcctgctgtgcgagagaagagagggcgagcacgacgccagcagaagactgaagaccgagttcctgatcgagttcgacggcgtgcagagcgccggcgacgacagagtgctggtgatgggcgccaccaacagaccccaggagctggacgaggccgtgctgagaagattcatcaagagagtgtacgtgagcctgcccaacgaggagaccagactgctgctgctgaagaacctgctgtgcaagcagggcagccccctgacccagaaggagctggcccagctggccagaatgaccgacggctacagcggcagcgacctgaccgccctggccaaggacgccgccctgggccccatcagagagctgaagcccgagcaggtgaagaacatgagcgccagcgagatgagaaacatcagactgagcgacttcaccgagagcctgaagaagatcaagagaagcgtgagcccccagaccctggaggcctacatcagatggaacaaggacttcggcgacaccaccgtgtag

SEQ ID NO: 100472 - DNA, 26394 bp, synthetic construct
  misc_feature 1..26394: note = Description of Artificial Sequence: Synthetic coding sequence
  source 1..26394: mol_type = other DNA
atggccaccagcagaggcgccagcagatgccccagagacatcgccaacgtgatgcagagactgcaggacgagcaggagatcgtgcagaagagaaccttcaccaagtggatcaacagccacctggccaagagaaagccccccatggtggtggacgacctgttcgaggacatgaaggacggcgtgaagctgctggccctgctggaggtgctgagcggccagaagctgccctgcgagcagggcagaagaatgaagagaatccacgccgtggccaacatcggcaccgccctgaagttcctggagggcagaaagatcaagctggtgaacatcaacagcaccgacatcgccgacggcagacccagcatcgtgctgggcctgatgtggaccatcatcctgtacttccagatcgaggagctgaccagcaacctgccccagctgcagagcctgagcagcagcgccagcagcgtggacagcatcgtgagcagcgagacccccagcccccccagcaagagaaaggtgaccaccaagatccagggcaacgccaagaaggccctgctgaagtgggtgcagtacaccgccggcaagcagaccggcatcgaggtgaaggacttcggcaagagctggagaagcggcgtggccttccacagcgtgatccacgccatcagacccgagctggtggacctggagaccgtgaagggcagaagcaacagagagaacctggaggacgccttcaccatcgccgagaccgagctgggcatccccagactgctggaccccgaggacgtggacgtggacaagcccgacgagaagagcatcatgacctacgtggcccagttcctgaagcactaccccgacatccacaacgccagcaccgacggccaggaggacgacgagatcctgcccggcttccccagcttcgccaacagcgtgcagaacttcaagagagaggacagagtgatcttcaaggagatgaaggtgtggatcgagcagttcgagagagacctgaccagagcccagatggtggagagcaacctgcaggacaagtaccagagcttcaagcacttcagagtgcagtacgagatgaagagaaagcagatcgagcacctgatccagcccctgcacagagacggcaagctgagcctggaccaggccctggtgaagcagagctgggacagagtgaccagcagactgttcgactggcacatccagctggacaagagcctgcccgcccccctgggcaccatcggcgcctggctgtacagagccgaggtggccctgagagaggagatcaccgtgcagcaggtgcacgaggagaccgccaacaccatccagagaaagctggagcagcacaaggacctgctgcagaacaccgacgcccacaagagagccttccacgagatctacagaaccagaagcgtgaacggcatccccgtgccccccgaccagctggaggacatggccgagagattccacttcgtgagcagcaccagcgagctgcacctgatgaagatggagttcctggagctgaagtacagactgctgagcctgctggtgctggccgagagcaagctgaagagctggatcatcaagtacggcagaagagagagcgtggagcagctgctgcagaactacgtgagcttcatcgagaacagcaagttcttcgagcagtacgaggtgacctaccagatcctgaagcagaccgccgagatgtacgtgaaggccgacggcagcgtggaggaggccgagaacgtgatgaagttcatgaacgagaccaccgcccagtggagaaacctgagcgtggaggtgagaagcgtgagaagcatgctggaggaggtgatcagcaactgggacagatacggcaacaccgtggccagcctgcaggcctggctggaggacgccgagaagatgctgaaccagagcgagaacgccaagaaggacttcttcagaaacctgccccactggatccagcagcacaccgccatgaacgacgccggcaacttcctgatcgagacctgcgacgagatggtgagcagagacctgaagcagcagctgctgctgctgaacggcagatggagagagctgttcatggaggtgaagcagtacgcccaggccgacgagatggacagaatgaagaaggagtacaccgactgcgtggtgaccctgagcgccttcgccaccgaggcccacaagaagctgagcgagcccctggaggtgagcttcatgaacgtgaagctgctgatccaggacctggaggacatcgagcagagagtgcccgtgatggacgcccagtacaagatcatcaccaagaccgcccacctgatcaccaaggagagcccccaggaggagggcaaggagatgttcgccaccatgagcaagctgaaggagcagctgaccaaggtgaaggagtgctacagccccctgctgtacgagagccagcagctgctgatccccctggaggagctggagaagcagatgaccagcttctacgacagcctgggcaagatcaacgagatcatcaccgtgctggagagagaggcccagagcagcgccctgttcaagcagaagcaccaggagctgctggcctgccaggagaactgcaagaagaccctgaccctgatcgagaagggcagccagagcgtgcagaagttcgtgaccctgagcaacgtgctgaagcacttcgaccagaccagactgcagagacagatcgccgacatccacgtggccttccagagcatggtgaagaagaccggcgactggaagaagcacgtggagaccaacagcagactgatgaagaagttcgaggagagcagagccgagctggagaaggtgctgagaatcgcccaggagggcctggaggagaagggcgaccccgaggagctgctgagaagacacaccgagttcttcagccagctggaccagagagtgctgaacgccttcctgaaggcctgcgacgagctgaccgacatcctgcccgagcaggagcagcagggcctgcaggaggccgtgagaaagctgcacaagcagtggaaggacctgcagggcgaggccccctaccacctgctgcacctgaagatcgacgtggagaagaacagattcctggccagcgtggaggagtgcagaaccgagctggacagagagaccaagctgatgccccaggagggcagcgagaagatcatcaaggagcacagagtgttcttcagcgacaagggcccccaccacctgtgcgagaagagactgcagctgatcgaggagctgtgcgtgaagctgcccgtgagagaccccgtgagagacacccccggcacctgccacgtgaccctgaaggagctgagagccgccatcgacagcacctacagaaagctgatggaggaccccgacaagtggaaggactacaccagcagattcagcgagttcagcagctggatcagcaccaacgagacccagctgaagggcatcaagggcgaggccatcgacaccgccaaccacggcgaggtgaagagagccgtggaggagatcagaaacggcgtgaccaagagaggcgagaccctgagctggctgaagagcagactgaaggtgctgaccgaggtgagcagcgagaacgaggcccagaagcagggcgacgagctggccaagctgagcagcagcttcaaggccctggtgaccctgctgagcgaggtggagaagatgctgagcaacttcggcgactgcgtgcagtacaaggagatcgtgaagaacagcctggaggagctgatcagcggcagcaaggaggtgcaggagcaggccgagaagatcctggacaccgagaacctgttcgaggcccagcagctgctgctgcaccaccagcagaagaccaagagaatcagcgccaagaagagagacgtgcagcagcagatcgcccaggcccagcagggcgagggcggcctgcccgacagaggccacgaggagctgagaaagctggagagcaccctggacggcctggagagaagcagagagagacaggagagaagaatccaggtgaccctgagaaagtgggagagattcgagaccaacaaggagaccgtggtgagatacctgttccagaccggcagcagccacgagagattcctgagcttcagcagcctggagagcctgagcagcgagctggagcagaccaaggagttcagcaagagaaccgagagcatcgccgtgcaggccgagaacctggtgaaggaggccagcgagatccccctgggcccccagaacaagcagctgctgcagcagcaggccaagagcatcaaggagcaggtgaagaagctggaggacaccctggaggaggacatcaagaccatggagatggtgaagaccaagtgggaccacttcggcagcaacttcgagaccctgagcgtgtggatcaccgagaaggagaaggagctgaacgccctggagaccagcagcagcgccatggacatgcagatcagccagatcaaggtgaccatccaggagatcgagagcaagctgagcagcatcgtgggcctggaggaggaggcccagagcttcgcccagttcgtgaccaccggcgagagcgccagaatcaaggccaagctgacccagatcagaagatacggcgaggagctgagagagcacgcccagtgcctggagggcaccatcctgggccacctgagccagcagcagaagttcgaggagaacctgagaaagatccagcagagcgtgagcgagttcgaggacaagctggccgtgcccatcaagatctgcagcagcgccaccgagacctacaaggtgctgcaggagcacatggacctgtgccaggccctggagagcctgagcagcgccatcaccgccttcagcgccagcgccagaaaggtggtgaacagagacagctgcgtgcaggaggccgccgccctgcagcagcagtacgaggacatcctgagaagagccaaggagagacagaccgccctggagaacctgctggcccactggcagagactggagaaggagctgagcagcttcctgacctggctggagagaggcgaggccaaggccagcagccccgagatggacatcagcgccgacagagtgaaggtggagggcgagctgcagctgatccaggccctgcagaacgaggtggtgagccaggccagcttctacagcaagctgctgcagctgaaggagagcctgttcagcgtggccagcaaggacgacgtgaagatgatgaagctgcacctggagcagctggacgagagatggagagacctgccccagatcatcaacaagagaatcaacttcctgcagagcgtggtggccgagcaccagcagttcgacgagctgctgctgagcttcagcgtgtggatcaagctgttcctgagcgagctgcagaccaccagcgagatcagcatcatggaccaccaggtggccctgaccagacacaaggaccacgccgccgaggtggagagcaagaagggcgagctgcagagcctgcagggccacctggccaagctgggcagcctgggcagagccgaggacctgcacctgctgcagggcaaggccgaggactgcttccagctgttcgaggaggccagccaggtggtggagagaagacagctggccctgagccacctggccgagttcctgcagagccacgccagcctgagcggcatcctgagacagctgagacagaccgtggaggccaccaacagcatgaacaagaacgagagcgacctgatcgagaaggacctgaacgacgccctgcagaacgccaaggccctggagagcgccgccgtgagcctggacggcatcctgagcaaggcccagtaccacctgaagatcggcagcagcgagcagagaaccagctgcagagccaccgccgaccagctgtgcggcgaggtggagagaatccagaacctgctgggcaccaagcagagcgaggccgacgccctggccgtgctgaagaaggccttccaggaccagaaggaggagctgctgaagagcatcgaggacatcgaggagagaaccgacaaggagagactgaaggagcccaccagacaggccctgcagcagagactgagagtgttcaaccagctggaggacgagctgaacagccacgagcacgagctgtgctggctgaaggacaaggccaagcagatcgcccagaaggacgtggccttcgcccccgaggtggacagagagatcaacagactggaggtgacctgggacgacaccaagagactgatccacgagaaccagggccagtgctgcggcctgatcgacctgatgagagagtaccagaacctgaagagcgccgtgagcaaggtgctggagaacgccagcagcgtgatcgtgaccagaaccaccatcaaggaccaggaggacctgaagtgggccttcagcaagcacgagaccgccaagaacaagatgaactacaagcagaaggacctggacaacttcaccagcaagggcaagcacctgctgagcgagctgaagaagatccacagcagcgacttcagcctggtgaagaccgacatggagagcaccgtggacaagtggctggacgtgagcgagaagctggaggagaacatggacagactgagagtgagcctgagcatctgggacgacgtgctgagcaccagagacgagatcgagggctggagcaacaactgcgtgccccagatggccgagaacatcagcaacctggacaaccacctgagagccgaggagctgctgaaggagttcgagagcgaggtgaagaacaaggccctgagactggaggagctgcacagcaaggtgaacgacctgaaggagctgaccaagaacctggagaccccccccgacctgcagttcatcgaggccgacctgatgcagaagctggagcacgccaaggagatcaccgaggtggccaagggcaccctgaaggacttcaccgcccagagcacccaggtggagaagttcatcaacgacatcaccacctggttcaccaaggtggaggagagcctgatgaactgcgcccagaacgagacctgcgaggccctgaagaaggtgaaggacatccagaaggagctgcagagccagcagagcaacatcagcagcacccaggagaacctgaacagcctgtgcagaaagtaccacagcgccgagctggagagcctgggcagagccatgaccggcctgatcaagaagcacgaggccgtgagccagctgtgcagcaagacccaggccagcctgcaggagagcctggagaagcacttcagcgagagcatgcaggagttccaggagtggttcctgggcgccaaggccgccgccaaggagagcagcgacagaaccggcgacagcaaggtgctggaggccaagctgcacgacctgcagaacatcctggacagcgtgagcgacggccagagcaagctggacgccgtgacccaggagggccagaccctgtacgcccacctgagcaagcagatcgtgagcagcatccaggagcagatcaccaaggccaacgaggagttccaggccttcctgaagcagtgcctgaaggacaagcaggccctgcaggactgcgccagcgagctgggcagcttcgaggaccagcacagaaagctgaacctgtggatccacgagatggaggagagattcaacaccgagaacctgggcgagagcaagcagcacatccccgagaagaagaacgaggtgcacaaggtggagatgttcctgggcgagctgctggccgccagagagagcctggacaagctgagccagagaggccagctgctgagcgaggagggccacggcgccggccaggagggcagactgtgcagccagctgctgaccagccaccagaacctgctgagaatgaccaaggagaagctgagaagctgccaggtggccctgcaggagcacgaggccctggaggaggccctgcagagcatgtggttctgggtgaaggccatccaggacagactggcctgcgccgagagcaccctgggcagcaaggacaccctggagaagagactgagccagatccaggacatcctgctgatgaagggcgagggcgaggtgaagctgaacatggccatcggcaagggcgagcaggccctgagaagcagcaacaaggagggccagagagtgatccagacccagctggagaccctgaaggaggtgtgggccgacatcatgagcagcagcgtgcacgcccagagcaccctggagagcgtgatcagccagtggaacgactacgtggagagaaagaaccagctggagcagtggatggagagcgtggaccagaagatcgagcaccccctgcagccccagcccggcctgaaggagaagttcgtgctgctggaccacctgcagagcatcctgagcgaggccgaggaccacaccagagccctgcacagactgatcgccaagagcagagagctgtacgagaagaccgaggacgagagcttcaaggacaccgcccaggaggagctgaagacccagttcaacgacatcatgaccgtggccaaggagaagatgagaaaggtggaggagatcgtgaaggaccacctgatgtacctggacgccgtgcacgagttcaccgactggctgcacagcgccaaggaggagctgcacagatggagcgacatgagcggcgacagcagcgccacccagaagaagctgagcaagatcaaggagctgatcgacagcagagagatcggcgccagcagactgagcagagtggagagcctggcccccgaggtgaagcagaacaccaccgccagcggctgcgagctgatgcacaccgagatgcaggccctgagagccgactggaagcagtgggaggacagcgtgttccagacccagagctgcctggagaacctggtgagccagatggccctgagcgagcaggagttcagcggccaggtggcccagctggagcaggccctggagcagttcagcgccctgctgaagacctgggcccagcagctgaccctgctggagggcaagaacaccgacgaggagatcgtggagtgctggcacaagggccaggagatcctggacgccctgcagaaggccgagcccagaaccgaggacctgaagagccagctgaacgagctgtgcagattcagcagagacctgagcacctacagcggcaaggtgagcggcctgatcaaggagtacaactgcctgtgcctgcaggccagcaagggctgccagaacaaggagcagatcctgcagcagagattcagaaaggccttcagagacttccagcagtggctggtgaacgccaagatcaccaccgccaagtgcttcgacatcccccagaacatcagcgaggtgagcaccagcctgcagaagatccaggagttcctgagcgagagcgagaacggccagcacaagctgaacatgatgctgagcaagggcgagctgctgagcaccctgctgaccaaggagaaggccaagggcatccaggccaaggtgaccgccgccaaggaggactggaagaacttccacagcaacctgcaccagaaggagagcgccctggagaacctgaagatccagatgaaggacttcgaggtgagcgccgagcccatccaggactggctgagcaagaccgagaagatggtgcacgagagcagcaacagactgtacgacctgcccgccaagagaagagagcagcagaagctgcagagcgtgctggaggagatccactgctacgagccccagctgaacagactgaaggagaaggcccagcagctgtgggagggccaggccgccagcaagagcttcagacacagagtgagccagctgagcagccagtacctggccctgagcaacctgaccaaggagaaggtgagcagactggacagaatcgtggccgagcacaaccagttcagcctgggcatcaaggagctgcaggactggatgaccgacgccatccacatgctggacagctactgccaccccaccagcgacaagagcgtgctggacagcagaaccctgaagctggaggccctgctgagcgtgaagcaggagaaggagatccagatgaagatgatcgtgaccagaggcgagagcgtgctgcagaacaccagccccgagggcatccccaccatccagcagcagctgcagagcgtgaaggacatgtgggccagcctgctgagcgccggcatcagatgcaagagccagctggagggcgccctgagcaagtggaccagctaccaggacggcgtgagacagttcagcggctggatggacagcatggaggccaacctgaacgagagcgagagacagcacgccgagctgagagacaagaccaccatgctgggcaaggccaagctgctgaacgaggaggtgctgagctacagcagcctgctggagaccatcgaggtgaagggcgccggcatgaccgagcactacgtgacccagctggagctgcaggacctgcaggagagatacagagccatccaggagagagccaaggaggccgtgaccaagagcgagaagctggtgagactgcaccaggagtaccagagagacctgaaggccttcgaggtgtggctgggccaggagcaggagaagctggaccagtacagcgtgctggagggcgacgcccacacccacgagaccaccctgagagacctgcaggagctgcaggtgcactgcgccgagggccaggccctgctgaacagcgtgctgcacaccagagaggacgtgatccccagcggcatcccccaggccgaggacagagccctggagagcctgagacaggactggcaggcctaccagcacagactgagcgagaccagaacccagttcaacaacgtggtgaacaagctgagactgatggagcagaagttccagcaggtggacgagtggctgaagaccgccgaggagaaggtgagccccagaaccagaagacagagcaacagagccaccaaggagatccagctgcaccagatgaagaagtggcacgaggaggtgaccgcctacagagacgaggtggaggaggtgggcgccagagcccaggagatcctggacgagagccacgtgaacagcagaatgggctgccaggccacccagctgaccagcagataccaggccctgctgctgcaggtgctggagcagatcaagttcctggaggaggagatccagagcctggaggagagcgagagcagcctgagcagctacagcgactggtacggcagcacccacaagaacttcaagaacgtggccaccaagatcgacaaggtggacaccgtgatgatgggcaagaagctgaagaccctggaggtgctgctgaaggacatggagaagggccacagcctgctgaagagcgccagagagaagggcgagagagccgtgaagtacctggaggagggcgaggccgagagactgagaaaggagatccacgaccacatggagcagctgaaggagctgaccagcaccgtgagaaaggagcacatgaccctggagaagggcctgcacctggccaaggagttcagcgacaagtgcaaggccctgacccagtggatcgccgagtaccaggagatcctgcacgtgcccgaggagcccaagatggagctgtacgagaagaaggcccagctgagcaagtacaagagcctgcagcagaccgtgctgagccacgagcccagcgtgaagagcgtgagagagaagggcgaggccctgctggagctggtgcaggacgtgaccctgaaggacaagatcgaccagctgcagagcgactaccaggacctgtgcagcatcggcaaggagcacgtgttcagcctggaggccaaggtgaaggaccacgaggactacaacagcgagctgcaggaggtggagaagtggctgctgcagatgagcggcagactggtggcccccgacctgctggagaccagcagcctggagaccatcacccagcagctggcccaccacaaggccatgatggaggagatcgccggcttcgaggacagactgaacaacctgcagatgaagggcgacaccctgatcggccagtgcgccgaccacctgcaggccaagctgaagcagaacgtgcacgcccacctgcagggcaccaaggacagctacagcgccatctgcagcaccgcccagagaatgtaccagagcctggagcacgagctgcagaagcacgtgagcagacaggacaccctgcagcagtgccaggcctggctgagcgccgtgcagcccgacctggagcccagcccccagccccccctgagcagagccgaggccatcaagcaggtgaagcacttcagagccctgcaggagcaggccagaacctacctggacctgctgtgcagcatgtgcgacctgagcaacgccagcgtgaagaccaccgccaaggacatccagcagaccgagcagaccatcgagcagaagctggtgcaggcccagaacctgacccagggctgggaggagatcaagcacctgaagagcgagctgtggatctacctgcaggacgccgaccagcagctgcagaacatgaagagaagacacagcgagctggagctgaacatcgcccagaacatggtgagccaggtgaaggacttcgtgaagaagctgcagagcaagcaggccagcgtgaacaccatcatcgagaaggtgaacaagctgaccaagaaggaggagagccccgagcacaaggagatcaaccacctgaacgaccagtggctggacctgtgcagacagagcaacaacctgtgcctgcagagagaggaggacctgcagagaaccagagactaccacgactgcatgaacgtggtggaggtgttcctggagaagttcaccaccgagtgggacaacctggccagaagcgacgccgagagcaccgccgtgcacctggaggccctgaagaagctggccctggccctgcaggagagaaagtacgccatcgaggacctgaaggaccagaagcagaagatgatcgagcacctgaacctggacgacaaggagctggtgaaggagcagaccagccacctggagcagagatggttccagctggaggacctgatcaagagaaagatccaggtgagcgtgaccaacctggaggagctgaacgtggtgcagagcagattccaggagctgatggagtgggccgaggagcagcagcccaacatcgccgaggccctgaagcagagccccccccccgacatggcccagaacctgctgatggaccacctggccatctgcagcgagctggaggccaagcagatgctgctgaagagcctgatcaaggacgccgacagagtgatggccgacctgggcctgaacgagagacaggtgatccagaaggccctgagcgacgcccagagccacgtgaactgcctgagcgacctggtgggccagagaagaaagtacctgaacaaggccctgagcgagaagacccagttcctgatggccgtgttccaggccaccagccagatccagcagcacgagagaaagatcatgttcagagagcacatctgcctgctgcccgacgacgtgagcaagcaggtgaagacctgcaagagcgcccaggccagcctgaagacctaccagaacgaggtgaccggcctgtgggcccagggcagagagctgatgaaggaggtgaccgagcaggagaagagcgaggtgctgggcaagctgcaggagctgcagagcgtgtacgacagcgtgctgcagaagtgcagccacagactgcaggagctggagaagaacctggtgagcagaaagcacttcaaggaggacttcgacaaggcctgccactggctgaagcaggccgacatcgtgaccttccccgagatcaacctgatgaacgagagcagcgagctgcacacccagctggccaagtaccagaacatcctggagcagagccccgagtacgagaacctgctgctgaccctgcagagaaccggccagaccatcctgcccagcctgaacgaggtggaccacagctacctgagcgagaagctgaacgccctgcccagacagttcaacgtgatcgtggccctggccaaggacaagttctacaaggtgcaggaggccatcctggccagaaaggagtacgccagcctgatcgagctgaccacccagagcctgagcgagctggaggcccagttcctgagaatgagcaaggtgcccaccgacctggccgtggaggaggccctgagcctgcaggacggctgcagagccatcctggacgaggtggccggcctgggcgaggccgtggacgagctgaaccagaagaaggagggcttcagaagcaccggccagccctggcagcccgacaagatgctgcacctggtgaccctgtaccacagactgaagagacagaccgagcagagagtgagcctgctggaggacaccaccagcgcctaccaggagcacgagaagatgtgccagcagctggagagacagctgaagagcgtgaaggaggagcagagcaaggtgaacgaggagaccctgcccgccgaggagaagctgaagatgtaccacagcctggccggcagcctgcaggacagcggcatcgtgctgaagagagtgaccatccacctggaggacctggccccccacctggaccccctggcctacgagaaggccagacaccagatccagagctggcagggcgagctgaagctgctgaccagcgccatcggcgagaccgtgaccgagtgcgagagcagaatggtgcagagcatcgacttccagaccgagatgagcagaagcctggactggctgagaagagtgaaggccgagctgagcggccccgtgtacctggacctgaacctgcaggacatccaggaggagatcagaaagatccagatccaccaggaggaggtgcagagcagcctgagaatcatgaacgccctgagccacaaggagaaggagaagttcaccaaggccaaggagctgatcagcgccgacctggagcacagcctggccgagctgagcgagctggacggcgacatccaggaggccctgagaaccagacaggccaccctgaccgagatctacagccagtgccagagatactaccaggtgttccaggccgccaacgactggctggaggacgcccaggagctgctgcagctggccggcaacggcctggacgtggagagcgccgaggagaacctgaagagccacatggagttcttcagcaccgaggaccagttccacagcaacctggaggagctgcacagcctggtggccaccctggaccccctgatcaagcccaccggcaaggaggacctggagcagaaggtggccagcctggagctgagaagccagagaatgagcagagacagcggcgcccaggtggacctgctgcagagatgcaccgcccagtggcacgactaccagaaggccagagaggaggtgatcgagctgatgaacgacaccgagaagaagctgagcgagttcagcctgctgaagaccagcagcagccacgaggccgaggagaagctgagcgagcacaaggccctggtgagcgtggtgaacagcttccacgagaagatcgtggccctggaggagaaggccagccagctggagaagaccggcaacgacgccagcaaggccaccctgagcagaagcatgaccaccgtgtggcagagatggaccagactgagagccgtggcccaggaccaggagaagatcctggaggacgccgtggacgagtggaccggcttcaacaacaaggtgaagaaggccaccgagatgatcgaccagctgcaggacaagctgcccggcagcagcgccgagaaggccagcaaggccgagctgctgaccctgctggagtaccacgacaccttcgtgctggagctggagcagcagcagagcgccctgggcatgctgagacagcagaccctgagcatgctgcaggacggcgccgcccccacccccggcgaggagccccccctgatgcaggagatcaccgccatgcaggacagatgcctgaacatgcaggagaaggtgaagaccaacggcaagctggtgaagcaggagctgaaggacagagagatggtggagacccagatcaacagcgtgaagtgctgggtgcaggagaccaaggagtacctgggcaaccccaccatcgagatcgacgcccagctggaggagctgcagatcctgctgaccgaggccaccaaccacagacagaacatcgagaagatggccgaggagcagaaggagaagtacctgggcctgtacaccatcctgcccagcgagctgagcctgcagctggccgaggtggccctggacctgaagatcagagaccagatccaggacaagatcaaggaggtggagcagagcaaggccaccagccaggagctgagcagacagatccagaagctggccaaggacctgaccaccatcctgaccaagctgaaggccaagaccgacaacgtggtgcaggccaagaccgaccagaaggtgctgggcgaggagctggacggctgcaacagcaagctgatggagctggacgccgccgtgcagaagttcctggagcagaacggccagctgggcaagcccctggccaagaagatcggcaagctgaccgagctgcaccagcagaccatcagacaggccgagaacagactgagcaagctgaaccaggccgccagccacctggaggagtacaacgagatgctggagctgatcctgaagtggatcgagaaggccaaggtgctggcccacggcaccatcgcctggaacagcgccagccagctgagagagcagtacatcctgcaccagaccctgctggaggagagcaaggagatcgacagcgagctggaggccatgaccgagaagctgcagtacctgaccagcgtgtactgcaccgagaagatgagccagcaggtggccgagctgggcagagagaccgaggagctgagacagatgatcaagatcagactgcagaacctgcaggacgccgccaaggacatgaagaagttcgaggccgagctgaagaagctgcaggccgccctggagcaggcccaggccaccctgaccagccccgaggtgggcagactgagcctgaaggagcagctgagccacagacagcacctgctgagcgagatggagagcctgaagcccaaggtgcaggccgtgcagctgtgccagagcgccctgagaatccccgaggacgtggtggccagcctgcccctgtgccacgccgccctgagactgcaggaggaggccagcagactgcagcacaccgccatccagcagtgcaacatcatgcaggccgccgtggtgcagtacgagcagtacgagcaggagatgaagcacctgcagcagctgatcgagggcgcccacagagagatcgaggacaagcccgtggccaccagcaacatccaggagctgcaggcccagatcagcagacacgaggagctggcccagaagatcaagggctaccaggagcagatcgccagcctgaacagcaagtgcaagatgctgaccatgaaggccaagcacgccaccatgctgctgaccgtgaccgaggtggagggcctggccgagggcaccgaggacctggacggcgagctgctgcccacccccagcgcccaccccagcgtggtgatgatgaccgccggcagatgccacaccctgctgagccccgtgaccgaggagagcggcgaggagggcaccaacagcgagatcagcagcccccccgcctgcagaagccccagccccgtggccaacaccgacgccagcgtgaaccaggacatcgcctactaccaggccctgagcgccgagagactgcagaccgacgccgccaagatccaccccagcaccagcgccagccaggagttctacgagcccggcctggagcccagcgccaccgccaagctgggcgacctgcagagaagctgggagaccctgaagaacgtgatcagcgagaagcagagaaccctgtacgaggccctggagagacagcagaagtaccaggacagcctgcagagcatcagcaccaagatggaggccatcgagctgaagctgagcgagagccccgagcccggcagaagccccgagagccagatggccgagcaccaggccctgatggacgagatcctgatgctgcaggacgagatcaacgagctgcagagcagcctggccgaggagctggtgagcgagagctgcgaggccgaccccgccgagcagctggccctgcagagcaccctgaccgtgctggccgagagaatgagcaccatcagaatgaaggccagcggcaagagacagctgctggaggagaagctgaacgaccagctggaggagcagagacaggagcaggccctgcagagatacagatgcgaggccgacgagctggacagctggctgctgagcaccaaggccaccctggacaccgccctgagcccccccaaggagcccatggacatggaggcccagctgatggactgccagaacatgctggtggagatcgagcagaaggtggtggccctgagcgagctgagcgtgcacaacgagaacctgctgctggagggcaaggcccacaccaaggacgaggccgagcagctggccggcaagctgagaagactgaagggcagcctgctggagctgcagagagccctgcacgacaagcagctgaacatgcagggcaccgcccaggagaaggaggagagcgacgtggacctgaccgccacccagagccccggcgtgcaggagtggctggcccaggccagaaccacctggacccagcagagacagagcagcctgcagcagcagaaggagctggagcaggagctggccgagcagaagagcctgctgagaagcgtggccagcagaggcgaggagatcctgatccagcacagcgccgccgagaccagcggcgacgccggcgagaagcccgacgtgctgagccaggagctgggcatggagggcgagaagagcagcgccgaggaccagatgagaatgaagtgggagagcctgcaccaggagttcagcaccaagcagaagctgctgcagaacgtgctggagcaggagcaggagcaggtgctgtacagcagacccaacagactgctgagcggcgtgcccctgtacaagggcgacgtgcccacccaggacaagagcgccgtgaccagcctgctggacggcctgaaccaggccttcgaggaggtgagcagccagagcggcggcgccaagagacagagcatccacctggagcagaagctgtacgacggcgtgagcgccaccagcacctggctggacgacgtggaggagagactgttcgtggccaccgccctgctgcccgaggagaccgagacctgcctgttcaaccaggagatcctggccaaggacatcaaggagatgagcgaggagatggacaagaacaagaacctgttcagccaggccttccccgagaacggcgacaacagagacgtgatcgaggacaccctgggctgcctgctgggcagactgagcctgctggacagcgtggtgaaccagagatgccaccagatgaaggagagactgcagcagatcctgaacttccagaacgacctgaaggtgctgttcaccagcctggccgacaacaagtacatcatcctgcagaagctggccaacgtgttcgagcagcccgtggccgagcagatcgaggccatccagcaggccgaggacggcctgaaggagttcgacgccggcatcatcgagctgaagagaagaggcgacaagctgcaggtggagcagcccagcatgcaggagctgagcaagctgcaggacatgtacgacgagctgatgatgatcatcggcagcagaagaagcggcctgaaccagaacctgaccctgaagagccagtacgagagagccctgcaggacctggccgacctgctggagaccggccaggagaagatggccggcgaccagaagatcatcgtgagcagcaaggaggagatccagcagctgctggacaagcacaaggagtacttccagggcctggagagccacatgatcctgaccgagaccctgttcagaaagatcatcagcttcgccgtgcagaaggagacccagttccacaccgagctgatggcccaggccagcgccgtgctgaagagagcccacaagagaggcgtggagctggagtacatcctggagacctggagccacctggacgaggaccagcaggagctgagcagacagctggaggtggtggagagcagcatccccagcgtgggcctggtggaggagaacgaggacagactgatcgacagaatcaccctgtaccagcacctgaagagcagcctgaacgagtaccagcccaagctgtaccaggtgctggacgacggcaagagactgctgatcagcatcagctgcagcgacctggagagccagctgaaccagctgggcgagtgctggctgagcaacaccaacaagatgagcaaggagctgcacagactggagaccatcctgaagcactggaccagataccagagcgagagcgccgacctgatccactggctgcagagcgccaaggacagactggagttctggacccagcagagcgtgaccgtgccccaggagctggagatggtgagagaccacctgaacgccttcctggagttcagcaaggaggtggacgcccagagcagcctgaagagcagcgtgctgagcaccggcaaccagctgctgagactgaagaaggtggacaccgccaccctgagaagcgagctgagcagaatcgacagccagtggaccgacctgctgaccaacatccccgccgtgcaggagaagctgcaccagctgcagatggacaagctgcccagcagacacgccatcagcgaggtgatgagctggatcagcctgatggagaacgtgatccagaaggacgaggacaacatcaagaacagcatcggctacaaggccatccacgagtacctgcagaagtacaagggcttcaagatcgacatcaactgcaagcagctgaccgtggacttcgtgaaccagagcgtgctgcagatcagcagccaggacgtggagagcaagagaagcgacaagaccgacttcgccgagcagctgggcgccatgaacaagagctggcagatcctgcagggcctggtgaccgagaagatccagctgctggagggcctgctggagagctggagcgagtacgagaacaacgtgcagtgcctgaagacctggttcgagacccaggagaagagactgaagcagcagcacagaatcggcgaccaggccagcgtgcagaacgccctgaaggactgccaggacctggaggacctgatcaaggccaaggagaaggaggtggagaagatcgagcagaacggcctggccctgatccagaacaagaaggaggacgtgagcagcatcgtgatgagcaccctgagagagctgggccagacctgggccaacctggaccacatggtgggccagctgaagatcctgctgaagagcgtgctggaccagtggagcagccacaaggtggccttcgacaagatcaacagctacctgatggaggccagatacagcctgagcagattcagactgctgaccggcagcctggaggccgtgcaggtgcaggtggacaacctgcagaacctgcaggacgacctggagaagcaggagagaagcctgcagaagttcggcagcatcaccaaccagctgctgaaggagtgccacccccccgtgaccgagaccctgaccaacaccctgaaggaggtgaacatgagatggaacaacctgctggaggagatcgccgagcagctgcagagcagcaaggccctgctgcagctgtggcagagatacaaggactacagcaagcagtgcgccagcaccgtgcagcagcaggaggacagaaccaacgagctgctgaaggccgccaccaacaaggacatcgccgacgacgaggtggccacctggatccaggactgcaacgacctgctgaagggcctgggcaccgtgaaggacagcctgttcttcctgcacgagctgggcgagcagctgaagcagcaggtggacgccagcgccgccagcgccatccagagcgaccagctgagcctgagccagcacctgtgcgccctggagcaggccctgtgcaagcagcagaccagcctgcaggccggcgtgctggactacgagaccttcgccaagagcctggaggccctggaggcctggatcgtggaggccgaggagatcctgcagggccaggaccccagccacagcagcgacctgagcaccatccaggagagaatggaggagctgaagggccagatgctgaagttcagcagcatggcccccgacctggacagactgaacgagctgggctacagactgcccctgaacgacaaggagatcaagagaatgcagaacctgaacagacactggagcctgatcagcagccagaccaccgagagattcagcaagctgcagagcttcctgctgcagcaccagaccttcctggagaagtgcgagacctggatggagttcctggtgcagaccgagcagaagctggccgtggagatcagcggcaactaccagcacctgctggagcagcagagagcccacgagctgttccaggccgagatgttcagcagacagcagatcctgcacagcatcatcatcgacggccagagactgctggagcagggccaggtggacgacagagacgagttcaacctgaagctgaccctgctgagcaaccagtggcagggcgtgatcagaagagcccagcagagaagaggcatcatcgacagccagatcagacagtggcagagatacagagagatggccgagaagctgagaaagtggctggtggaggtgagctacctgcccatgagcggcctgggcagcgtgcccatccccctgcagcaggccagaaccctgttcgacgaggtgcagttcaaggagaaggtgttcctgagacagcagggcagctacatcctgaccgtggaggccggcaagcagctgctgctgagcgccgacagcggcgccgaggccgccctgcaggccgagctggccgagatccaggagaagtggaagagcgccagcatgagactggaggagcagaagaagaagctggccttcctgctgaaggactgggagaagtgcgagaagggcatcgccgacagcctggagaagctgagaaccttcaagaagaagctgagccagagcctgcccgaccaccacgaggagctgcacgccgagcagatgagatgcaaggagctggagaacgccgtgggcagctggaccgacgacctgacccagctgagcctgctgaaggacaccctgagcgcctacatcagcgccgacgacatcagcatcctgaacgagagagtggagctgctgcagagacagtgggaggagctgtgccaccagctgagcctgagaagacagcagatcggcgagagactgaacgagtgggccgtgttcagcgagaagaacaaggagctgtgcgagtggctgacccagatggagagcaaggtgagccagaacggcgacatcctgatcgaggagatgatcgagaagctgaagaaggactaccaggaggagatcgccatcgcccaggagaacaagatccagctgcagcagatgggcgagagactggccaaggccagccacgagagcaaggccagcgagatcgagtacaagctgggcaaggtgaacgacagatggcagcacctgctggacctgatcgccgccagagtgaagaagctgaaggagaccctggtggccgtgcagcagctggacaagaacatgagcagcctgagaacctggctggcccacatcgagagcgagctggccaagcccatcgtgtacgacagctgcaacagcgaggagatccagagaaagctgaacgagcagcaggagctgcagagagacatcgagaagcacagcaccggcgtggccagcgtgctgaacctgtgcgaggtgctgctgcacgactgcgacgcctgcgccaccgacgccgagtgcgacagcatccagcaggccaccagaaacctggacagaagatggagaaacatctgcgccatgagcatggagagaagactgaagatcgaggagacctggagactgtggcagaagttcctggacgactacagcagattcgaggactggctgaagagcagcgagagaaccgccgccttccccagcagcagcggcgtgatctacaccgtggccaaggaggagctgaagaagttcgaggccttccagagacaggtgcacgagtgcctgacccagctggagctgatcaacaagcagtacagaagactggccagagagaacagaaccgacagcgcctgcagcctgaagcagatggtgcacgagggcaaccagagatgggacaacctgcagaagagagtgaccagcatcctgagaagactgaagcacttcatcggccagagagaggagttcgagaccgccagagacagcatcctggtgtggctgaccgagatggacctgcagctgaccaacatcgagcacttcagcgagtgcgacgtgcaggccaagatcaagcagctgaaggccttccagcaggagatcagcctgaaccacaacaagatcgagcagatcatcgcccagggcgagcagctgatcgagaagagcgagcccctggacgccgccatcatcgaggaggagctggacgagctgagaagatactgccaggaggtgttcggcagagtggagagataccacaagaagctgatcagactgcccctgcccgacgacgagcacgacctgagcgacagagagctggagctggaggacagcgccgccctgagcgacctgcactggcacgacagaagcgccgacagcctgctgagcccccagcccagcagcaacctgagcctgagcctggcccagcccctgagaagcgagagaagcggcagagacacccccgccagcgtggacagcatccccctggagtgggaccacgactacgacctgagcagagacctggagagcgccatgagcagagccctgcccagcgaggacgaggagggccaggacgacaaggacttctacctgagaggcgccgtgggcctgagcggcgaccacagcgccctggagagccagatcagacagctgggcaaggccctggacgacagcagattccagatccagcagaccgagaacatcatcagaagcaagacccccaccggccccgagctggacaccagctacaagggctacatgaagctgctgggcgagtgcagcagcagcatcgacagcgtgaagagactggagcacaagctgaaggaggaggaggagagcctgcccggcttcgtgaacctgcacagcaccgagacccagaccgccggcgtgatcgacagatgggagctgctgcaggcccaggccctgagcaaggagctgagaatgaagcagaacctgcagaagtggcagcagttcaacagcgacctgaacagcatctgggcctggctgggcgacaccgaggaggagctggagcagctgcagagactggagctgagcaccgacatccagaccatcgagctgcagatcaagaagctgaaggagctgcagaaggccgtggaccacagaaaggccatcatcctgagcatcaacctgtgcagccccgagttcacccaggccgacagcaaggagagcagagacctgcaggacagactgagccagatgaacggcagatgggacagagtgtgcagcctgctggaggagtggagaggcctgctgcaggacgccctgatgcagtgccagggcttccacgagatgagccacggcctgctgctgatgctggagaacatcgacagaagaaagaacgagatcgtgcccatcgacagcaacctggacgccgagatcctgcaggaccaccacaagcagctgatgcagatcaagcacgagctgctggagagccagctgagagtggccagcctgcaggacatgagctgccagctgctggtgaacgccgagggcaccgactgcctggaggccaaggagaaggtgcacgtgatcggcaacagactgaagctgctgctgaaggaggtgagcagacacatcaaggagctggagaagctgctggacgtgagcagcagccagcaggacctgagcagctggagcagcgccgacgagctggacaccagcggcagcgtgagccccaccagcggcagaagcacccccaacagacagaagacccccagaggcaagtgcagcctgagccagcccggccccagcgtgagcagcccccacagcagaagcaccaagggcggcagcgacagcagcctgagcgagcccggccccggcagaagcggcagaggcttcctgttcagagtgctgagagccgccctgcccctgcagctgctgctgctgctgctgatcggcctggcctgcctggtgcccatgagcgaggaggactacagctgcgccctgagcaacaacttcgccagaagcttccaccccatgctgagatacaccaacggccccccccccctgtag

SEQ ID NO: 100473 - DNA, 25230 bp, synthetic construct
  misc_feature 1..25230: note = Description of Artificial Sequence: Synthetic coding sequence
  source 1..25230: mol_type = other DNA
atggccaccagcagaggcgccagcagatgccccagagacatcgccaacgtgatgcagagactgcaggacgagcaggagatcgtgcagaagagaaccttcaccaagtggatcaacagccacctggccaagagaaagccccccatggtggtggacgacctgttcgaggacatgaaggacggcgtgaagctgctggccctgctggaggtgctgagcggccagaagctgccctgcgagcagggcagaagaatgaagagaatccacgccgtggccaacatcggcaccgccctgaagttcctggagggcagaaagatcaagctggtgaacatcaacagcaccgacatcgccgacggcagacccagcatcgtgctgggcctgatgtggaccatcatcctgtacttccagatcgaggagctgaccagcaacctgccccagctgcagagcctgagcagcagcgccagcagcgtggacagcatcgtgagcagcgagacccccagcccccccagcaagagaaaggtgaccaccaagatccagggcaacgccaagaaggccctgctgaagtgggtgcagtacaccgccggcaagcagaccggcatcgaggtgaaggacttcggcaagagctggagaagcggcgtggccttccacagcgtgatccacgccatcagacccgagctggtggacctggagaccgtgaagggcagaagcaacagagagaacctggaggacgccttcaccatcgccgagaccgagctgggcatccccagactgctggaccccgaggacgtggacgtggacaagcccgacgagaagagcatcatgacctacgtggcccagttcctgaagcactaccccgacatccacaacgccagcaccgacggccaggaggacgacgagatcctgcccggcttccccagcttcgccaacagcgtgcagaacttcaagagagaggacagagtgatcttcaaggagatgaaggtgtggatcgagcagttcgagagagacctgaccagagcccagatggtggagagcaacctgcaggacaagtaccagagcttcaagcacttcagagtgcagtacgagatgaagagaaagcagatcgagcacctgatccagcccctgcacagagacggcaagctgagcctggaccaggccctggtgaagcagagctgggacagagtgaccagcagactgttcgactggcacatccagctggacaagagcctgcccgcccccctgggcaccatcggcgcctggctgtacagagccgaggtggccctgagagaggagatcaccgtgcagcaggtgcacgaggagaccgccaacaccatccagagaaagctggagcagcacaagagaaagctgagaaacgtgatcgacctgctgcagaacaccgacgcccacaagagagccttccacgagatctacagaaccagaagcgtgaacggcatccccgtgccccccgaccagctggaggacatggccgagagattccacttcgtgagcagcaccagcgagctgcacctgatgaagatggagttcctggagctgaagtacagactgctgagcctgctggtgctggccgagagcaagctgaagagctggatcatcaagtacggcagaagagagagcgtggagcagctgctgcagaactacgtgagcttcatcgagaacagcaagttcttcgagcagtacgaggtgacctaccagatcctgaagcagaccgccgagatgtacgtgaaggccgacggcagcgtggaggaggccgagaacgtgatgaagttcatgaacgagaccaccgcccagtggagaaacctgagcgtggaggtgagaagcgtgagaagcatgctggaggaggtgatcagcaactgggacagatacggcaacaccgtggccagcctgcaggcctggctggaggacgccgagaagatgctgaaccagagcgagaacgccaagaaggacttcttcagaaacctgccccactggatccagcagcacaccgccatgaacgacgccggcaacttcctgatcgagacctgcgacgagatggtgagcagagacctgaagcagcagctgctgctgctgaacggcagatggagagagctgttcatggaggtgaagcagtacgcccaggccgacgagatggacagaatgaagaaggagtacaccgactgcgtggtgaccctgagcgccttcgccaccgaggcccacaagaagctgagcgagcccctggaggtgagcttcatgaacgtgaagctgctgatccaggacctggaggacatcgagcagagagtgcccgtgatggacgcccagtacaagatcatcaccaagaccgcccacctgatcaccaaggagagcccccaggaggagggcaaggagatgttcgccaccatgagcaagctgaaggagcagctgaccaaggtgaaggagtgctacagccccctgctgtacgagagccagcagctgctgatccccctggaggagctggagaagcagatgaccagcttctacgacagcctgggcaagatcaacgagatcatcaccgtgctggagagagaggcccagagcagcgccctgttcaagcagaagcaccagctgagaatcctgaagtgcaagtggtgcaacagcagccagaagatgaccctgtgcctggtgctgggcagcatgatcagcatgctgagcaccgccaagatcaccatcgccggctacaagagcgaggtggaggtgagcgagctgctggcctgccaggagaactgcaagaagaccctgaccctgatcgagaagggcagccagagcgtgcagaagttcgtgaccctgagcaacgtgctgaagcacttcgaccagaccagactgcagaccgactgcagatacagctgctgcttcagcgtgatgagaaagcagcaccacatcatgatcgtgttccacatcaagagcatggtgaagaagaccggcgactggaagaagcacgtggagaccaacagcagactgatgaagaagttcgaggagagcagagccgagctggagaaggtgctgagaatcgcccaggagggcctggaggagaagggcgaccccgaggagctgctgagaagacacaccgagttcttcagccagctggaccagagagtgctgaacgccttcctgaaggcctgcgacgagctgaccgacatcctgcccgagcaggagcagcagggcctgcaggaggccgtgagaaagctgcacaagcagtggaaggacctgcagggcgaggccccctaccacctgctgcacctgaagatcgacgtggagaagaacagattcctggccagcgtggaggagtgcagaaccgagctggacagagagaccaagctgatgccccaggagggcagcgagaagatcatcaaggagcacagagtgttcttcagcgacaagggcccccaccacctgtgcgagaagagactgcagctgatcgaggagctgtgcgtgaagctgcccgtgagagaccccgtgagagacacccccggcacctgccacgtgaccctgaaggagctgagagccgccatcgacagcacctacagaaagctgatggaggaccccgacaagtggaaggactacaccagcagattcagcgagttcagcagctggatcagcaccaacgagacccagctgaagggcatcaagggcgaggccatcgacaccgccaaccacggcgaggtgaagagagccgtggaggagatcagaaacggcgtgaccaagagaggcgagaccctgagctggctgaagagcagactgaaggtgctgaccgaggtgagcagcgagaacgaggcccagaagcagggcgacgagctggccaagctgagcagcagcttcaaggccctggtgaccctgctgagcgaggtggagaagatgctgagcaacttcggcgactgcgtgcagtacaaggagatcgtgaagaacagcctggaggagctgatcagcggcagcaaggaggtgcaggagcaggccgagaagatcctggacaccgagaacctgttcgaggcccagcagctgctgctgcaccaccagcagaagaccaagagaatcagcgccaagaagagagacgtgcagcagcagatcgcccaggcccagcagggcgagggcggcctgcccgacagaggccacgaggagctgagaaagctggagagcaccctggacggcctggagagaagcagagagagacaggagagaagaatccaggtgaccctgagaaagtgggagagattcgagaccaacaaggagaccgtggtgagatacctgttccagaccggcagcagccacgagagattcctgagcttcagcagcctggagagcctgagcagcgagctggagcagaccaaggagttcagcaagagaaccgagagcatcgccgtgcaggccgagaacctggtgaaggaggccagcgagatccccctgggcccccagaacaagcagctgctgcagcagcaggccaagagcatcaaggagcaggtgaagaagctggaggacaccctggaggaggagtacgtgatcgacaacaagaccatggagatggtgaagaccaagtgggaccacttcggcagcaacttcgagaccctgagcgtgtggatcaccgagaaggagaaggagctgaacgccctggagaccagcagcagcgccatggacatgcagatcagccagatcaaggtgaccatccaggagatcgagagcaagctgagcagcatcgtgggcctggaggaggaggcccagagcttcgcccagttcgtgaccaccggcgagagcgccagaatcaaggccaagctgacccagatcagaagatacggcgaggagctgagagagcacgcccagtgcctggagggcaccatcctgggccacctgagccagcagcagaagttcgaggagaacctgagaaagatccagcagagcgtgagcgagttcgaggacaagctggccgtgcccatcaagatctgcagcagcgccaccgagacctacaaggtgctgcaggagcacatggacctgtgccaggccctggagagcctgagcagcgccatcaccgccttcagcgccagcgccagaaaggtggtgaacagagacagctgcgtgcaggaggccgccgccctgcagcagcagtacgaggacatcctgagaagagccaaggagagacagaccgccctggagaacctgctggcccactggcagagactggagaaggagctgagcagcttcctgacctggctggagagaggcgaggccaaggccagcagccccgagatggacatcagcgccgacagagtgaaggtggaggccagcaaggacgacgtgaagatgatgaagctgcacctggagcagctggacgagagatggagagacctgccccagatcatcaacaagagaatcaacttcctgcagagcgtggtggccgagcaccagcagttcgacgagctgctgctgagcttcagcgtgtggatcaagctgttcctgagcgagctgcagaccaccagcgagatcagcatcatggaccaccaggtggccctgaccagacacaaggaccacgccgccgaggtggagagcaagaagggcgagctgcagagcctgcagggccacctggccaagctgggcagcctgggcagagccgaggacctgcacctgctgcagggcaaggccgaggactgcttccagctgttcgaggaggccagccaggtggtggagagaagacagctggccctgagccacctggccgagttcctgcagagccacgccagcctgagcggcatcctgagacagctgagacagaccgtggaggccaccaacagcatgaacaagaacgagagcgacctgatcgagaaggacctgaacgacgccctgcagaacgccaaggccctggagagcgccgccgtgagcctggacggcatcctgagcaaggcccagtaccacctgaagatcggcagcagcgagcagagaaccagctgcagagccaccgccgaccagctgtgcggcgaggtggagagaatccagaacctgctgggcaccaagcagagcgaggccgacgccctggccgtgctgaagaaggccttccaggaccagaaggaggagctgctgaagagcatcgaggacatcgaggagagaaccgacaaggagagactgaaggagcccaccagacaggccctgcagcagagactgagagtgttcaaccagctggaggacgagctgaacagccacgagcacgagctgtgctggctgaaggacaaggccaagcagatcgcccagaaggacgtggccttcgcccccgaggtggacagagagatcaacagactggaggtgacctgggacgacaccaagagactgatccacgagaaccagggccagtgctgcggcctgatcgacctgatgagagagtaccagaacctgaagagcgccgtgagcaaggtgctggagaacgccagcagcgtgatcgtgaccagaaccaccatcaaggaccaggaggacctgaagtgggccttcagcaagcacgagaccgccaagaacaagatgaactacaagcagaaggacctggacaacttcaccagcaagggcaagcacctgctgagcgagctgaagaagatccacagcagcgacttcagcctggtgaagaccgacatggagagcaccgtggacaagtggctggacgtgagcgagaagctggaggagaacatggacagactgagagtgagcctgagcatctgggacgacgtgctgagcaccagagacgagatcgagggctggagcaacaactgcgtgccccagatggccgagaacatcagcaacctggacaaccacctgagagccgaggagctgctgaaggagttcgagagcgaggtgaagaacaaggccctgagactggaggagctgcacagcaaggtgaacgacctgaaggagctgaccaagaacctggagaccccccccgacctgcagttcatcgaggccgacctgatgcagaagctggagcacgccaaggagatcaccgaggtggccaagggcaccctgaaggacttcaccgcccagagcacccaggtggagaagttcatcaacgacatcaccacctggttcaccaaggtggaggagagcctgatgaactgcgcccagaacgagacctgcgaggccctgaagaaggtgaaggacatccagaaggagctgcagagccagcagagcaacatcagcagcacccaggagaacctgaacagcctgtgcagaaagtaccacagcgccgagctggagagcctgggcagagccatgaccggcctgatcaagaagcacgaggccgtgagccagctgtgcagcaagacccaggccagcctgcaggagagcctggagaagcacttcagcgaggagagcatgcaggagttccaggagtggttcctgggcgccaaggccgccgccaaggagagcagcgacagaaccggcgacagcaaggtgctggaggccaagctgcacgacctgcagcagaacatcctggacagcgtgagcgacggccagagcaagctggacgccgtgacccaggagggccagaccctgtacgcccacctgagcaagcagatcgtgagcagcatccaggagcagatcaccaaggccaacgaggagttccaggccttcctgaagcagtgcctgaaggacaagcaggccctgcaggactgcgccagcgagctgggcagcttcgaggaccagcacagaaagctgaacctgtggatccacgagatggaggagagattcaacaccgagaacctgggcgagagcaagcagcacatccccgagaagaagaacgaggtgcacaaggtggagatgttcctgggcgagctgctggccgccagagagagcctggacaagctgagccagagaggccagctgctgagcgaggagggccacggcgccggccaggagggcagactgtgcagccagctgctgaccagccaccagaacctgctgagaatgaccaaggagaagctgagaagctgccaggtggccctgcaggagcacgaggccctggaggaggccctgcagagcatgtggttctgggtgaaggccatccaggacagactggcctgcgccgagagcaccctgggcagcaaggacaccctggagaagagactgagccagatccaggacatcctgctgatgaagggcgagggcgaggtgaagctgaacatggccatcggcaagggcgagcaggccctgagaagcagcaacaaggagggccagagagtgatccagacccagctggagaccctgaaggaggtgtgggccgacatcatgagcagcagcgtgcacgcccagagcaccctggagagcgtgatcagccagtggaacgactacgtggagagaaagaaccagctggagcagtggatggagagcgtggaccagaagatcgagcaccccctgcagccccagcccggcctgaaggagaagttcgtgctgctggaccacctgcagagcatcctgagcgaggccgaggaccacaccagagccctgcacagactgatcgccaagagcagagagctgtacgagaagaccgaggacgagagcttcaaggacaccgcccaggaggagctgaagacccagttcaacgacatcatgaccgtggccaaggagaagatgagaaaggtggaggagatcgtgaaggaccacctgatgtacctggacgccgtgcacgagttcaccgactggctgcacagcgccaaggaggagctgcacagatggagcgacatgagcggcgacagcagcgccacccagaagaagctgagcaagatcaaggagctgatcgacagcagagagatcggcgccagcagactgagcagagtggagagcctggcccccgaggtgaagcagaacaccaccgccagcggctgcgagctgatgcacaccgagatgcaggccctgagagccgactggaagcagtgggaggacagcgtgttccagacccagagctgcctggagaacctggtgagccagatggccctgagcgagcaggagttcagcggccaggtggcccagctggagcaggccctggagcagttcagcgccctgctgaagacctgggcccagcagctgaccctgctggagggcaagaacaccgacgaggagatcgtggagtgctggcacaagggccaggagatcctggacgccctgcagaaggccgagcccagaaccgaggacctgaagagccagctgaacgagctgtgcagattcagcagagacctgagcacctacagcggcaaggtgagcggcctgatcaaggagtacaactgcctgtgcctgcaggccagcaagggctgccagaacaaggagcagatcctgcagcagagattcagaaaggccttcagagacttccagcagtggctggtgaacgccaagatcaccaccgccaagtgcttcgacatcccccagaacatcagcgaggtgagcaccagcctgcagaagatccaggagttcctgagcgagagcgagaacggccagcacaagctgaacatgatgctgagcaagggcgagctgctgagcaccctgctgaccaaggagaaggccaagggcatccaggccaaggtgaccgccgccaaggaggactggaagaacttccacagcaacctgcaccagaaggagagcgccctggagaacctgaagatccagatgaaggacttcgaggtgagcgccgagcccatccaggactggctgagcaagaccgagaagatggtgcacgagagcagcaacagactgtacgacctgcccgccaagagaagagagcagcagaagctgcagagcgtgctggaggagatccactgctacgagccccagctgaacagactgaaggagaaggcccagcagctgtgggagggccaggccgccagcaagagcttcagacacagagtgagccagctgagcagccagtacctggccctgagcaacctgaccaaggagaaggtgagcagactggacagaatcgtggccgagcacaaccagttcagcctgggcatcaaggagctgcaggactggatgaccgacgccatccacatgctggacagctactgccaccccaccagcgacaagagcgtgctggacagcagaaccctgaagctggaggccctgctgagcgtgaagcaggagaaggagatccagatgaagatgatcgtgaccagaggcgagagcgtgctgcagaacaccagccccgagggcatccccaccatccagcagcagctgcagagcgtgaaggacatgtgggccagcctgctgagcgccggcatcagatgcaagagagtgagactgccctgcgcctacatcgccctgaagctgagagtgcaccagcacgccgagctgagagacaagaccaccatgctgggcaaggccaaggaggccgtgaccaagagcgagaagctggtgagactgcaccaggagtaccagagagacctgaaggccttcgaggtgtggctgggccaggagcaggagaagctggaccagtacagcgtgctggagggcgacgcccacacccacgagaccaccctgagagacctgcaggagctgcaggtgcactgcgccgagggccaggccctgctgaacagcgtgctgcacaccagagaggacgtgatccccagcggcatcccccaggccgaggacagagccctggagagcctgagacaggactggcaggcctaccagcacagactgagcgagaccagaacccagttcaacaacgtggtgaacaagctgagactgatggagcagaagttccagcaggtggacgagtggctgaagaccgccgaggagaaggtgagccccagaaccagaagacagagcaacagagccaccaaggagatccagctgcaccagatgaagaagtggcacgaggaggtgaccgcctacagagacgaggtggaggaggtgggcgccagagcccaggagatcctggacgagagccacgtgaacagcagaatgggctgccaggccacccagctgaccagcagataccaggccctgctgctgcaggtgctggagcagatcaagttcctggaggaggagatccagagcctggaggagagcgagagcagcctgagcagctacagcgactggtacggcagcacccacaagaacttcaagaacgtggccaccaagatcgacaaggtggacaccgtgatgatgggcaagaagctgaagaccctggaggtgctgctgaaggacatggagaagggccacagcctgctgaagagcgccagagagaagggcgagagagccgtgaagtacctggaggagggcgaggccgagagactgagaaaggagatccacgaccacatggagcagctgaaggagctgaccagcaccgtgagaaaggagcacatgaccctggagaagagcctgcagcagaccgtgctgagccacgagcccagcgtgaagagcgtgagagagaagggcgaggccctgctggagctggtgcaggacgtgaccctgaaggacaagatcgaccagctgcagagcgactaccaggacctgtgcagcatcggcaaggagcacgtgttcagcctggaggccaaggtgaaggaccacgaggactacaacagcgagctgcaggaggtggagaagtggctgctgcagatgagcggcagactggtggcccccgacctgctggagaccagcagcctggagaccatcacccagcagctggcccaccacaagatgtaccagagcctggagcacgagctgcagaagcacgtgagcagacaggacaccctgcagcagtgccaggcctggctgagcgccgtgcagcccgacctggagcccagcccccagccccccctgagcagagccgaggccatcaagcaggtgaagcacttcagagccctgcaggagcaggccagaacctacctggacctgctgtgcagcatgtgcgacctgagcaacgccagcgtgaagaccaccgccaaggacatccagcagaccgagcagaccatcgagcagaagctggtgcaggcccagaacctgacccagggctgggaggagatcaagcacctgaagagcgagctgtggatctacctgcaggacgccgaccagcagctgcagaacatgaagagaagacacagcgagctggagctgaacatcgcccagaacatggtgagccaggtgaaggacttcgtgaagaagctgcagagcaagcaggccagcgtgaacaccatcatcgagaaggtgaacaagctgaccaagaaggaggagagccccgagcacaaggagatcaaccacctgaacgaccagtggctggacctgtgcagacagagcaacaacctgtgcctgcagagagaggaggacctgcagagaaccagagactaccacgactgcatgaacgtggtggaggtgttcctggagaagttcaccaccgagtgggacaacctggccagaagcgacgccgagagcaccgccgtgcacctggaggccctgaagaagctggccctggccctgcaggagagaaagtacgccatcgaggacctgaaggaccagaagcagaagatgatcgagcacctgaacctggacgacaaggagctggtgaaggagcagaccagccacctggagcagagatggttccagctggaggacctgatcaagagaaagatccaggtgagcgtgaccaacctggaggagctgaacgtggtgcagagcagattccaggagctgatggagtgggccgaggagcagcagcccaacatcgccgaggccctgaagcagagccccccccccgacatggcccagaacctgctgatggaccacctggccatctgcagcgagctggaggccaagcagatgctgctgaagagcctgatcaaggacgccgacagagtgatggccgacctgggcctgaacgagagacaggtgatccagaaggccctgagcgacgcccagagccacgtgaactgcctgagcgacctggtgggccagagaagaaagaagcacttcaaggaggacttcgacaaggcctgccactggctgaagcaggccgacatcgtgaccttccccgagatcaacctgatgaacgagagcagcgagctgcacacccagctggccaagtaccagaacatcctggagcagagccccgagtacgagaacctgctgctgaccctgcagagaaccggccagaccatcctgcccagcctgaacgaggtggaccacagctacctgagcgagaagctgaacgccctgcccagacagttcaacgtgatcgtggccctggccaaggacaagttctacaaggtgcaggaggccatcctggccagaaaggagtacgccagcctgatcgagctgaccacccagagcctgagcgagctggaggcccagttcctgagaatgagcaaggtgcccaccgacctggccgtggaggaggccctgagcctgcaggacggctgcagagccatcctggacgaggtggccggcctgggcgaggccgtggacgagctgaaccagaagaaggagggcttcagaagcaccggccagccctggcagcccgacaagatgctgcacctggtgaccctgtaccacagactgaagagacagaccgagcagagagtgagcctgctggaggacaccaccagcgcctaccaggagcacgagaagatgtgccagcagctggagagacagctgaagagcgtgaaggaggagcagagcaaggtgaacgaggagaccctgcccgccgaggagaagctgaagatgtaccacagcctggccggcagcctgcaggacagcggcatcgtgctgaagagagtgaccatccacctggaggacctggccccccacctggaccccctggcctacgagaaggccagacaccagatccagagctggcagggcgagctgaagctgctgaccagcgccatcggcgagaccgtgaccgagtgcgagagcagaatggtgcagagcatcgacttccagaccgagatgagcagaagcctggactggctgagaagagtgaaggccgagctgagcggccccgtgtacctggacctgaacctgcaggacatccaggaggagatcagaaagatccagatccaccaggaggaggtgcagagcagcctgagaatcatgaacgccctgagccacaaggagaaggagaagttcaccaaggccaaggagctgatcagcgccgacctggagcacagcctggccgagctgagcgagctggacggcgacatccaggaggccctgagaaccagacaggccaccctgaccgagatctacagccagtgccagagatactaccaggtgttccaggccgccaacgactggctggaggacgcccaggagctgctgcagctggccggcaacggcctggacgtggagagcgccgaggagaacctgaagagccacatggagttcttcagcaccgaggaccagttccacagcaacctggaggagctgcacagcctggtggccaccctggaccccctgatcaagcccaccggcaaggaggacctggagcagaaggtggccagcctggagctgagaagccagagaatgagcagagacagcggcgcccaggccctggtgagcgtggtgaacagcttccacgagaagatcgtggccctggaggagaaggccagccagctggagaagaccggcaacgacgccagcaaggccaccctgagcagaagcatgaccaccgtgtggcagagatggaccagactgagagccgtggcccaggaccaggagaagatcctggaggacgccgtggacgagtggaccggcttcaacaacaaggtgaagaaggccaccgagatgatcgaccagctgcaggacaagctgcccggcagcagcgccgagaaggccagcaaggccgagctgctgaccctgctggagtaccacgacaccttcgtgctggagctggagcagcagcagagcgccctgggcatgctgagacagcagaccctgagcatgctgcaggacggcgccgcccccacccccggcgaggagccccccctgatgcaggagatcaccgccatgcaggacagatgcctgaagatggtggagacccagatcaacagcgtgaagtgctgggtgcaggagaccaaggagtacctgggcaaccccaccatcgagatcgacgcccagctggaggagctgcagatcctgctgaccgaggccaccaaccacagacagaacatcgagaagatggccgaggagcagaaggagaagtacctgggcctgtacaccatcctgcccagcgagctgagcctgcagctggccgaggtggccctggacctgaagatcagagaccagatccaggacaagatcaaggaggtggagcagagcaaggccaccagccaggagctgagcagacagatccagaagctggccaaggacctgaccaccatcctgaccaagctgaaggccaagaccgacaacgtggtgcaggccaagaccgaccagaaggccgccagccacctggaggagtacaacgagatgctggagctgatcctgaagtggatcgagaaggccaaggtgctggcccacggcaccatcgcctggaacagcgccagccagctgagagagcagtacatcctgcaccagaccctgctggaggagagcaaggagatcgacagcgagctggaggccatgaccgagaagctgcagtacctgaccagcgtgtactgcaccgagaagatgagccagcaggtggccgagctgggcagagagaccgaggagctgagacagatgatcaagatcagactgcagaacctgcaggacgccgccaaggacatgaagaagttcgaggccgagctgaagaagctgcaggccgccctggagcaggcccaggccaccctgaccagccccgaggtgggcagactgagcctgaaggagcagctgagccacagacagcacctgctgagcgagatggagagcctgaagcccaaggtgcaggccgtgcagctgtgccagagcgccctgagaatccccgaggacgtggtggccagcctgcccctgtgccacgccgccctgagactgcaggaggaggccagcagactgcagcacaccgccatccagcagtgcaacatcatgcaggaggccgtggtgcagtacgagcagtacgagcaggagatgaagcacctgcagcagctgatcgagggcgcccacagagagatcgaggacaagcccgtggccaccagcaacatccaggagctgcaggcccagatcagcagacacgaggagctggcccagaagatcaagggctaccaggagcagatcgccagcctgaacagcaagtgcaagatgctgaccatgaaggccaagcacgccaccatgctgctgaccgtgaccgaggtggagggcctggccgagggcaccgaggacctggacggcgagctgctgcccacccccagcgcccaccccagcgtggtgatgatgaccgccggcagatgccacaccctgctgagccccgtgaccgaggagagcggcgaggagggcaccaacagcgagatcagcagcccccccgcctgcagaagccccagccccgtggccaacaccgacgccagcgtgaaccaggacatcgcctactaccaggccctgagcgccgagagactgcagaccgacgccgccaagatccaccccagcaccagcgccagccaggagttctacgagcccggcctggagcccagcgccaccgccaagctgggcgacctgcagagaagctgggagaccctgaagaacgtgatcagcgagaagcagagaaccctgtacgaggccctggagagacagcagaagtaccaggacagcctgcagagcatcagcaccaagatggaggccatcgagctgaagctgagcgagagccccgagcccggcagaagccccgagagccagatggccgagcaccaggccctgatggacgagatcctgatgctgcaggacgagatcaacgagctgcagagcagcctggccgaggagctggtgagcgagagctgcgaggccgaccccgccgagcagctggccctgcagagcaccctgaccgtgctggccgagagaatgagcaccatcagaatgaaggccagcggcaagagacagctgctggaggagaagctgaacgaccagctggaggagcagagacaggagcaggccctgcagagatacagatgcgaggccgacgagctggacagctggctgctgagcaccaaggccaccctggacaccgccctgagcccccccaaggagcccatggacatggaggcccagctgatggactgccagaacatgctggtggagatcgagcagaaggtggtggccctgagcgagctgagcgtgcacaacgagaacctgctgctggagggcaaggcccacaccaaggacgaggccgagcagctggccggcaagctgagaagactgaagggcagcctgctggagctgcagagagccctgcacgacaagcagctgaacatgcagggcaccgcccaggagaaggaggagagcgacgtggacctgaccgccacccagagccccggcgtgcaggagtggctggcccaggccagaaccacctggacccagcagagacagagcagcctgcagcagcagaaggagctggagcaggagctggccgagcagaagagcctgctgagaagcgtggccagcagaggcgaggagatcctgatccagcacagcgccgccgagaccagcggcgacgccggcgagaagcccgacgtgctgagccaggagctgggcatggagggcgagaagagcagcgccgaggaccagatgagaatgaagtgggagagcctgcaccaggagttcagcaccaagcagaagctgctgcagaacgtgctggagcaggagcaggagcaggtgctgtacagcagacccaacagactgctgagcggcgtgcccctgtacaagggcgacgtgcccacccaggacaagagcgccgtgaccagcctgctggacggcctgaaccaggccttcgaggaggtgagcagccagagcggcggcgccaagagacagagcatccacctggagcagaagctgtacgacggcgtgagcgccaccagcacctggctggacgacgtggaggagagactgttcgtggccaccgccctgctgcccgaggagaccgagacctgcctgttcaaccaggagatcctggccaaggacatcaaggagatgagcgaggagatggacaagaacaagaacctgttcagccaggccttccccgagaacggcgacaacagagacgtgatcgaggacaccctgggctgcctgctgggcagactgagcctgctggacagcgtggtgaaccagagatgccaccagatgaaggagagactgcagcagatcctgaacttccagaacgacctgaaggtgctgttcaccagcctggccgacaacaagtacatcatcctgcagaagctggccaacgtgttcgagcagcccgtggccgagcagatcgaggccatccagcaggccgaggacggcctgaaggagttcgacgccggcatcatcgagctgaagagaagaggcgacaagctgcaggtggagcagcccagcatgcaggagctgagcaagctgcaggacatgtacgacgagctgatgatgatcatcggcagcagaagaagcggcctgaaccagaacctgaccctgaagagccagtacgagagagccctgcaggacctggccgacctgctggagaccggccaggagaagatggccggcgaccagaagatcatcgtgagcagcaaggaggagatccagcagctgctggacaagcacaaggagtacttccagggcctggagagccacatgatcctgaccgagaccctgttcagaaagatcatcagcttcgccgtgcagaaggagacccagttccacaccgagctgatggcccaggccagcgccgtgctgaagagagcccacaagagaggcgtggagctggagtacatcctggagacctggagccacctggacgaggaccagcaggagctgagcagacagctggaggtggtggagagcagcatccccagcgtgggcctggtggaggagaacgaggacagactgatcgacagaatcaccctgtaccagcacctgaagagcagcctgaacgagtaccagcccaagctgtaccaggtgctggacgacggcaagagactgctgatcagcatcagctgcagcgacctggagagccagctgaaccagctgggcgagtgctggctgagcaacaccaacaagatgagcaaggagctgcacagactggagaccatcctgaagcactggaccagataccagagcgagagcgccgacctgatccactggctgcagagcgccaaggacagactggagttctggacccagcagagcgtgaccgtgccccaggagctggagatggtgagagaccacctgaacgccttcctggagttcagcaaggaggtggacgcccagagcagcctgaagagcagcgtgctgagcaccggcaaccagctgctgagactgaagaaggtggacaccgccaccctgagaagcgagctgagcagaatcgacagccagtggaccgacctgctgaccaacatccccgccgtgcaggagaagctgcaccagctgcagatggacaagctgcccagcagacacgccatcagcgaggtgatgagctggatcagcctgatggagaacgtgatccagaaggacgaggacaacatcaagaacagcatcggctacaaggccatccacgagtacctgcagaagtacaagggcttcaagatcgacatcaactgcaagcagctgaccgtggacttcgtgaaccagagcgtgctgcagatcagcagccaggacgtggagagcaagagaagcgacaagaccgacttcgccgagcagctgggcgccatgaacaagagctggcagatcctgcagggcctggtgaccgagaagatccagctgctggagggcctgctggagagctggagcgagtacgagaacaacgtgcagtgcctgaagacctggttcgagacccaggagaagagactgaagcagcagcacagaatcggcgaccaggccagcgtgcagaacgccctgaaggactgccaggacctggaggacctgatcaaggccaaggagaaggaggtggagaagatcgagcagaacggcctggccctgatccagaacaagaaggaggacgtgagcagcatcgtgatgagcaccctgagagagctgggccagacctgggccaacctggaccacatggtgggccagctgaagatcctgctgaagagcgtgctggaccagtggagcagccacaaggtggccttcgacaagatcaacagctacctgatggaggccagatacagcctgagcagattcagactgctgaccggcagcctggaggccgtgcaggtgcaggtggacaacctgcagaacctgcaggacgacctggagaagcaggagagaagcctgcagaagttcggcagcatcaccaaccagctgctgaaggagtgccacccccccgtgaccgagaccctgaccaacaccctgaaggaggtgaacatgagatggaacaacctgctggaggagatcgccgagcagctgcagagcagcaaggccctgctgcagctgtggcagagatacaaggactacagcaagcagtgcgccagcaccgtgcagcagcaggaggacagaaccaacgagctgctgaaggccgccaccaacaaggacatcgccgacgacgaggtggccacctggatccaggactgcaacgacctgctgaagggcctgggcaccgtgaaggacagcctgttcttcctgcacgagctgggcgagcagctgaagcagcaggtggacgccagcgccgccagcgccatccagagcgaccagctgagcctgagccagcacctgtgcgccctggagcaggccctgtgcaagcagcagaccagcctgcaggccggcgtgctggactacgagaccttcgccaagagcctggaggccctggaggcctggatcgtggaggccgaggagatcctgcagggccaggaccccagccacagcagcgacctgagcaccatccaggagagaatggaggagctgaagggccagatgctgaagttcagcagcatggcccccgacctggacagactgaacgagctgggctacagactgcccctgaacgacaaggagatcaagagaatgcagaacctgaacagacactggagcctgatcagcagccagaccaccgagagattcagcaagctgcagagcttcctgctgcagcaccagaccttcctggagaagtgcgagacctggatggagttcctggtgcagaccgagcagaagctggccgtggagatcagcggcaactaccagcacctgctggagcagcagagagcccacgagctgttccaggccgagatgttcagcagacagcagatcctgcacagcatcatcatcgacggccagagactgctggagcagggccaggtggacgacagagacgagttcaacctgaagctgaccctgctgagcaaccagtggcagggcgtgatcagaagagcccagcagagaagaggcatcatcgacagccagatcagacagtggcagagatacagagagatggccgagaagctgagaaagtggctggtggaggtgagctacctgcccatgagcggcctgggcagcgtgcccatccccctgcagcaggccagaaccctgttcgacgaggtgcagttcaaggagaaggtgttcctgagacagcagggcagctacatcctgaccgtggaggccggcaagcagctgctgctgagcgccgacagcggcgccgaggccgccctgcaggccgagctggccgagatccaggagaagtggaagagcgccagcatgagactggaggagcagaagaagaagctggccttcctgctgaaggactgggagaagtgcgagaagggcatcgccgacagcctggagaagctgagaaccttcaagaagaagctgagccagagcctgcccgaccaccacgaggagctgcacgccgagcagatgagatgcaaggagctggagaacgccgtgggcagctggaccgacgacctgacccagctgagcctgctgaaggacaccctgagcgcctacatcagcgccgacgacatcagcatcctgaacgagagagtggagctgctgcagagacagtgggaggagctgtgccaccagctgagcctgagaagacagcagatcggcgagagactgaacgagtgggccgtgttcagcgagaagaacaaggagctgtgcgagtggctgacccagatggagagcaaggtgagccagaacggcgacatcctgatcgaggagatgatcgagaagctgaagaaggactaccaggaggagatcgccatcgcccaggagaacaagatccagctgcagcagatgggcgagagactggccaaggccagccacgagagcaaggccagcgagatcgagtacaagctgggcaaggtgaacgacagatggcagcacctgctggacctgatcgccgccagagtgaagaagctgaaggagaccctggtggccgtgcagcagctggacaagaacatgagcagcctgagaacctggctggcccacatcgagagcgagctggccaagcccatcgtgtacgacagctgcaacagcgaggagatccagagaaagctgaacgagcagcaggagctgcagagagacatcgagaagcacagcaccggcgtggccagcgtgctgaacctgtgcgaggtgctgctgcacgactgcgacgcctgcgccaccgacgccgagtgcgacagcatccagcaggccaccagaaacctggacagaagatggagaaacatctgcgccatgagcatggagagaagactgaagatcgaggagacctggagactgtggcagaagttcctggacgactacagcagattcgaggactggctgaagagcagcgagagaaccgccgccttccccagcagcagcggcgtgatctacaccgtggccaaggaggagctgaagaagttcgaggccttccagagacaggtgcacgagtgcctgacccagctggagctgatcaacaagcagtacagaagactggccagagagaacagaaccgacagcgcctgcagcctgaagcagatggtgcacgagggcaaccagagatgggacaacctgcagaagagagtgaccagcatcctgagaagactgaagcacttcatcggccagagagaggagttcgagaccgccagagacagcatcctggtgtggctgaccgagatggacctgcagctgaccaacatcgagcacttcagcgagtgcgacgtgcaggccaagatcaagcagctgaaggccttccagcaggagatcagcctgaaccacaacaagatcgagcagatcatcgcccagggcgagcagctgatcgagaagagcgagcccctggacgccgccatcatcgaggaggagctggacgagctgagaagatactgccaggaggtgttcggcagagtggagagataccacaagaagctgatcagactgcccctgcccgacgacgagcacgacctgagcgacagagagctggagctggaggacagcgccgccctgagcgacctgcactggcacgacagaagcgccgacagcctgctgagcccccagcccagcagcaacctgagcctgagcctggcccagcccctgagaagcgagagaagcggcagagacacccccgccagcgtggacagcatccccctggagtgggaccacgactacgacctgagcagagacctggagagcgccatgagcagagccctgcccagcgaggacgaggagggccaggacgacaaggacttctacctgagaggcgccgtgggcctgagcggcgaccacagcgccctggagagccagatcagacagctgggcaaggccctggacgacagcagattccagatccagcagaccgagaacatcatcagaagcaagacccccaccggccccgagctggacaccagctacaagggctacatgaagctgctgggcgagtgcagcagcagcatcgacagcgtgaagagactggagcacaagctgaaggaggaggaggagagcctgcccggcttcgtgaacctgcacagcaccgagacccagaccgccggcgtgatcgacagatgggagctgctgcaggcccaggccctgagcaaggagctgagaatgaagcagaacctgcagaagtggcagcagttcaacagcgacctgaacagcatctgggcctggctgggcgacaccgaggaggagctggagcagctgcagagactggagctgagcaccgacatccagaccatcgagctgcagatcaagaagctgaaggagctgcagaaggccgtggaccacagaaaggccatcatcctgagcatcaacctgtgcagccccgagttcacccaggccgacagcaaggagagcagagacctgcaggacagactgagccagatgaacggcagatgggacagagtgtgcagcctgctggaggagtggagaggcctgctgcaggacgccctgatgcagtgccagggcttccacgagatgagccacggcctgctgctgatgctggagaacatcgacagaagaaagaacgagatcgtgcccatcgacagcaacctggacgccgagatcctgcaggaccaccacaagcagctgatgcagatcaagcacgagctgctggagagccagctgagagtggccagcctgcaggacatgagctgccagctgctggtgaacgccgagggcaccgactgcctggaggccaaggagaaggtgcacgtgatcggcaacagactgaagctgctgctgaaggaggtgagcagacacatcaaggagctggagaagctgctggacgtgagcagcagccagcaggacctgagcagctggagcagcgccgacgagctggacaccagcggcagcgtgagccccaccagcggcagaagcacccccaacagacagaagacccccagaggcaagtgcagcctgagccagcccggccccagcgtgagcagcccccacagcagaagcaccaagggcggcagcgacagcagcctgagcgagcccggccccggcagaagcggcagaggcttcctgttcagagtgctgagagccgccctgcccctgcagctgctgctgctgctgctgatcggcctggcctgcctggtgcccatgagcgaggaggactacagctgcgccctgagcaacaacttcgccagaagcttccaccccatgctgagatacaccaacggccccccccccctgtag

SEQ ID NO: 100474 - DNA, 9966 bp, synthetic construct
  misc_feature 1..9966: note = Description of Artificial Sequence: Synthetic coding sequence
  source 1..9966: mol_type = other DNA
atggagctggacgccgccgtgcagaagttcctggagcagaacggccagctgggcaagcccctggccaagaagatcggcaagctgaccgagctgcaccagcagaccatcagacaggccgagaacagactgagcaagctgaaccaggccgccagccacctggaggagtacaacgagatgctggagctgatcctgaagtggatcgagaaggccaaggtgctggcccacggcaccatcgcctggaacagcgccagccagctgagagagcagtacatcctgcaccagaccctgctggaggagagcaaggagatcgacagcgagctggaggccatgaccgagaagctgcagtacctgaccagcgtgtactgcaccgagaagatgagccagcaggtggccgagctgggcagagagaccgaggagctgagacagatgatcaagatcagactgcagaacctgcaggacgccgccaaggacatgaagaagttcgaggccgagctgaagaagctgcaggccgccctggagcaggcccaggccaccctgaccagccccgaggtgggcagactgagcctgaaggagcagctgagccacagacagcacctgctgagcgagatggagagcctgaagcccaaggtgcaggccgtgcagctgtgccagagcgccctgagaatccccgaggacgtggtggccagcctgcccctgtgccacgccgccctgagactgcaggaggaggccagcagactgcagcacaccgccatccagcagtgcaacatcatgcaggccgccgtggtgcagtacgagcagtacgagcaggagatgaagcacctgcagcagctgatcgagggcgcccacagagagatcgaggacaagcccgtggccaccagcaacatccaggagctgcaggcccagatcagcagacacgaggagctggcccagaagatcaagggctaccaggagcagatcgccagcctgaacagcaagtgcaagatgctgaccatgaaggccaagcacgccaccatgctgctgaccgtgaccgaggtggagggcctggccgagggcaccgaggacctggacggcgagctgctgcccacccccagcgcccaccccagcgtggtgatgatgaccgccggcagatgccacaccctgctgagccccgtgaccgaggagagcggcgaggagggcaccaacagcgagatcagcagcccccccgcctgcagaagccccagccccgtggccaacaccgacgccagcgtgaaccaggacatcgcctactaccaggccctgagcgccgagagactgcagaccgacgccgccaagatccaccccagcaccagcgccagccaggagttctacgagcccggcctggagcccagcgccaccgccaagctgggcgacctgcagagaagctgggagaccctgaagaacgtgatcagcgagaagcagagaaccctgtacgaggccctggagagacagcagaagtaccaggacagcctgcagagcatcagcaccaagatggaggccatcgagctgaagctgagcgagagccccgagcccggcagaagccccgagagccagatggccgagcaccaggccctgatggacgagatcctgatgctgcaggacgagatcaacgagctgcagagcagcctggccgaggagctggtgagcgagagctgcgaggccgaccccgccgagcagctggccctgcagagcaccctgaccgtgctggccgagagaatgagcaccatcagaatgaaggccagcggcaagagacagctgctggaggagaagctgaacgaccagctggaggagcagagacaggagcaggccctgcagagatacagatgcgaggccgacgagctggacagctggctgctgagcaccaaggccaccctggacaccgccctgagcccccccaaggagcccatggacatggaggcccagctgatggactgccagaacatgctggtggagatcgagcagaaggtggtggccctgagcgagctgagcgtgcacaacgagaacctgctgctggagggcaaggcccacaccaaggacgaggccgagcagctggccggcaagctgagaagactgaagggcagcctgctggagctgcagagagccctgcacgacaagcagctgaacatgcagggcaccgcccaggagaaggaggagagcgacgtggacctgaccgccacccagagccccggcgtgcaggagtggctggcccaggccagaaccacctggacccagcagagacagagcagcctgcagcagcagaaggagctggagcaggagctggccgagcagaagagcctgctgagaagcgtggccagcagaggcgaggagatcctgatccagcacagcgccgccgagaccagcggcgacgccggcgagaagcccgacgtgctgagccaggagctgggcatggagggcgagaagagcagcgccgaggaccagatgagaatgaagtgggagagcctgcaccaggagttcagcaccaagcagaagctgctgcagaacgtgctggagcaggagcaggagcaggtgctgtacagcagacccaacagactgctgagcggcgtgcccctgtacaagggcgacgtgcccacccaggacaagagcgccgtgaccagcctgctggacggcctgaaccaggccttcgaggaggtgagcagccagagcggcggcgccaagagacagagcatccacctggagcagaagctgtacgacggcgtgagcgccaccagcacctggctggacgacgtggaggagagactgttcgtggccaccgccctgctgcccgaggagaccgagacctgcctgttcaaccaggagatcctggccaaggacatcaaggagatgagcgaggagatggacaagaacaagaacctgttcagccaggccttccccgagaacggcgacaacagagacgtgatcgaggacaccctgggctgcctgctgggcagactgagcctgctggacagcgtggtgaaccagagatgccaccagatgaaggagagactgcagcagatcctgaacttccagaacgacctgaaggtgctgttcaccagcctggccgacaacaagtacatcatcctgcagaagctggccaacgtgttcgagcagcccgtggccgagcagatcgaggccatccagcaggccgaggacggcctgaaggagttcgacgccggcatcatcgagctgaagagaagaggcgacaagctgcaggtggagcagcccagcatgcaggagctgagcaagctgcaggacatgtacgacgagctgatgatgatcatcggcagcagaagaagcggcctgaaccagaacctgaccctgaagagccagtacgagagagccctgcaggacctggccgacctgctggagaccggccaggagaagatggccggcgaccagaagatcatcgtgagcagcaaggaggagatccagcagctgctggacaagcacaaggagtacttccagggcctggagagccacatgatcctgaccgagaccctgttcagaaagatcatcagcttcgccgtgcagaaggagacccagttccacaccgagctgatggcccaggccagcgccgtgctgaagagagcccacaagagaggcgtggagctggagtacatcctggagacctggagccacctggacgaggaccagcaggagctgagcagacagctggaggtggtggagagcagcatccccagcgtgggcctggtggaggagaacgaggacagactgatcgacagaatcaccctgtaccagcacctgaagagcagcctgaacgagtaccagcccaagctgtaccaggtgctggacgacggcaagagactgctgatcagcatcagctgcagcgacctggagagccagctgaaccagctgggcgagtgctggctgagcaacaccaacaagatgagcaaggagctgcacagactggagaccatcctgaagcactggaccagataccagagcgagagcgccgacctgatccactggctgcagagcgccaaggacagactggagttctggacccagcagagcgtgaccgtgccccaggagctggagatggtgagagaccacctgaacgccttcctggagttcagcaaggaggtggacgcccagagcagcctgaagagcagcgtgctgagcaccggcaaccagctgctgagactgaagaaggtggacaccgccaccctgagaagcgagctgagcagaatcgacagccagtggaccgacctgctgaccaacatccccgccgtgcaggagaagctgcaccagctgcagatggacaagctgcccagcagacacgccatcagcgaggtgatgagctggatcagcctgatggagaacgtgatccagaaggacgaggacaacatcaagaacagcatcggctacaaggccatccacgagtacctgcagaagtacaagggcttcaagatcgacatcaactgcaagcagctgaccgtggacttcgtgaaccagagcgtgctgcagatcagcagccaggacgtggagagcaagagaagcgacaagaccgacttcgccgagcagctgggcgccatgaacaagagctggcagatcctgcagggcctggtgaccgagaagatccagctgctggagggcctgctggagagctggagcgagtacgagaacaacgtgcagtgcctgaagacctggttcgagacccaggagaagagactgaagcagcagcacagaatcggcgaccaggccagcgtgcagaacgccctgaaggactgccaggacctggaggacctgatcaaggccaaggagaaggaggtggagaagatcgagcagaacggcctggccctgatccagaacaagaaggaggacgtgagcagcatcgtgatgagcaccctgagagagctgggccagacctgggccaacctggaccacatggtgggccagctgaagatcctgctgaagagcgtgctggaccagtggagcagccacaaggtggccttcgacaagatcaacagctacctgatggaggccagatacagcctgagcagattcagactgctgaccggcagcctggaggccgtgcaggtgcaggtggacaacctgcagaacctgcaggacgacctggagaagcaggagagaagcctgcagaagttcggcagcatcaccaaccagctgctgaaggagtgccacccccccgtgaccgagaccctgaccaacaccctgaaggaggtgaacatgagatggaacaacctgctggaggagatcgccgagcagctgcagagcagcaaggccctgctgcagctgtggcagagatacaaggactacagcaagcagtgcgccagcaccgtgcagcagcaggaggacagaaccaacgagctgctgaaggccgccaccaacaaggacatcgccgacgacgaggtggccacctggatccaggactgcaacgacctgctgaagggcctgggcaccgtgaaggacagcctgttcttcctgcacgagctgggcgagcagctgaagcagcaggtggacgccagcgccgccagcgccatccagagcgaccagctgagcctgagccagcacctgtgcgccctggagcaggccctgtgcaagcagcagaccagcctgcaggccggcgtgctggactacgagaccttcgccaagagcctggaggccctggaggcctggatcgtggaggccgaggagatcctgcagggccaggaccccagccacagcagcgacctgagcaccatccaggagagaatggaggagctgaagggccagatgctgaagttcagcagcatggcccccgacctggacagactgaacgagctgggctacagactgcccctgaacgacaaggagatcaagagaatgcagaacctgaacagacactggagcctgatcagcagccagaccaccgagagattcagcaagctgcagagcttcctgctgcagcaccagaccttcctggagaagtgcgagacctggatggagttcctggtgcagaccgagcagaagctggccgtggagatcagcggcaactaccagcacctgctggagcagcagagagcccacgagctgttccaggccgagatgttcagcagacagcagatcctgcacagcatcatcatcgacggccagagactgctggagcagggccaggtggacgacagagacgagttcaacctgaagctgaccctgctgagcaaccagtggcagggcgtgatcagaagagcccagcagagaagaggcatcatcgacagccagatcagacagtggcagagatacagagagatggccgagaagctgagaaagtggctggtggaggtgagctacctgcccatgagcggcctgggcagcgtgcccatccccctgcagcaggccagaaccctgttcgacgaggtgcagttcaaggagaaggtgttcctgagacagcagggcagctacatcctgaccgtggaggccggcaagcagctgctgctgagcgccgacagcggcgccgaggccgccctgcaggccgagctggccgagatccaggagaagtggaagagcgccagcatgagactggaggagcagaagaagaagctggccttcctgctgaaggactgggagaagtgcgagaagggcatcgccgacagcctggagaagctgagaaccttcaagaagaagctgagccagagcctgcccgaccaccacgaggagctgcacgccgagcagatgagatgcaaggagctggagaacgccgtgggcagctggaccgacgacctgacccagctgagcctgctgaaggacaccctgagcgcctacatcagcgccgacgacatcagcatcctgaacgagagagtggagctgctgcagagacagtgggaggagctgtgccaccagctgagcctgagaagacagcagatcggcgagagactgaacgagtgggccgtgttcagcgagaagaacaaggagctgtgcgagtggctgacccagatggagagcaaggtgagccagaacggcgacatcctgatcgaggagatgatcgagaagctgaagaaggactaccaggaggagatcgccatcgcccaggagaacaagatccagctgcagcagatgggcgagagactggccaaggccagccacgagagcaaggccagcgagatcgagtacaagctgggcaaggtgaacgacagatggcagcacctgctggacctgatcgccgccagagtgaagaagctgaaggagaccctggtggccgtgcagcagctggacaagaacatgagcagcctgagaacctggctggcccacatcgagagcgagctggccaagcccatcgtgtacgacagctgcaacagcgaggagatccagagaaagctgaacgagcagcaggagctgcagagagacatcgagaagcacagcaccggcgtggccagcgtgctgaacctgtgcgaggtgctgctgcacgactgcgacgcctgcgccaccgacgccgagtgcgacagcatccagcaggccaccagaaacctggacagaagatggagaaacatctgcgccatgagcatggagagaagactgaagatcgaggagacctggagactgtggcagaagttcctggacgactacagcagattcgaggactggctgaagagcagcgagagaaccgccgccttccccagcagcagcggcgtgatctacaccgtggccaaggaggagctgaagaagttcgaggccttccagagacaggtgcacgagtgcctgacccagctggagctgatcaacaagcagtacagaagactggccagagagaacagaaccgacagcgcctgcagcctgaagcagatggtgcacgagggcaaccagagatgggacaacctgcagaagagagtgaccagcatcctgagaagactgaagcacttcatcggccagagagaggagttcgagaccgccagagacagcatcctggtgtggctgaccgagatggacctgcagctgaccaacatcgagcacttcagcgagtgcgacgtgcaggccaagatcaagcagctgaaggccttccagcaggagatcagcctgaaccacaacaagatcgagcagatcatcgcccagggcgagcagctgatcgagaagagcgagcccctggacgccgccatcatcgaggaggagctggacgagctgagaagatactgccaggaggtgttcggcagagtggagagataccacaagaagctgatcagactgcccctgcccgacgacgagcacgacctgagcgacagagagctggagctggaggacagcgccgccctgagcgacctgcactggcacgacagaagcgccgacagcctgctgagcccccagcccagcagcaacctgagcctgagcctggcccagcccctgagaagcgagagaagcggcagagacacccccgccagcgtggacagcatccccctggagtgggaccacgactacgacctgagcagagacctggagagcgccatgagcagagccctgcccagcgaggacgaggagggccaggacgacaaggacttctacctgagaggcgccgtgggcctgagcggcgaccacagcgccctggagagccagatcagacagctgggcaaggccctggacgacagcagattccagatccagcagaccgagaacatcatcagaagcaagacccccaccggccccgagctggacaccagctacaagggctacatgaagctgctgggcgagtgcagcagcagcatcgacagcgtgaagagactggagcacaagctgaaggaggaggaggagagcctgcccggcttcgtgaacctgcacagcaccgagacccagaccgccggcgtgatcgacagatgggagctgctgcaggcccaggccctgagcaaggagctgagaatgaagcagaacctgcagaagtggcagcagttcaacagcgacctgaacagcatctgggcctggctgggcgacaccgaggaggagctggagcagctgcagagactggagctgagcaccgacatccagaccatcgagctgcagatcaagaagctgaaggagctgcagaaggccgtggaccacagaaaggccatcatcctgagcatcaacctgtgcagccccgagttcacccaggccgacagcaaggagagcagagacctgcaggacagactgagccagatgaacggcagatgggacagagtgtgcagcctgctggaggagtggagaggcctgctgcaggacgccctgatgcagtgccagggcttccacgagatgagccacggcctgctgctgatgctggagaacatcgacagaagaaagaacgagatcgtgcccatcgacagcaacctggacgccgagatcctgcaggaccaccacaagcagctgatgcagatcaagcacgagctgctggagagccagctgagagtggccagcctgcaggacatgagctgccagctgctggtgaacgccgagggcaccgactgcctggaggccaaggagaaggtgcacgtgatcggcaacagactgaagctgctgctgaaggaggtgagcagacacatcaaggagctggagaagctgctggacgtgagcagcagccagcaggacctgagcagctggagcagcgccgacgagctggacaccagcggcagcgtgagccccaccagcggcagaagcacccccaacagacagaagacccccagaggcaagtgcagcctgagccagcccggccccagcgtgagcagcccccacagcagaagcaccaagggcggcagcgacagcagcctgagcgagcccggccccggcagaagcggcagaggcttcctgttcagagtgctgagagccgccctgcccctgcagctgctgctgctgctgctgatcggcctggcctgcctggtgcccatgagcgaggaggactacagctgcgccctgagcaacaacttcgccagaagcttccaccccatgctgagatacaccaacggccccccccccctgtag

SEQ ID NO: 100475 - DNA, 2934 bp, synthetic construct
  misc_feature 1..2934: note = Description of Artificial Sequence: Synthetic coding sequence
  source 1..2934: mol_type = other DNA
atggtggtggccgaggacctgagcgccctgagaatggccgaggacagctgcgtggacgccgacctgcccgactgcaactgcgacgtgaccagacagagagtgaagaagctgaaggagaccctggtggccgtgcagcagctggacaagaacatgagcagcctgagaacctggctggcccacatcgagagcgagctggccaagcccatcgtgtacgacagctgcaacagcgaggagatccagagaaagctgaacgagcagcaggagctgcagagagacatcgagaagcacagcaccggcgtggccagcgtgctgaacctgtgcgaggtgctgctgcacgactgcgacgcctgcgccaccgacgccgagtgcgacagcatccagcaggccaccagaaacctggacagaagatggagaaacatctgcgccatgagcatggagagaagactgaagatcgaggagacctggagactgtggcagaagttcctggacgactacagcagattcgaggactggctgaagagcagcgagagaaccgccgccttccccagcagcagcggcgtgatctacaccgtggccaaggaggagctgaagaagttcgaggccttccagagacaggtgcacgagtgcctgacccagctggagctgatcaacaagcagtacagaagactggccagagagaacagaaccgacagcgcctgcagcctgaagcagatggtgcacgagggcaaccagagatgggacaacctgcagaagagagtgaccagcatcctgagaagactgaagcacttcatcggccagagagaggagttcgagaccgccagagacagcatcctggtgtggctgaccgagatggacctgcagctgaccaacatcgagcacttcagcgagtgcgacgtgcaggccaagatcaagcagctgaaggccttccagcaggagatcagcctgaaccacaacaagatcgagcagatcatcgcccagggcgagcagctgatcgagaagagcgagcccctggacgccgccatcatcgaggaggagctggacgagctgagaagatactgccaggaggtgttcggcagagtggagagataccacaagaagctgatcagactgcccctgcccgacgacgagcacgacctgagcgacagagagctggagctggaggacagcgccgccctgagcgacctgcactggcacgacagaagcgccgacagcctgctgagcccccagcccagcagcaacctgagcctgagcctggcccagcccctgagaagcgagagaagcggcagagacacccccgccagcgtggacagcatccccctggagtgggaccacgactacgacctgagcagagacctggagagcgccatgagcagagccctgcccagcgaggacgaggagggccaggacgacaaggacttctacctgagaggcgccgtgggcctgagcgacgtgatgatccccgagagccccgaggcctacgtgaagctgaccgagaacgccatcaagaacaccagcggcgaccacagcgccctggagagccagatcagacagctgggcaaggccctggacgacagcagattccagatccagcagaccgagaacatcatcagaagcaagacccccaccggccccgagctggacaccagctacaagggctacatgaagctgctgggcgagtgcagcagcagcatcgacagcgtgaagagactggagcacaagctgaaggaggaggaggagagcctgcccggcttcgtgaacctgcacagcaccgagacccagaccgccggcgtgatcgacagatgggagctgctgcaggcccaggccctgagcaaggagctgagaatgaagcagaacctgcagaagtggcagcagttcaacagcgacctgaacagcatctgggcctggctgggcgacaccgaggaggagctggagcagctgcagagactggagctgagcaccgacatccagaccatcgagctgcagatcaagaagctgaaggagctgcagaaggccgtggaccacagaaaggccatcatcctgagcatcaacctgtgcagccccgagttcacccaggccgacagcaaggagagcagagacctgcaggacagactgagccagatgaacggcagatgggacagagtgtgcagcctgctggaggagtggagaggcctgctgcaggacgccctgatgcagtgccagggcttccacgagatgagccacggcctgctgctgatgctggagaacatcgacagaagaaagaacgagatcgtgcccatcgacagcaacctggacgccgagatcctgcaggaccaccacaagcagctgatgcagatcaagcacgagctgctggagagccagctgagagtggccagcctgcaggacatgagctgccagctgctggtgaacgccgagggcaccgactgcctggaggccaaggagaaggtgcacgtgatcggcaacagactgaagctgctgctgaaggaggtgagcagacacatcaaggagctggagaagctgctggacgtgagcagcagccagcaggacctgagcagctggagcagcgccgacgagctggacaccagcggcagcgtgagccccaccagcggcagaagcacccccaacagacagaagacccccagaggcaagtgcagcctgagccagcccggccccagcgtgagcagcccccacagcagaagcaccaagggcggcagcgacagcagcctgagcgagcccggccccggcagaagcggcagaggcttcctgttcagagtgctgagagccgccctgcccctgcagctgctgctgctgctgctgatcggcctggcctgcctggtgcccatgagcgaggaggactacagctgcgccctgagcaacaacttcgccagaagcttccaccccatgctgagatacaccaacggccccccccccctgtag

SEQ ID NO: 100476 - DNA, 26394 bp, synthetic construct
  misc_feature 1..26394: note = Description of Artificial Sequence: Synthetic coding sequence
  source 1..26394: mol_type = other DNA
atggccaccagcagaggcgccagcagatgccccagagacatcgccaacgtgatgcagagactgcaggacgagcaggagatcgtgcagaagagaaccttcaccaagtggatcaacagccacctggccaagagaaagccccccatggtggtggacgacctgttcgaggacatgaaggacggcgtgaagctgctggccctgctggaggtgctgagcggccagaagctgccctgcgagcagggcagaagaatgaagagaatccacgccgtggccaacatcggcaccgccctgaagttcctggagggcagaaagatcaagctggtgaacatcaacagcaccgacatcgccgacggcagacccagcatcgtgctgggcctgatgtggaccatcatcctgtacttccagatcgaggagctgaccagcaacctgccccagctgcagagcctgagcagcagcgccagcagcgtggacagcatcgtgagcagcgagacccccagcccccccagcaagagaaaggtgaccaccaagatccagggcaacgccaagaaggccctgctgaagtgggtgcagtacaccgccggcaagcagaccggcatcgaggtgaaggacttcggcaagagctggagaagcggcgtggccttccacagcgtgatccacgccatcagacccgagctggtggacctggagaccgtgaagggcagaagcaacagagagaacctggaggacgccttcaccatcgccgagaccgagctgggcatccccagactgctggaccccgaggacgtggacgtggacaagcccgacgagaagagcatcatgacctacgtggcccagttcctgaagcactaccccgacatccacaacgccagcaccgacggccaggaggacgacgagatcctgcccggcttccccagcttcgccaacagcgtgcagaacttcaagagagaggacagagtgatcttcaaggagatgaaggtgtggatcgagcagttcgagagagacctgaccagagcccagatggtggagagcaacctgcaggacaagtaccagagcttcaagcacttcagagtgcagtacgagatgaagagaaagcagatcgagcacctgatccagcccctgcacagagacggcaagctgagcctggaccaggccctggtgaagcagagctgggacagagtgaccagcagactgttcgactggcacatccagctggacaagagcctgcccgcccccctgggcaccatcggcgcctggctgtacagagccgaggtggccctgagagaggagatcaccgtgcagcaggtgcacgaggagaccgccaacaccatccagagaaagctggagcagcacaaggacctgctgcagaacaccgacgcccacaagagagccttccacgagatctacagaaccagaagcgtgaacggcatccccgtgccccccgaccagctggaggacatggccgagagattccacttcgtgagcagcaccagcgagctgcacctgatgaagatggagttcctggagctgaagtacagactgctgagcctgctggtgctggccgagagcaagctgaagagctggatcatcaagtacggcagaagagagagcgtggagcagctgctgcagaactacgtgagcttcatcgagaacagcaagttcttcgagcagtacgaggtgacctaccagatcctgaagcagaccgccgagatgtacgtgaaggccgacggcagcgtggaggaggccgagaacgtgatgaagttcatgaacgagaccaccgcccagtggagaaacctgagcgtggaggtgagaagcgtgagaagcatgctggaggaggtgatcagcaactgggacagatacggcaacaccgtggccagcctgcaggcctggctggaggacgccgagaagatgctgaaccagagcgagaacgccaagaaggacttcttcagaaacctgccccactggatccagcagcacaccgccatgaacgacgccggcaacttcctgatcgagacctgcgacgagatggtgagcagagacctgaagcagcagctgctgctgctgaacggcagatggagagagctgttcatggaggtgaagcagtacgcccaggccgacgagatggacagaatgaagaaggagtacaccgactgcgtggtgaccctgagcgccttcgccaccgaggcccacaagaagctgagcgagcccctggaggtgagcttcatgaacgtgaagctgctgatccaggacctggaggacatcgagcagagagtgcccgtgatggacgcccagtacaagatcatcaccaagaccgcccacctgatcaccaaggagagcccccaggaggagggcaaggagatgttcgccaccatgagcaagctgaaggagcagctgaccaaggtgaaggagtgctacagccccctgctgtacgagagccagcagctgctgatccccctggaggagctggagaagcagatgaccagcttctacgacagcctgggcaagatcaacgagatcatcaccgtgctggagagagaggcccagagcagcgccctgttcaagcagaagcaccaggagctgctggcctgccaggagaactgcaagaagaccctgaccctgatcgagaagggcagccagagcgtgcagaagttcgtgaccctgagcaacgtgctgaagcacttcgaccagaccagactgcagagacagatcgccgacatccacgtggccttccagagcatggtgaagaagaccggcgactggaagaagcacgtggagaccaacagcagactgatgaagaagttcgaggagagcagagccgagctggagaaggtgctgagaatcgcccaggagggcctggaggagaagggcgaccccgaggagctgctgagaagacacaccgagttcttcagccagctggaccagagagtgctgaacgccttcctgaaggcctgcgacgagctgaccgacatcctgcccgagcaggagcagcagggcctgcaggaggccgtgagaaagctgcacaagcagtggaaggacctgcagggcgaggccccctaccacctgctgcacctgaagatcgacgtggagaagaacagattcctggccagcgtggaggagtgcagaaccgagctggacagagagaccaagctgatgccccaggagggcagcgagaagatcatcaaggagcacagagtgttcttcagcgacaagggcccccaccacctgtgcgagaagagactgcagctgatcgaggagctgtgcgtgaagctgcccgtgagagaccccgtgagagacacccccggcacctgccacgtgaccctgaaggagctgagagccgccatcgacagcacctacagaaagctgatggaggaccccgacaagtggaaggactacaccagcagattcagcgagttcagcagctggatcagcaccaacgagacccagctgaagggcatcaagggcgaggccatcgacaccgccaaccacggcgaggtgaagagagccgtggaggagatcagaaacggcgtgaccaagagaggcgagaccctgagctggctgaagagcagactgaaggtgctgaccgaggtgagcagcgagaacgaggcccagaagcagggcgacgagctggccaagctgagcagcagcttcaaggccctggtgaccctgctgagcgaggtggagaagatgctgagcaacttcggcgactgcgtgcagtacaaggagatcgtgaagaacagcctggaggagctgatcagcggcagcaaggaggtgcaggagcaggccgagaagatcctggacaccgagaacctgttcgaggcccagcagctgctgctgcaccaccagcagaagaccaagagaatcagcgccaagaagagagacgtgcagcagcagatcgcccaggcccagcagggcgagggcggcctgcccgacagaggccacgaggagctgagaaagctggagagcaccctggacggcctggagagaagcagagagagacaggagagaagaatccaggtgaccctgagaaagtgggagagattcgagaccaacaaggagaccgtggtgagatacctgttccagaccggcagcagccacgagagattcctgagcttcagcagcctggagagcctgagcagcgagctggagcagaccaaggagttcagcaagagaaccgagagcatcgccgtgcaggccgagaacctggtgaaggaggccagcgagatccccctgggcccccagaacaagcagctgctgcagcagcaggccaagagcatcaaggagcaggtgaagaagctggaggacaccctggaggaggacatcaagaccatggagatggtgaagaccaagtgggaccacttcggcagcaacttcgagaccctgagcgtgtggatcaccgagaaggagaaggagctgaacgccctggagaccagcagcagcgccatggacatgcagatcagccagatcaaggtgaccatccaggagatcgagagcaagctgagcagcatcgtgggcctggaggaggaggcccagagcttcgcccagttcgtgaccaccggcgagagcgccagaatcaaggccaagctgacccagatcagaagatacggcgaggagctgagagagcacgcccagtgcctggagggcaccatcctgggccacctgagccagcagcagaagttcgaggagaacctgagaaagatccagcagagcgtgagcgagttcgaggacaagctggccgtgcccatcaagatctgcagcagcgccaccgagacctacaaggtgctgcaggagcacatggacctgtgccaggccctggagagcctgagcagcgccatcaccgccttcagcgccagcgccagaaaggtggtgaacagagacagctgcgtgcaggaggccgccgccctgcagcagcagtacgaggacatcctgagaagagccaaggagagacagaccgccctggagaacctgctggcccactggcagagactggagaaggagctgagcagcttcctgacctggctggagagaggcgaggccaaggccagcagccccgagatggacatcagcgccgacagagtgaaggtggagggcgagctgcagctgatccaggccctgcagaacgaggtggtgagccaggccagcttctacagcaagctgctgcagctgaaggagagcctgttcagcgtggccagcaaggacgacgtgaagatgatgaagctgcacctggagcagctggacgagagatggagagacctgccccagatcatcaacaagagaatcaacttcctgcagagcgtggtggccgagcaccagcagttcgacgagctgctgctgagcttcagcgtgtggatcaagctgttcctgagcgagctgcagaccaccagcgagatcagcatcatggaccaccaggtggccctgaccagacacaaggaccacgccgccgaggtggagagcaagaagggcgagctgcagagcctgcagggccacctggccaagctgggcagcctgggcagagccgaggacctgcacctgctgcagggcaaggccgaggactgcttccagctgttcgaggaggccagccaggtggtggagagaagacagctggccctgagccacctggccgagttcctgcagagccacgccagcctgagcggcatcctgagacagctgagacagaccgtggaggccaccaacagcatgaacaagaacgagagcgacctgatcgagaaggacctgaacgacgccctgcagaacgccaaggccctggagagcgccgccgtgagcctggacggcatcctgagcaaggcccagtaccacctgaagatcggcagcagcgagcagagaaccagctgcagagccaccgccgaccagctgtgcggcgaggtggagagaatccagaacctgctgggcaccaagcagagcgaggccgacgccctggccgtgctgaagaaggccttccaggaccagaaggaggagctgctgaagagcatcgaggacatcgaggagagaaccgacaaggagagactgaaggagcccaccagacaggccctgcagcagagactgagagtgttcaaccagctggaggacgagctgaacagccacgagcacgagctgtgctggctgaaggacaaggccaagcagatcgcccagaaggacgtggccttcgcccccgaggtggacagagagatcaacagactggaggtgacctgggacgacaccaagagactgatccacgagaaccagggccagtgctgcggcctgatcgacctgatgagagagtaccagaacctgaagagcgccgtgagcaaggtgctggagaacgccagcagcgtgatcgtgaccagaaccaccatcaaggaccaggaggacctgaagtgggccttcagcaagcacgagaccgccaagaacaagatgaactacaagcagaaggacctggacaacttcaccagcaagggcaagcacctgctgagcgagctgaagaagatccacagcagcgacttcagcctggtgaagaccgacatggagagcaccgtggacaagtggctggacgtgagcgagaagctggaggagaacatggacagactgagagtgagcctgagcatctgggacgacgtgctgagcaccagagacgagatcgagggctggagcaacaactgcgtgccccagatggccgagaacatcagcaacctggacaaccacctgagagccgaggagctgctgaaggagttcgagagcgaggtgaagaacaaggccctgagactggaggagctgcacagcaaggtgaacgacctgaaggagctgaccaagaacctggagaccccccccgacctgcagttcatcgaggccgacctgatgcagaagctggagcacgccaaggagatcaccgaggtggccaagggcaccctgaaggacttcaccgcccagagcacccaggtggagaagttcatcaacgacatcaccacctggttcaccaaggtggaggagagcctgatgaactgcgcccagaacgagacctgcgaggccctgaagaaggtgaaggacatccagaaggagctgcagagccagcagagcaacatcagcagcacccaggagaacctgaacagcctgtgcagaaagtaccacagcgccgagctggagagcctgggcagagccatgaccggcctgatcaagaagcacgaggccgtgagccagctgtgcagcaagacccaggccagcctgcaggagagcctggagaagcacttcagcgagagcatgcaggagttccaggagtggttcctgggcgccaaggccgccgccaaggagagcagcgacagaaccggcgacagcaaggtgctggaggccaagctgcacgacctgcagaacatcctggacagcgtgagcgacggccagagcaagctggacgccgtgacccaggagggccagaccctgtacgcccacctgagcaagcagatcgtgagcagcatccaggagcagatcaccaaggccaacgaggagttccaggccttcctgaagcagtgcctgaaggacaagcaggccctgcaggactgcgccagcgagctgggcagcttcgaggaccagcacagaaagctgaacctgtggatccacgagatggaggagagattcaacaccgagaacctgggcgagagcaagcagcacatccccgagaagaagaacgaggtgcacaaggtggagatgttcctgggcgagctgctggccgccagagagagcctggacaagctgagccagagaggccagctgctgagcgaggagggccacggcgccggccaggagggcagactgtgcagccagctgctgaccagccaccagaacctgctgagaatgaccaaggagaagctgagaagctgccaggtggccctgcaggagcacgaggccctggaggaggccctgcagagcatgtggttctgggtgaaggccatccaggacagactggcctgcgccgagagcaccctgggcagcaaggacaccctggagaagagactgagccagatccaggacatcctgctgatgaagggcgagggcgaggtgaagctgaacatggccatcggcaagggcgagcaggccctgagaagcagcaacaaggagggccagagagtgatccagacccagctggagaccctgaaggaggtgtgggccgacatcatgagcagcagcgtgcacgcccagagcaccctggagagcgtgatcagccagtggaacgactacgtggagagaaagaaccagctggagcagtggatggagagcgtggaccagaagatcgagcaccccctgcagccccagcccggcctgaaggagaagttcgtgctgctggaccacctgcagagcatcctgagcgaggccgaggaccacaccagagccctgcacagactgatcgccaagagcagagagctgtacgagaagaccgaggacgagagcttcaaggacaccgcccaggaggagctgaagacccagttcaacgacatcatgaccgtggccaaggagaagatgagaaaggtggaggagatcgtgaaggaccacctgatgtacctggacgccgtgcacgagttcaccgactggctgcacagcgccaaggaggagctgcacagatggagcgacatgagcggcgacagcagcgccacccagaagaagctgagcaagatcaaggagctgatcgacagcagagagatcggcgccagcagactgagcagagtggagagcctggcccccgaggtgaagcagaacaccaccgccagcggctgcgagctgatgcacaccgagatgcaggccctgagagccgactggaagcagtgggaggacagcgtgttccagacccagagctgcctggagaacctggtgagccagatggccctgagcgagcaggagttcagcggccaggtggcccagctggagcaggccctggagcagttcagcgccctgctgaagacctgggcccagcagctgaccctgctggagggcaagaacaccgacgaggagatcgtggagtgctggcacaagggccaggagatcctggacgccctgcagaaggccgagcccagaaccgaggacctgaagagccagctgaacgagctgtgcagattcagcagagacctgagcacctacagcggcaaggtgagcggcctgatcaaggagtacaactgcctgtgcctgcaggccagcaagggctgccagaacaaggagcagatcctgcagcagagattcagaaaggccttcagagacttccagcagtggctggtgaacgccaagatcaccaccgccaagtgcttcgacatcccccagaacatcagcgaggtgagcaccagcctgcagaagatccaggagttcctgagcgagagcgagaacggccagcacaagctgaacatgatgctgagcaagggcgagctgctgagcaccctgctgaccaaggagaaggccaagggcatccaggccaaggtgaccgccgccaaggaggactggaagaacttccacagcaacctgcaccagaaggagagcgccctggagaacctgaagatccagatgaaggacttcgaggtgagcgccgagcccatccaggactggctgagcaagaccgagaagatggtgcacgagagcagcaacagactgtacgacctgcccgccaagagaagagagcagcagaagctgcagagcgtgctggaggagatccactgctacgagccccagctgaacagactgaaggagaaggcccagcagctgtgggagggccaggccgccagcaagagcttcagacacagagtgagccagctgagcagccagtacctggccctgagcaacctgaccaaggagaaggtgagcagactggacagaatcgtggccgagcacaaccagttcagcctgggcatcaaggagctgcaggactggatgaccgacgccatccacatgctggacagctactgccaccccaccagcgacaagagcgtgctggacagcagaaccctgaagctggaggccctgctgagcgtgaagcaggagaaggagatccagatgaagatgatcgtgaccagaggcgagagcgtgctgcagaacaccagccccgagggcatccccaccatccagcagcagctgcagagcgtgaaggacatgtgggccagcctgctgagcgccggcatcagatgcaagagccagctggagggcgccctgagcaagtggaccagctaccaggacggcgtgagacagttcagcggctggatggacagcatggaggccaacctgaacgagagcgagagacagcacgccgagctgagagacaagaccaccatgctgggcaaggccaagctgctgaacgaggaggtgctgagctacagcagcctgctggagaccatcgaggtgaagggcgccggcatgaccgagcactacgtgacccagctggagctgcaggacctgcaggagagatacagagccatccaggagagagccaaggaggccgtgaccaagagcgagaagctggtgagactgcaccaggagtaccagagagacctgaaggccttcgaggtgtggctgggccaggagcaggagaagctggaccagtacagcgtgctggagggcgacgcccacacccacgagaccaccctgagagacctgcaggagctgcaggtgcactgcgccgagggccaggccctgctgaacagcgtgctgcacaccagagaggacgtgatccccagcggcatcccccaggccgaggacagagccctggagagcctgagacaggactggcaggcctaccagcacagactgagcgagaccagaacccagttcaacaacgtggtgaacaagctgagactgatggagcagaagttccagcaggtggacgagtggctgaagaccgccgaggagaaggtgagccccagaaccagaagacagagcaacagagccaccaaggagatccagctgcaccagatgaagaagtggcacgaggaggtgaccgcctacagagacgaggtggaggaggtgggcgccagagcccaggagatcctggacgagagccacgtgaacagcagaatgggctgccaggccacccagctgaccagcagataccaggccctgctgctgcaggtgctggagcagatcaagttcctggaggaggagatccagagcctggaggagagcgagagcagcctgagcagctacagcgactggtacggcagcacccacaagaacttcaagaacgtggccaccaagatcgacaaggtggacaccgtgatgatgggcaagaagctgaagaccctggaggtgctgctgaaggacatggagaagggccacagcctgctgaagagcgccagagagaagggcgagagagccgtgaagtacctggaggagggcgaggccgagagactgagaaaggagatccacgaccacatggagcagctgaaggagctgaccagcaccgtgagaaaggagcacatgaccctggagaagggcctgcacctggccaaggagttcagcgacaagtgcaaggccctgacccagtggatcgccgagtaccaggagatcctgcacgtgcccgaggagcccaagatggagctgtacgagaagaaggcccagctgagcaagtacaagagcctgcagcagaccgtgctgagccacgagcccagcgtgaagagcgtgagagagaagggcgaggccctgctggagctggtgcaggacgtgaccctgaaggacaagatcgaccagctgcagagcgactaccaggacctgtgcagcatcggcaaggagcacgtgttcagcctggaggccaaggtgaaggaccacgaggactacaacagcgagctgcaggaggtggagaagtggctgctgcagatgagcggcagactggtggcccccgacctgctggagaccagcagcctggagaccatcacccagcagctggcccaccacaaggccatgatggaggagatcgccggcttcgaggacagactgaacaacctgcagatgaagggcgacaccctgatcggccagtgcgccgaccacctgcaggccaagctgaagcagaacgtgcacgcccacctgcagggcaccaaggacagctacagcgccatctgcagcaccgcccagagaatgtaccagagcctggagcacgagctgcagaagcacgtgagcagacaggacaccctgcagcagtgccaggcctggctgagcgccgtgcagcccgacctggagcccagcccccagccccccctgagcagagccgaggccatcaagcaggtgaagcacttcagagccctgcaggagcaggccagaacctacctggacctgctgtgcagcatgtgcgacctgagcaacgccagcgtgaagaccaccgccaaggacatccagcagaccgagcagaccatcgagcagaagctggtgcaggcccagaacctgacccagggctgggaggagatcaagcacctgaagagcgagctgtggatctacctgcaggacgccgaccagcagctgcagaacatgaagagaagacacagcgagctggagctgaacatcgcccagaacatggtgagccaggtgaaggacttcgtgaagaagctgcagagcaagcaggccagcgtgaacaccatcatcgagaaggtgaacaagctgaccaagaaggaggagagccccgagcacaaggagatcaaccacctgaacgaccagtggctggacctgtgcagacagagcaacaacctgtgcctgcagagagaggaggacctgcagagaaccagagactaccacgactgcatgaacgtggtggaggtgttcctggagaagttcaccaccgagtgggacaacctggccagaagcgacgccgagagcaccgccgtgcacctggaggccctgaagaagctggccctggccctgcaggagagaaagtacgccatcgaggacctgaaggaccagaagcagaagatgatcgagcacctgaacctggacgacaaggagctggtgaaggagcagaccagccacctggagcagagatggttccagctggaggacctgatcaagagaaagatccaggtgagcgtgaccaacctggaggagctgaacgtggtgcagagcagattccaggagctgatggagtgggccgaggagcagcagcccaacatcgccgaggccctgaagcagagccccccccccgacatggcccagaacctgctgatggaccacctggccatctgcagcgagctggaggccaagcagatgctgctgaagagcctgatcaaggacgccgacagagtgatggccgacctgggcctgaacgagagacaggtgatccagaaggccctgagcgacgcccagagccacgtgaactgcctgagcgacctggtgggccagagaagaaagtacctgaacaaggccctgagcgagaagacccagttcctgatggccgtgttccaggccaccagccagatccagcagcacgagagaaagatcatgttcagagagcacatctgcctgctgcccgacgacgtgagcaagcaggtgaagacctgcaagagcgcccaggccagcctgaagacctaccagaacgaggtgaccggcctgtgggcccagggcagagagctgatgaaggaggtgaccgagcaggagaagagcgaggtgctgggcaagctgcaggagctgcagagcgtgtacgacagcgtgctgcagaagtgcagccacagactgcaggagctggagaagaacctggtgagcagaaagcacttcaaggaggacttcgacaaggcctgccactggctgaagcaggccgacatcgtgaccttccccgagatcaacctgatgaacgagagcagcgagctgcacacccagctggccaagtaccagaacatcctggagcagagccccgagtacgagaacctgctgctgaccctgcagagaaccggccagaccatcctgcccagcctgaacgaggtggaccacagctacctgagcgagaagctgaacgccctgcccagacagttcaacgtgatcgtggccctggccaaggacaagttctacaaggtgcaggaggccatcctggccagaaaggagtacgccagcctgatcgagctgaccacccagagcctgagcgagctggaggcccagttcctgagaatgagcaaggtgcccaccgacctggccgtggaggaggccctgagcctgcaggacggctgcagagccatcctggacgaggtggccggcctgggcgaggccgtggacgagctgaaccagaagaaggagggcttcagaagcaccggccagccctggcagcccgacaagatgctgcacctggtgaccctgtaccacagactgaagagacagaccgagcagagagtgagcctgctggaggacaccaccagcgcctaccaggagcacgagaagatgtgccagcagctggagagacagctgaagagcgtgaaggaggagcagagcaaggtgaacgaggagaccctgcccgccgaggagaagctgaagatgtaccacagcctggccggcagcctgcaggacagcggcatcgtgctgaagagagtgaccatccacctggaggacctggccccccacctggaccccctggcctacgagaaggccagacaccagatccagagctggcagggcgagctgaagctgctgaccagcgccatcggcgagaccgtgaccgagtgcgagagcagaatggtgcagagcatcgacttccagaccgagatgagcagaagcctggactggctgagaagagtgaaggccgagctgagcggccccgtgtacctggacctgaacctgcaggacatccaggaggagatcagaaagatccagatccaccaggaggaggtgcagagcagcctgagaatcatgaacgccctgagccacaaggagaaggagaagttcaccaaggccaaggagctgatcagcgccgacctggagcacagcctggccgagctgagcgagctggacggcgacatccaggaggccctgagaaccagacaggccaccctgaccgagatctacagccagtgccagagatactaccaggtgttccaggccgccaacgactggctggaggacgcccaggagctgctgcagctggccggcaacggcctggacgtggagagcgccgaggagaacctgaagagccacatggagttcttcagcaccgaggaccagttccacagcaacctggaggagctgcacagcctggtggccaccctggaccccctgatcaagcccaccggcaaggaggacctggagcagaaggtggccagcctggagctgagaagccagagaatgagcagagacagcggcgcccaggtggacctgctgcagagatgcaccgcccagtggcacgactaccagaaggccagagaggaggtgatcgagctgatgaacgacaccgagaagaagctgagcgagttcagcctgctgaagaccagcagcagccacgaggccgaggagaagctgagcgagcacaaggccctggtgagcgtggtgaacagcttccacgagaagatcgtggccctggaggagaaggccagccagctggagaagaccggcaacgacgccagcaaggccaccctgagcagaagcatgaccaccgtgtggcagagatggaccagactgagagccgtggcccaggaccaggagaagatcctggaggacgccgtggacgagtggaccggcttcaacaacaaggtgaagaaggccaccgagatgatcgaccagctgcaggacaagctgcccggcagcagcgccgagaaggccagcaaggccgagctgctgaccctgctggagtaccacgacaccttcgtgctggagctggagcagcagcagagcgccctgggcatgctgagacagcagaccctgagcatgctgcaggacggcgccgcccccacccccggcgaggagccccccctgatgcaggagatcaccgccatgcaggacagatgcctgaacatgcaggagaaggtgaagaccaacggcaagctggtgaagcaggagctgaaggacagagagatggtggagacccagatcaacagcgtgaagtgctgggtgcaggagaccaaggagtacctgggcaaccccaccatcgagatcgacgcccagctggaggagctgcagatcctgctgaccgaggccaccaaccacagacagaacatcgagaagatggccgaggagcagaaggagaagtacctgggcctgtacaccatcctgcccagcgagctgagcctgcagctggccgaggtggccctggacctgaagatcagagaccagatccaggacaagatcaaggaggtggagcagagcaaggccaccagccaggagctgagcagacagatccagaagctggccaaggacctgaccaccatcctgaccaagctgaaggccaagaccgacaacgtggtgcaggccaagaccgaccagaaggtgctgggcgaggagctggacggctgcaacagcaagctgatggagctggacgccgccgtgcagaagttcctggagcagaacggccagctgggcaagcccctggccaagaagatcggcaagctgaccgagctgcaccagcagaccatcagacaggccgagaacagactgagcaagctgaaccaggccgccagccacctggaggagtacaacgagatgctggagctgatcctgaagtggatcgagaaggccaaggtgctggcccacggcaccatcgcctggaacagcgccagccagctgagagagcagtacatcctgcaccagaccctgctggaggagagcaaggagatcgacagcgagctggaggccatgaccgagaagctgcagtacctgaccagcgtgtactgcaccgagaagatgagccagcaggtggccgagctgggcagagagaccgaggagctgagacagatgatcaagatcagactgcagaacctgcaggacgccgccaaggacatgaagaagttcgaggccgagctgaagaagctgcaggccgccctggagcaggcccaggccaccctgaccagccccgaggtgggcagactgagcctgaaggagcagctgagccacagacagcacctgctgagcgagatggagagcctgaagcccaaggtgcaggccgtgcagctgtgccagagcgccctgagaatccccgaggacgtggtggccagcctgcccctgtgccacgccgccctgagactgcaggaggaggccagcagactgcagcacaccgccatccagcagtgcaacatcatgcaggaggccgtggtgcagtacgagcagtacgagcaggagatgaagcacctgcagcagctgatcgagggcgcccacagagagatcgaggacaagcccgtggccaccagcaacatccaggagctgcaggcccagatcagcagacacgaggagctggcccagaagatcaagggctaccaggagcagatcgccagcctgaacagcaagtgcaagatgctgaccatgaaggccaagcacgccaccatgctgctgaccgtgaccgaggtggagggcctggccgagggcaccgaggacctggacggcgagctgctgcccacccccagcgcccaccccagcgtggtgatgatgaccgccggcagatgccacaccctgctgagccccgtgaccgaggagagcggcgaggagggcaccaacagcgagatcagcagcccccccgcctgcagaagccccagccccgtggccaacaccgacgccagcgtgaaccaggacatcgcctactaccaggccctgagcgccgagagactgcagaccgacgccgccaagatccaccccagcaccagcgccagccaggagttctacgagcccggcctggagcccagcgccaccgccaagctgggcgacctgcagagaagctgggagaccctgaagaacgtgatcagcgagaagcagagaaccctgtacgaggccctggagagacagcagaagtaccaggacagcctgcagagcatcagcaccaagatggaggccatcgagctgaagctgagcgagagccccgagcccggcagaagccccgagagccagatggccgagcaccaggccctgatggacgagatcctgatgctgcaggacgagatcaacgagctgcagagcagcctggccgaggagctggtgagcgagagctgcgaggccgaccccgccgagcagctggccctgcagagcaccctgaccgtgctggccgagagaatgagcaccatcagaatgaaggccagcggcaagagacagctgctggaggagaagctgaacgaccagctggaggagcagagacaggagcaggccctgcagagatacagatgcgaggccgacgagctggacagctggctgctgagcaccaaggccaccctggacaccgccctgagcccccccaaggagcccatggacatggaggcccagctgatggactgccagaacatgctggtggagatcgagcagaaggtggtggccctgagcgagctgagcgtgcacaacgagaacctgctgctggagggcaaggcccacaccaaggacgaggccgagcagctggccggcaagctgagaagactgaagggcagcctgctggagctgcagagagccctgcacgacaagcagctgaacatgcagggcaccgcccaggagaaggaggagagcgacgtggacctgaccgccacccagagccccggcgtgcaggagtggctggcccaggccagaaccacctggacccagcagagacagagcagcctgcagcagcagaaggagctggagcaggagctggccgagcagaagagcctgctgagaagcgtggccagcagaggcgaggagatcctgatccagcacagcgccgccgagaccagcggcgacgccggcgagaagcccgacgtgctgagccaggagctgggcatggagggcgagaagagcagcgccgaggaccagatgagaatgaagtgggagagcctgcaccaggagttcagcaccaagcagaagctgctgcagaacgtgctggagcaggagcaggagcaggtgctgtacagcagacccaacagactgctgagcggcgtgcccctgtacaagggcgacgtgcccacccaggacaagagcgccgtgaccagcctgctggacggcctgaaccaggccttcgaggaggtgagcagccagagcggcggcgccaagagacagagcatccacctggagcagaagctgtacgacggcgtgagcgccaccagcacctggctggacgacgtggaggagagactgttcgtggccaccgccctgctgcccgaggagaccgagacctgcctgttcaaccaggagatcctggccaaggacatcaaggagatgagcgaggagatggacaagaacaagaacctgttcagccaggccttccccgagaacggcgacaacagagacgtgatcgaggacaccctgggctgcctgctgggcagactgagcctgctggacagcgtggtgaaccagagatgccaccagatgaaggagagactgcagcagatcctgaacttccagaacgacctgaaggtgctgttcaccagcctggccgacaacaagtacatcatcctgcagaagctggccaacgtgttcgagcagcccgtggccgagcagatcgaggccatccagcaggccgaggacggcctgaaggagttcgacgccggcatcatcgagctgaagagaagaggcgacaagctgcaggtggagcagcccagcatgcaggagctgagcaagctgcaggacatgtacgacgagctgatgatgatcatcggcagcagaagaagcggcctgaaccagaacctgaccctgaagagccagtacgagagagccctgcaggacctggccgacctgctggagaccggccaggagaagatggccggcgaccagaagatcatcgtgagcagcaaggaggagatccagcagctgctggacaagcacaaggagtacttccagggcctggagagccacatgatcctgaccgagaccctgttcagaaagatcatcagcttcgccgtgcagaaggagacccagttccacaccgagctgatggcccaggccagcgccgtgctgaagagagcccacaagagaggcgtggagctggagtacatcctggagacctggagccacctggacgaggaccagcaggagctgagcagacagctggaggtggtggagagcagcatccccagcgtgggcctggtggaggagaacgaggacagactgatcgacagaatcaccctgtaccagcacctgaagagcagcctgaacgagtaccagcccaagctgtaccaggtgctggacgacggcaagagactgctgatcagcatcagctgcagcgacctggagagccagctgaaccagctgggcgagtgctggctgagcaacaccaacaagatgagcaaggagctgcacagactggagaccatcctgaagcactggaccagataccagagcgagagcgccgacctgatccactggctgcagagcgccaaggacagactggagttctggacccagcagagcgtgaccgtgccccaggagctggagatggtgagagaccacctgaacgccttcctggagttcagcaaggaggtggacgcccagagcagcctgaagagcagcgtgctgagcaccggcaaccagctgctgagactgaagaaggtggacaccgccaccctgagaagcgagctgagcagaatcgacagccagtggaccgacctgctgaccaacatccccgccgtgcaggagaagctgcaccagctgcagatggacaagctgcccagcagacacgccatcagcgaggtgatgagctggatcagcctgatggagaacgtgatccagaaggacgaggacaacatcaagaacagcatcggctacaaggccatccacgagtacctgcagaagtacaagggcttcaagatcgacatcaactgcaagcagctgaccgtggacttcgtgaaccagagcgtgctgcagatcagcagccaggacgtggagagcaagagaagcgacaagaccgacttcgccgagcagctgggcgccatgaacaagagctggcagatcctgcagggcctggtgaccgagaagatccagctgctggagggcctgctggagagctggagcgagtacgagaacaacgtgcagtgcctgaagacctggttcgagacccaggagaagagactgaagcagcagcacagaatcggcgaccaggccagcgtgcagaacgccctgaaggactgccaggacctggaggacctgatcaaggccaaggagaaggaggtggagaagatcgagcagaacggcctggccctgatccagaacaagaaggaggacgtgagcagcatcgtgatgagcaccctgagagagctgggccagacctgggccaacctggaccacatggtgggccagctgaagatcctgctgaagagcgtgctggaccagtggagcagccacaaggtggccttcgacaagatcaacagctacctgatggaggccagatacagcctgagcagattcagactgctgaccggcagcctggaggccgtgcaggtgcaggtggacaacctgcagaacctgcaggacgacctggagaagcaggagagaagcctgcagaagttcggcagcatcaccaaccagctgctgaaggagtgccacccccccgtgaccgagaccctgaccaacaccctgaaggaggtgaacatgagatggaacaacctgctggaggagatcgccgagcagctgcagagcagcaaggccctgctgcagctgtggcagagatacaaggactacagcaagcagtgcgccagcaccgtgcagcagcaggaggacagaaccaacgagctgctgaaggccgccaccaacaaggacatcgccgacgacgaggtggccacctggatccaggactgcaacgacctgctgaagggcctgggcaccgtgaaggacagcctgttcttcctgcacgagctgggcgagcagctgaagcagcaggtggacgccagcgccgccagcgccatccagagcgaccagctgagcctgagccagcacctgtgcgccctggagcaggccctgtgcaagcagcagaccagcctgcaggccggcgtgctggactacgagaccttcgccaagagcctggaggccctggaggcctggatcgtggaggccgaggagatcctgcagggccaggaccccagccacagcagcgacctgagcaccatccaggagagaatggaggagctgaagggccagatgctgaagttcagcagcatggcccccgacctggacagactgaacgagctgggctacagactgcccctgaacgacaaggagatcaagagaatgcagaacctgaacagacactggagcctgatcagcagccagaccaccgagagattcagcaagctgcagagcttcctgctgcagcaccagaccttcctggagaagtgcgagacctggatggagttcctggtgcagaccgagcagaagctggccgtggagatcagcggcaactaccagcacctgctggagcagcagagagcccacgagctgttccaggccgagatgttcagcagacagcagatcctgcacagcatcatcatcgacggccagagactgctggagcagggccaggtggacgacagagacgagttcaacctgaagctgaccctgctgagcaaccagtggcagggcgtgatcagaagagcccagcagagaagaggcatcatcgacagccagatcagacagtggcagagatacagagagatggccgagaagctgagaaagtggctggtggaggtgagctacctgcccatgagcggcctgggcagcgtgcccatccccctgcagcaggccagaaccctgttcgacgaggtgcagttcaaggagaaggtgttcctgagacagcagggcagctacatcctgaccgtggaggccggcaagcagctgctgctgagcgccgacagcggcgccgaggccgccctgcaggccgagctggccgagatccaggagaagtggaagagcgccagcatgagactggaggagcagaagaagaagctggccttcctgctgaaggactgggagaagtgcgagaagggcatcgccgacagcctggagaagctgagaaccttcaagaagaagctgagccagagcctgcccgaccaccacgaggagctgcacgccgagcagatgagatgcaaggagctggagaacgccgtgggcagctggaccgacgacctgacccagctgagcctgctgaaggacaccctgagcgcctacatcagcgccgacgacatcagcatcctgaacgagagagtggagctgctgcagagacagtgggaggagctgtgccaccagctgagcctgagaagacagcagatcggcgagagactgaacgagtgggccgtgttcagcgagaagaacaaggagctgtgcgagtggctgacccagatggagagcaaggtgagccagaacggcgacatcctgatcgaggagatgatcgagaagctgaagaaggactaccaggaggagatcgccatcgcccaggagaacaagatccagctgcagcagatgggcgagagactggccaaggccagccacgagagcaaggccagcgagatcgagtacaagctgggcaaggtgaacgacagatggcagcacctgctggacctgatcgccgccagagtgaagaagctgaaggagaccctggtggccgtgcagcagctggacaagaacatgagcagcctgagaacctggctggcccacatcgagagcgagctggccaagcccatcgtgtacgacagctgcaacagcgaggagatccagagaaagctgaacgagcagcaggagctgcagagagacatcgagaagcacagcaccggcgtggccagcgtgctgaacctgtgcgaggtgctgctgcacgactgcgacgcctgcgccaccgacgccgagtgcgacagcatccagcaggccaccagaaacctggacagaagatggagaaacatctgcgccatgagcatggagagaagactgaagatcgaggagacctggagactgtggcagaagttcctggacgactacagcagattcgaggactggctgaagagcagcgagagaaccgccgccttccccagcagcagcggcgtgatctacaccgtggccaaggaggagctgaagaagttcgaggccttccagagacaggtgcacgagtgcctgacccagctggagctgatcaacaagcagtacagaagactggccagagagaacagaaccgacagcgcctgcagcctgaagcagatggtgcacgagggcaaccagagatgggacaacctgcagaagagagtgaccagcatcctgagaagactgaagcacttcatcggccagagagaggagttcgagaccgccagagacagcatcctggtgtggctgaccgagatggacctgcagctgaccaacatcgagcacttcagcgagtgcgacgtgcaggccaagatcaagcagctgaaggccttccagcaggagatcagcctgaaccacaacaagatcgagcagatcatcgcccagggcgagcagctgatcgagaagagcgagcccctggacgccgccatcatcgaggaggagctggacgagctgagaagatactgccaggaggtgttcggcagagtggagagataccacaagaagctgatcagactgcccctgcccgacgacgagcacgacctgagcgacagagagctggagctggaggacagcgccgccctgagcgacctgcactggcacgacagaagcgccgacagcctgctgagcccccagcccagcagcaacctgagcctgagcctggcccagcccctgagaagcgagagaagcggcagagacacccccgccagcgtggacagcatccccctggagtgggaccacgactacgacctgagcagagacctggagagcgccatgagcagagccctgcccagcgaggacgaggagggccaggacgacaaggacttctacctgagaggcgccgtgggcctgagcggcgaccacagcgccctggagagccagatcagacagctgggcaaggccctggacgacagcagattccagatccagcagaccgagaacatcatcagaagcaagacccccaccggccccgagctggacaccagctacaagggctacatgaagctgctgggcgagtgcagcagcagcatcgacagcgtgaagagactggagcacaagctgaaggaggaggaggagagcctgcccggcttcgtgaacctgcacagcaccgagacccagaccgccggcgtgatcgacagatgggagctgctgcaggcccaggccctgagcaaggagctgagaatgaagcagaacctgcagaagtggcagcagttcaacagcgacctgaacagcatctgggcctggctgggcgacaccgaggaggagctggagcagctgcagagactggagctgagcaccgacatccagaccatcgagctgcagatcaagaagctgaaggagctgcagaaggccgtggaccacagaaaggccatcatcctgagcatcaacctgtgcagccccgagttcacccaggccgacagcaaggagagcagagacctgcaggacagactgagccagatgaacggcagatgggacagagtgtgcagcctgctggaggagtggagaggcctgctgcaggacgccctgatgcagtgccagggcttccacgagatgagccacggcctgctgctgatgctggagaacatcgacagaagaaagaacgagatcgtgcccatcgacagcaacctggacgccgagatcctgcaggaccaccacaagcagctgatgcagatcaagcacgagctgctggagagccagctgagagtggccagcctgcaggacatgagctgccagctgctggtgaacgccgagggcaccgactgcctggaggccaaggagaaggtgcacgtgatcggcaacagactgaagctgctgctgaaggaggtgagcagacacatcaaggagctggagaagctgctggacgtgagcagcagccagcaggacctgagcagctggagcagcgccgacgagctggacaccagcggcagcgtgagccccaccagcggcagaagcacccccaacagacagaagacccccagaggcaagtgcagcctgagccagcccggccccagcgtgagcagcccccacagcagaagcaccaagggcggcagcgacagcagcctgagcgagcccggccccggcagaagcggcagaggcttcctgttcagagtgctgagagccgccctgcccctgcagctgctgctgctgctgctgatcggcctggcctgcctggtgcccatgagcgaggaggactacagctgcgccctgagcaacaacttcgccagaagcttccaccccatgctgagatacaccaacggccccccccccctgtag

SEQ ID NO: 100477 - DNA, 26250 bp, synthetic construct
  misc_feature 1..26250: note = Description of Artificial Sequence: Synthetic coding sequence
  source 1..26250: mol_type = other DNA
atggccaccagcagaggcgccagcagatgccccagagacatcgccaacgtgatgcagagactgcaggacgagcaggagatcgtgcagaagagaaccttcaccaagtggatcaacagccacctggccaagagaaagccccccatggtggtggacgacctgttcgaggacatgaaggacggcgtgaagctgctggccctgctggaggtgctgagcggccagaagctgccctgcgagcagggcagaagaatgaagagaatccacgccgtggccaacatcggcaccgccctgaagttcctggagggcagaaagagcatgcacagaggcagccccatcaagctggtgaacatcaacagcaccgacatcgccgacggcagacccagcatcgtgctgggcctgatgtggaccatcatcctgtacttccagatcgaggagctgaccagcaacctgccccagctgcagagcctgagcagcagcgccagcagcgtggacagcatcgtgagcagcgagacccccagcccccccagcaagagaaaggtgaccaccaagatccagggcaacgccaagaaggccctgctgaagtgggtgcagtacaccgccggcaagcagaccggcatcgaggtgaaggacttcggcaagagctggagaagcggcgtggccttccacagcgtgatccacgccatcagacccgagctggtggacctggagaccgtgaagggcagaagcaacagagagaacctggaggacgccttcaccatcgccgagaccgagctgggcatccccagactgctggaccccgaggacgtggacgtggacaagcccgacgagaagagcatcatgacctacgtggcccagttcctgaagcactaccccgacatccacaacgccagcaccgacggccaggaggacgacgagatcctgcccggcttccccagcttcgccaacagcgtgcagaacttcaagagagaggacagagtgatcttcaaggagatgaaggtgtggatcgagcagttcgagagagacctgaccagagcccagatggtggagagcaacctgcaggacaagtaccagagcttcaagcacttcagagtgcagtacgagatgaagagaaagcagatcgagcacctgatccagcccctgcacagagacggcaagctgagcctggaccaggccctggtgaagcagagctgggacagagtgaccagcagactgttcgactggcacatccagctggacaagagcctgcccgcccccctgggcaccatcggcgcctggctgtacagagccgaggtggccctgagagaggagatcaccgtgcagcaggtgcacgaggagaccgccaacaccatccagagaaagctggagcagcacaaggacctgctgcagaacaccgacgcccacaagagagccttccacgagatctacagaaccagaagcgtgaacggcatccccgtgccccccgaccagctggaggacatggccgagagattccacttcgtgagcagcaccagcgagctgcacctgatgaagatggagttcctggagctgaagtacagactgctgagcctgctggtgctggccgagagcaagctgaagagctggatcatcaagtacggcagaagagagagcgtggagcagctgctgcagaactacgtgagcttcatcgagaacagcaagttcttcgagcagtacgaggtgacctaccagatcctgaagcagaccgccgagatgtacgtgaaggccgacggcagcgtggaggaggccgagaacgtgatgaagttcatgaacgagaccaccgcccagtggagaaacctgagcgtggaggtgagaagcgtgagaagcatgctggaggaggtgatcagcaactgggacagatacggcaacaccgtggccagcctgcaggcctggctggaggacgccgagaagatgctgaaccagagcgagaacgccaagaaggacttcttcagaaacctgccccactggatccagcagcacaccgccatgaacgacgccggcaacttcctgatcgagacctgcgacgagatggtgagcagagacctgaagcagcagctgctgctgctgaacggcagatggagagagctgttcatggaggtgaagcagtacgcccaggccgacgagatggacagaatgaagaaggagtacaccgactgcgtggtgaccctgagcgccttcgccaccgaggcccacaagaagctgagcgagcccctggaggtgagcttcatgaacgtgaagctgctgatccaggacctggaggacatcgagcagagagtgcccgtgatggacgcccagtacaagatcatcaccaagaccgcccacctgatcaccaaggagagcccccaggaggagggcaaggagatgttcgccaccatgagcaagctgaaggagcagctgaccaaggtgaaggagtgctacagccccctgctgtacgagagccagcagctgctgatccccctggaggagctggagaagcagatgaccagcttctacgacagcctgggcaagatcaacgagatcatcaccgtgctggagagagaggcccagagcagcgccctgttcaagcagaagcaccaggagctgctggcctgccaggagaactgcaagaagaccctgaccctgatcgagaagggcagccagagcgtgcagaagttcgtgaccctgagcaacgtgctgaagcacttcgaccagaccagactgcagagacagatcgccgacatccacgtggccttccagagcatggtgaagaagaccggcgactggaagaagcacgtggagaccaacagcagactgatgaagaagttcgaggagagcagagccgagctggagaaggtgctgagaatcgcccaggagggcctggaggagaagggcgaccccgaggagctgctgagaagacacaccgagttcttcagccagctggaccagagagtgctgaacgccttcctgaaggcctgcgacgagctgaccgacatcctgcccgagcaggagcagcagggcctgcaggaggccgtgagaaagctgcacaagcagtggaaggacctgcagggcgaggccccctaccacctgctgcacctgaagatcgacgtggagaagaacagattcctggccagcgtggaggagtgcagaaccgagctggacagagagaccaagctgatgccccaggagggcagcgagaagatcatcaaggagcacagagtgttcttcagcgacaagggcccccaccacctgtgcgagaagagactgcagctgatcgaggagctgtgcgtgaagctgcccgtgagagaccccgtgagagacacccccggcacctgccacgtgaccctgaaggagctgagagccgccatcgacagcacctacagaaagctgatggaggaccccgacaagtggaaggactacaccagcagattcagcgagttcagcagctggatcagcaccaacgagacccagctgaagggcatcaagggcgaggccatcgacaccgccaaccacggcgaggtgaagagagccgtggaggagatcagaaacggcgtgaccaagagaggcgagaccctgagctggctgaagagcagactgaaggtgctgaccgaggtgagcagcgagaacgaggcccagaagcagggcgacgagctggccaagctgagcagcagcttcaaggccctggtgaccctgctgagcgaggtggagaagatgctgagcaacttcggcgactgcgtgcagtacaaggagatcgtgaagaacagcctggaggagctgatcagcggcagcaaggaggtgcaggagcaggccgagaagatcctggacaccgagaacctgttcgaggcccagcagctgctgctgcaccaccagcagaagaccaagagaatcagcgccaagaagagagacgtgcagcagcagatcgcccaggcccagcagggcgagggcggcctgcccgacagaggccacgaggagctgagaaagctggagagcaccctggacggcctggagagaagcagagagagacaggagagaagaatccaggtgaccctgagaaagtgggagagattcgagaccaacaaggagaccgtggtgagatacctgttccagaccggcagcagccacgagagattcctgagcttcagcagcctggagagcctgagcagcgagctggagcagaccaaggagttcagcaagagaaccgagagcatcgccgtgcaggccgagaacctggtgaaggaggccagcgagatccccctgggcccccagaacaagcagctgctgcagcagcaggccaagagcatcaaggagcaggtgaagaagctggaggacaccctggaggaggacatcaagaccatggagatggtgaagaccaagtgggaccacttcggcagcaacttcgagaccctgagcgtgtggatcaccgagaaggagaaggagctgaacgccctggagaccagcagcagcgccatggacatgcagatcagccagatcaaggtgaccatccaggagatcgagagcaagctgagcagcatcgtgggcctggaggaggaggcccagagcttcgcccagttcgtgaccaccggcgagagcgccagaatcaaggccaagctgacccagatcagaagatacggcgaggagctgagagagcacgcccagtgcctggagggcaccatcctgggccacctgagccagcagcagaagttcgaggagaacctgagaaagatccagcagagcgtgagcgagttcgaggacaagctggccgtgcccatcaagatctgcagcagcgccaccgagacctacaaggtgctgcaggagcacatggacctgtgccaggccctggagagcctgagcagcgccatcaccgccttcagcgccagcgccagaaaggtggtgaacagagacagctgcgtgcaggaggccgccgccctgcagcagcagtacgaggacatcctgagaagagccaaggagagacagaccgccctggagaacctgctggcccactggcagagactggagaaggagctgagcagcttcctgacctggctggagagaggcgaggccaaggccagcagccccgagatggacatcagcgccgacagagtgaaggtggagggcgagctgcagctgatccaggccctgcagaacgaggtggtgagccaggccagcttctacagcaagctgctgcagctgaaggagagcctgttcagcgtggccagcaaggacgacgtgaagatgatgaagctgcacctggagcagctggacgagagatggagagacctgccccagatcatcaacaagagaatcaacttcctgcagagcgtggtggccgagcaccagcagttcgacgagctgctgctgagcttcagcgtgtggatcaagctgttcctgagcgagctgcagaccaccagcgagatcagcatcatggaccaccaggtggccctgaccagacacaaggaccacgccgccgaggtggagagcaagaagggcgagctgcagagcctgcagggccacctggccaagctgggcagcctgggcagagccgaggacctgcacctgctgcagggcaaggccgaggactgcttccagctgttcgaggaggccagccaggtggtggagagaagacagctggccctgagccacctggccgagttcctgcagagccacgccagcctgagcggcatcctgagacagctgagacagaccgtggaggccaccaacagcatgaacaagaacgagagcgacctgatcgagaaggacctgaacgacgccctgcagaacgccaaggccctggagagcgccgccgtgagcctggacggcatcctgagcaaggcccagtaccacctgaagatcggcagcagcgagcagagaaccagctgcagagccaccgccgaccagctgtgcggcgaggtggagagaatccagaacctgctgggcaccaagcagagcgaggccgacgccctggccgtgctgaagaaggccttccaggaccagaaggaggagctgctgaagagcatcgaggacatcgaggagagaaccgacaaggagagactgaaggagcccaccagacaggccctgcagcagagactgagagtgttcaaccagctggaggacgagctgaacagccacgagcacgagctgtgctggctgaaggacaaggccaagcagatcgcccagaaggacgtggccttcgcccccgaggtggacagagagatcaacagactggaggtgacctgggacgacaccaagagactgatccacgagaaccagggccagtgctgcggcctgatcgacctgatgagagagtaccagaacctgaagagcgccgtgagcaaggtgctggagaacgccagcagcgtgatcgtgaccagaaccaccatcaaggaccaggaggacctgaagtgggccttcagcaagcacgagaccgccaagaacaagatgaactacaagcagaaggacctggacaacttcaccagcaagggcaagcacctgctgagcgagctgaagaagatccacagcagcgacttcagcctggtgaagaccgacatggagagcaccgtggacaagtggctggacgtgagcgagaagctggaggagaacatggacagactgagagtgagcctgagcatctgggacgacgtgctgagcaccagagacgagatcgagggctggagcaacaactgcgtgccccagatggccgagaacatcagcaacctggacaaccacctgagagccgaggagctgctgaaggagttcgagagcgaggtgaagaacaaggccctgagactggaggagctgcacagcaaggtgaacgacctgaaggagctgaccaagaacctggagaccccccccgacctgcagttcatcgaggccgacctgatgcagaagctggagcacgccaaggagatcaccgaggtggccaagggcaccctgaaggacttcaccgcccagagcacccaggtggagaagttcatcaacgacatcaccacctggttcaccaaggtggaggagagcctgatgaactgcgcccagaacgagacctgcgaggccctgaagaaggtgaaggacatccagaaggagctgcagagccagcagagcaacatcagcagcacccaggagaacctgaacagcctgtgcagaaagtaccacagcgccgagctggagagcctgggcagagccatgaccggcctgatcaagaagcacgaggccgtgagccagctgtgcagcaagacccaggccagcctgcaggagagcctggagaagcacttcagcgagagcatgcaggagttccaggagtggttcctgggcgccaaggccgccgccaaggagagcagcgacagaaccggcgacagcaaggtgctggaggccaagctgcacgacctgcagaacatcctggacagcgtgagcgacggccagagcaagctggacgccgtgacccaggagggccagaccctgtacgcccacctgagcaagcagatcgtgagcagcatccaggagcagatcaccaaggccaacgaggagttccaggccttcctgaagcagtgcctgaaggacaagcaggccctgcaggactgcgccagcgagctgggcagcttcgaggaccagcacagaaagctgaacctgtggatccacgagatggaggagagattcaacaccgagaacctgggcgagagcaagcagcacatccccgagaagaagaacgaggtgcacaaggtggagatgttcctgggcgagctgctggccgccagagagagcctggacaagctgagccagagaggccagctgctgagcgaggagggccacggcgccggccaggagggcagactgtgcagccagctgctgaccagccaccagaacctgctgagaatgaccaaggagaagctgagaagctgccaggtggccctgcaggagcacgaggccctggaggaggccctgcagagcatgtggttctgggtgaaggccatccaggacagactggcctgcgccgagagcaccctgggcagcaaggacaccctggagaagagactgagccagatccaggacatcctgctgatgaagggcgagggcgaggtgaagctgaacatggccatcggcaagggcgagcaggccctgagaagcagcaacaaggagggccagagagtgatccagacccagctggagaccctgaaggaggtgtgggccgacatcatgagcagcagcgtgcacgcccagagcaccctggagagcgtgatcagccagtggaacgactacgtggagagaaagaaccagctggagcagtggatggagagcgtggaccagaagatcgagcaccccctgcagccccagcccggcctgaaggagaagttcgtgctgctggaccacctgcagagcatcctgagcgaggccgaggaccacaccagagccctgcacagactgatcgccaagagcagagagctgtacgagaagaccgaggacgagagcttcaaggacaccgcccaggaggagctgaagacccagttcaacgacatcatgaccgtggccaaggagaagatgagaaaggtggaggagatcgtgaaggaccacctgatgtacctggacgccgtgcacgagttcaccgactggctgcacagcgccaaggaggagctgcacagatggagcgacatgagcggcgacagcagcgccacccagaagaagctgagcaagatcaaggagctgatcgacagcagagagatcggcgccagcagactgagcagagtggagagcctggcccccgaggtgaagcagaacaccaccgccagcggctgcgagctgatgcacaccgagatgcaggccctgagagccgactggaagcagtgggaggacagcgtgttccagacccagagctgcctggagaacctggtgagccagatggccctgagcgagcaggagttcagcggccaggtggcccagctggagcaggccctggagcagttcagcgccctgctgaagacctgggcccagcagctgaccctgctggagggcaagaacaccgacgaggagatcgtggagtgctggcacaagggccaggagatcctggacgccctgcagaaggccgagcccagaaccgaggacctgaagagccagctgaacgagctgtgcagattcagcagagacctgagcacctacagcggcaaggtgagcggcctgatcaaggagtacaactgcctgtgcctgcaggccagcaagggctgccagaacaaggagcagatcctgcagcagagattcagaaaggccttcagagacttccagcagtggctggtgaacgccaagatcaccaccgccaagtgcttcgacatcccccagaacatcagcgaggtgagcaccagcctgcagaagatccaggagttcctgagcgagagcgagaacggccagcacaagctgaacatgatgctgagcaagggcgagctgctgagcaccctgctgaccaaggagaaggccaagggcatccaggccaaggtgaccgccgccaaggaggactggaagaacttccacagcaacctgcaccagaaggagagcgccctggagaacctgaagatccagatgaaggacttcgaggtgagcgccgagcccatccaggactggctgagcaagaccgagaagatggtgcacgagagcagcaacagactgtacgacctgcccgccaagagaagagagcagcagaagctgcagagcgtgctggaggagatccactgctacgagccccagctgaacagactgaaggagaaggcccagcagctgtgggagggccaggccgccagcaagagcttcagacacagagtgagccagctgagcagccagtacctggccctgagcaacctgaccaaggagaaggtgagcagactggacagaatcgtggccgagcacaaccagttcagcctgggcatcaaggagctgcaggactggatgaccgacgccatccacatgctggacagctactgccaccccaccagcgacaagagcgtgctggacagcagaaccctgaagctggaggccctgctgagcgtgaagcaggagaaggagatccagatgaagatgatcgtgaccagaggcgagagcgtgctgcagaacaccagccccgagggcatccccaccatccagcagcagctgcagagcgtgaaggacatgtgggccagcctgctgagcgccggcatcagatgcaagagccagctggagggcgccctgagcaagtggaccagctaccaggacggcgtgagacagttcagcggctggatggacagcatggaggccaacctgaacgagagcgagagacagcacgccgagctgagagacaagaccaccatgctgggcaaggccaagctgctgaacgaggaggtgctgagctacagcagcctgctggagaccatcgaggtgaagggcgccggcatgaccgagcactacgtgacccagctggagctgcaggacctgcaggagagatacagagccatccaggagagagccaaggaggccgtgaccaagagcgagaagctggtgagactgcaccaggagtaccagagagacctgaaggccttcgaggtgtggctgggccaggagcaggagaagctggaccagtacagcgtgctggagggcgacgcccacacccacgagaccaccctgagagacctgcaggagctgcaggtgcactgcgccgagggccaggccctgctgaacagcgtgctgcacaccagagaggacgtgatccccagcggcatcccccaggccgaggacagagccctggagagcctgagacaggactggcaggcctaccagcacagactgagcgagaccagaacccagttcaacaacgtggtgaacaagctgagactgatggagcagaagttccagcaggtggacgagtggctgaagaccgccgaggagaagaagtggcacgaggaggtgaccgcctacagagacgaggtggaggaggtgggcgccagagcccaggagatcctggacgagagccacgtgaacagcagaatgggctgccaggccacccagctgaccagcagataccaggccctgctgctgcaggtgctggagcagatcaagttcctggaggaggagatccagagcctggaggagagcgagagcagcctgagcagctacagcgactggtacggcagcacccacaagaacttcaagaacgtggccaccaagatcgacaaggtggacaccgtgatgatgggcaagaagctgaagaccctggaggtgctgctgaaggacatggagaagggccacagcctgctgaagagcgccagagagaagggcgagagagccgtgaagtacctggaggagggcgaggccgagagactgagaaaggagatccacgaccacatggagcagctgaaggagctgaccagcaccgtgagaaaggagcacatgaccctggagaagggcctgcacctggccaaggagttcagcgacaagtgcaaggccctgacccagtggatcgccgagtaccaggagatcctgcacgtgcccgaggagcccaagatggagctgtacgagaagaaggcccagctgagcaagtacaagagcctgcagcagaccgtgctgagccacgagcccagcgtgaagagcgtgagagagaagggcgaggccctgctggagctggtgcaggacgtgaccctgaaggacaagatcgaccagctgcagagcgactaccaggacctgtgcagcatcggcaaggccatgatggaggagatcgccggcttcgaggacagactgaacaacctgcagatgaagggcgacaccctgatcggccagtgcgccgaccacctgcaggccaagctgaagcagaacgtgcacgcccacctgcagggcaccaaggacagctacagcgccatctgcagcaccgcccagagaatgtaccagagcctggagcacgagctgcagaagcacgtgagcagacaggacaccctgcagcagtgccaggcctggctgagcgccgtgcagcccgacctggagcccagcccccagccccccctgagcagagccgaggccatcaagcaggtgaagcacttcagagccctgcaggagcaggccagaacctacctggacctgctgtgcagcatgtgcgacctgagcaacgccagcgtgaagaccaccgccaaggacatccagcagaccgagcagaccatcgagcagaagctggtgcaggcccagaacctgacccagggctgggaggagatcaagcacctgaagagcgagctgtggatctacctgcaggacgccgaccagcagctgcagaacatgaagagaagacacagcgagctggagctgaacatcgcccagaacatggtgagccaggtgaaggacttcgtgaagaagctgcagagcaagcaggccagcgtgaacaccatcatcgagaaggtgaacaagctgaccaagaaggaggagagccccgagcacaaggagatcaaccacctgaacgaccagtggctggacctgtgcagacagagcaacaacctgtgcctgcagagagaggaggacctgcagagaaccagagactaccacgactgcatgaacgtggtggaggtgttcctggagaagttcaccaccgagtgggacaacctggccagaagcgacgccgagagcaccgccgtgcacctggaggccctgaagaagctggccctggccctgcaggagagaaagtacgccatcgaggacctgaaggaccagaagcagaagatgatcgagcacctgaacctggacgacaaggagctggtgaaggagcagaccagccacctggagcagagatggttccagctggaggacctgatcaagagaaagatccaggtgagcgtgaccaacctggaggagctgaacgtggtgcagagcagattccaggagctgatggagtgggccgaggagcagcagcccaacatcgccgaggccctgaagcagagccccccccccgacatggcccagaacctgctgatggaccacctggccatctgcagcgagctggaggccaagcagatgctgctgaagagcctgatcaaggacgccgacagagtgatggccgacctgggcctgaacgagagacaggtgatccagaaggccctgagcgacgcccagagccacgtgaactgcctgagcgacctggtgggccagagaagaaagtacctgaacaaggccctgagcgagaagacccagttcctgatggccgtgttccaggccaccagccagatccagcagcacgagagaaagatcatgttcagagagcacatctgcctgctgcccgacgacgtgagcaagcaggtgaagacctgcaagagcgcccaggccagcctgaagacctaccagaacgaggtgaccggcctgtgggcccagggcagagagctgatgaaggaggtgaccgagcaggagaagagcgaggtgctgggcaagctgcaggagctgcagagcgtgtacgacagcgtgctgcagaagtgcagccacagactgcaggagctggagaagaacctggtgagcagaaagcacttcaaggaggacttcgacaaggcctgccactggctgaagcaggccgacatcgtgaccttccccgagatcaacctgatgaacgagagcagcgagctgcacacccagctggccaagtaccagaacatcctggagcagagccccgagtacgagaacctgctgctgaccctgcagagaaccggccagaccatcctgcccagcctgaacgaggtggaccacagctacctgagcgagaagctgaacgccctgcccagacagttcaacgtgatcgtggccctggccaaggacaagttctacaaggtgcaggaggccatcctggccagaaaggagtacgccagcctgatcgagctgaccacccagagcctgagcgagctggaggcccagttcctgagaatgagcaaggtgcccaccgacctggccgtggaggaggccctgagcctgcaggacggctgcagagccatcctggacgaggtggccggcctgggcgaggccgtggacgagctgaaccagaagaaggagggcttcagaagcaccggccagccctggcagcccgacaagatgctgcacctggtgaccctgtaccacagactgaagagacagaccgagcagagagtgagcctgctggaggacaccaccagcgcctaccaggagcacgagaagatgtgccagcagctggagagacagctgaagagcgtgaaggaggagcagagcaaggtgaacgaggagaccctgcccgccgaggagaagctgaagatgtaccacagcctggccggcagcctgcaggacagcggcatcgtgctgaagagagtgaccatccacctggaggacctggccccccacctggaccccctggcctacgagaaggccagacaccagatccagagctggcagggcgagctgaagctgctgaccagcgccatcggcgagaccgtgaccgagtgcgagagcagaatggtgcagagcatcgacttccagaccgagatgagcagaagcctggactggctgagaagagtgaaggccgagctgagcggccccgtgtacctggacctgaacctgcaggacatccaggaggagatcagaaagatccagatccaccaggaggaggtgcagagcagcctgagaatcatgaacgccctgagccacaaggagaaggagaagttcaccaaggccaaggagctgatcagcgccgacctggagcacagcctggccgagctgagcgagctggacggcgacatccaggaggccctgagaaccagacaggccaccctgaccgagatctacagccagtgccagagatactaccaggtgttccaggccgccaacgactggctggaggacgcccaggagctgctgcagctggccggcaacggcctggacgtggagagcgccgaggagaacctgaagagccacatggagttcttcagcaccgaggaccagttccacagcaacctggaggagctgcacagcctggtggccaccctggaccccctgatcaagcccaccggcaaggaggacctggagcagaaggtggccagcctggagctgagaagccagagaatgagcagagacagcggcgcccaggtggacctgctgcagagatgcaccgcccagtggcacgactaccagaaggccagagaggaggtgatcgagctgatgaacgacaccgagaagaagctgagcgagttcagcctgctgaagaccagcagcagccacgaggccgaggagaagctgagcgagcacaaggccctggtgagcgtggtgaacagcttccacgagaagatcgtggccctggaggagaaggccagccagctggagaagaccggcaacgacgccagcaaggccaccctgagcagaagcatgaccaccgtgtggcagagatggaccagactgagagccgtggcccaggaccaggagaagatcctggaggacgccgtggacgagtggaccggcttcaacaacaaggtgaagaaggccaccgagatgatcgaccagctgcaggacaagctgcccggcagcagcgccgagaaggccagcaaggccgagctgctgaccctgctggagtaccacgacaccttcgtgctggagctggagcagcagcagagcgccctgggcatgctgagacagcagaccctgagcatgctgcaggacggcgccgcccccacccccggcgaggagccccccctgatgcaggagatcaccgccatgcaggacagatgcctgaacatgcaggagaaggtgaagaccaacggcaagctggtgaagcaggagctgaaggacagagagatggtggagacccagatcaacagcgtgaagtgctgggtgcaggagaccaaggagtacctgggcaaccccaccatcgagatcgacgcccagctggaggagctgcagatcctgctgaccgaggccaccaaccacagacagaacatcgagaagatggccgaggagcagaaggagaagtacctgggcctgtacaccatcctgcccagcgagctgagcctgcagctggccgaggtggccctggacctgaagatcagagaccagatccaggacaagatcaaggaggtggagcagagcaaggccaccagccaggagctgagcagacagatccagaagctggccaaggacctgaccaccatcctgaccaagctgaaggccaagaccgacaacgtggtgcaggccaagaccgaccagaaggtgctgggcgaggagctggacggctgcaacagcaagctgatggagctggacgccgccgtgcagaagttcctggagcagaacggccagctgggcaagcccctggccaagaagatcggcaagctgaccgagctgcaccagcagaccatcagacaggccgagaacagactgagcaagctgaaccaggccgccagccacctggaggagtacaacgagatgctggagctgatcctgaagtggatcgagaaggccaaggtgctggcccacggcaccatcgcctggaacagcgccagccagctgagagagcagtacatcctgcaccagaccctgctggaggagagcaaggagatcgacagcgagctggaggccatgaccgagaagctgcagtacctgaccagcgtgtactgcaccgagaagatgagccagcaggtggccgagctgggcagagagaccgaggagctgagacagatgatcaagatcagactgcagaacctgcaggacgccgccaaggacatgaagaagttcgaggccgagctgaagaagctgcaggccgccctggagcaggcccaggccaccctgaccagccccgaggtgggcagactgagcctgaaggagcagctgagccacagacagcacctgctgagcgagatggagagcctgaagcccaaggtgcaggccgtgcagctgtgccagagcgccctgagaatccccgaggacgtggtggccagcctgcccctgtgccacgccgccctgagactgcaggaggaggccagcagactgcagcacaccgccatccagcagtgcaacatcatgcaggccgccgtggtgcagtacgagcagtacgagcaggagatgaagcacctgcagcagctgatcgagggcgcccacagagagatcgaggacaagcccgtggccaccagcaacatccaggagctgcaggcccagatcagcagacacgaggagctggcccagaagatcaagggctaccaggagcagatcgccagcctgaacagcaagtgcaagatgctgaccatgaaggccaagcacgccaccatgctgctgaccgtgaccgaggtggagggcctggccgagggcaccgaggacctggacggcgagctgctgcccacccccagcgcccaccccagcgtggtgatgatgaccgccggcagatgccacaccctgctgagccccgtgaccgaggagagcggcgaggagggcaccaacagcgagatcagcagcccccccgcctgcagaagccccagccccgtggccaacaccgacgccagcgtgaaccaggacatcgcctactaccaggccctgagcgccgagagactgcagaccgacgccgccaagatccaccccagcaccagcgccagccaggagttctacgagcccggcctggagcccagcgccaccgccaagctgggcgacctgcagagaagctgggagaccctgaagaacgtgatcagcgagaagcagagaaccctgtacgaggccctggagagacagcagaagtaccaggacagcctgcagagcatcagcaccaagatggaggccatcgagctgaagctgagcgagagccccgagcccggcagaagccccgagagccagatggccgagcaccaggccctgatggacgagatcctgatgctgcaggacgagatcaacgagctgcagagcagcctggccgaggagctggtgagcgagagctgcgaggccgaccccgccgagcagctggccctgcagagcaccctgaccgtgctggccgagagaatgagcaccatcagaatgaaggccagcggcaagagacagctgctggaggagaagctgaacgaccagctggaggagcagagacaggagcaggccctgcagagatacagatgcgaggccgacgagctggacagctggctgctgagcaccaaggccaccctggacaccgccctgagcccccccaaggagcccatggacatggaggcccagctgatggactgccagaacatgctggtggagatcgagcagaaggtggtggccctgagcgagctgagcgtgcacaacgagaacctgctgctggagggcaaggcccacaccaaggacgaggccgagcagctggccggcaagctgagaagactgaagggcagcctgctggagctgcagagagccctgcacgacaagcagctgaacatgcagggcaccgcccaggagaaggaggagagcgacgtggacctgaccgccacccagagccccggcgtgcaggagtggctggcccaggccagaaccacctggacccagcagagacagagcagcctgcagcagcagaaggagctggagcaggagctggccgagcagaagagcctgctgagaagcgtggccagcagaggcgaggagatcctgatccagcacagcgccgccgagaccagcggcgacgccggcgagaagcccgacgtgctgagccaggagctgggcatggagggcgagaagagcagcgccgaggaccagatgagaatgaagtgggagagcctgcaccaggagttcagcaccaagcagaagctgctgcagaacgtgctggagcaggagcaggagcaggtgctgtacagcagacccaacagactgctgagcggcgtgcccctgtacaagggcgacgtgcccacccaggacaagagcgccgtgaccagcctgctggacggcctgaaccaggccttcgaggaggtgagcagccagagcggcggcgccaagagacagagcatccacctggagcagaagctgtacgacggcgtgagcgccaccagcacctggctggacgacgtggaggagagactgttcgtggccaccgccctgctgcccgaggagaccgagacctgcctgttcaaccaggagatcctggccaaggacatcaaggagatgagcgaggagatggacaagaacaagaacctgttcagccaggccttccccgagaacggcgacaacagagacgtgatcgaggacaccctgggctgcctgctgggcagactgagcctgctggacagcgtggtgaaccagagatgccaccagatgaaggagagactgcagcagatcctgaacttccagaacgacctgaaggtgctgttcaccagcctggccgacaacaagtacatcatcctgcagaagctggccaacgtgttcgagcagcccgtggccgagcagatcgaggccatccagcaggccgaggacggcctgaaggagttcgacgccggcatcatcgagctgaagagaagaggcgacaagctgcaggtggagcagcccagcatgcaggagctgagcaagctgcaggacatgtacgacgagctgatgatgatcatcggcagcagaagaagcggcctgaaccagaacctgaccctgaagagccagtacgagagagccctgcaggacctggccgacctgctggagaccggccaggagaagatggccggcgaccagaagatcatcgtgagcagcaaggaggagatccagcagctgctggacaagcacaaggagtacttccagggcctggagagccacatgatcctgaccgagaccctgttcagaaagatcatcagcttcgccgtgcagaaggagacccagttccacaccgagctgatggcccaggccagcgccgtgctgaagagagcccacaagagaggcgtggagctggagtacatcctggagacctggagccacctggacgaggaccagcaggagctgagcagacagctggaggtggtggagagcagcatccccagcgtgggcctggtggaggagaacgaggacagactgatcgacagaatcaccctgtaccagcacctgaagagcagcctgaacgagtaccagcccaagctgtaccaggtgctggacgacggcaagagactgctgatcagcatcagctgcagcgacctggagagccagctgaaccagctgggcgagtgctggctgagcaacaccaacaagatgagcaaggagctgcacagactggagaccatcctgaagcactggaccagataccagagcgagagcgccgacctgatccactggctgcagagcgccaaggacagactggagttctggacccagcagagcgtgaccgtgccccaggagctggagatggtgagagaccacctgaacgccttcctggagttcagcaaggaggtggacgcccagagcagcctgaagagcagcgtgctgagcaccggcaaccagctgctgagactgaagaaggtggacaccgccaccctgagaagcgagctgagcagaatcgacagccagtggaccgacctgctgaccaacatccccgccgtgcaggagaagctgcaccagctgcagatggacaagctgcccagcagacacgccatcagcgaggtgatgagctggatcagcctgatggagaacgtgatccagaaggacgaggacaacatcaagaacagcatcggctacaaggccatccacgagtacctgcagaagtacaagggcttcaagatcgacatcaactgcaagcagctgaccgtggacttcgtgaaccagagcgtgctgcagatcagcagccaggacgtggagagcaagagaagcgacaagaccgacttcgccgagcagctgggcgccatgaacaagagctggcagatcctgcagggcctggtgaccgagaagatccagctgctggagggcctgctggagagctggagcgagtacgagaacaacgtgcagtgcctgaagacctggttcgagacccaggagaagagactgaagcagcagcacagaatcggcgaccaggccagcgtgcagaacgccctgaaggactgccaggacctggaggacctgatcaaggccaaggagaaggaggtggagaagatcgagcagaacggcctggccctgatccagaacaagaaggaggacgtgagcagcatcgtgatgagcaccctgagagagctgggccagacctgggccaacctggaccacatggtgggccagctgaagatcctgctgaagagcgtgctggaccagtggagcagccacaaggtggccttcgacaagatcaacagctacctgatggaggccagatacagcctgagcagattcagactgctgaccggcagcctggaggccgtgcaggtgcaggtggacaacctgcagaacctgcaggacgacctggagaagcaggagagaagcctgcagaagttcggcagcatcaccaaccagctgctgaaggagtgccacccccccgtgaccgagaccctgaccaacaccctgaaggaggtgaacatgagatggaacaacctgctggaggagatcgccgagcagctgcagagcagcaaggccctgctgcagctgtggcagagatacaaggactacagcaagcagtgcgccagcaccgtgcagcagcaggaggacagaaccaacgagctgctgaaggccgccaccaacaaggacatcgccgacgacgaggtggccacctggatccaggactgcaacgacctgctgaagggcctgggcaccgtgaaggacagcctgttcttcctgcacgagctgggcgagcagctgaagcagcaggtggacgccagcgccgccagcgccatccagagcgaccagctgagcctgagccagcacctgtgcgccctggagcaggccctgtgcaagcagcagaccagcctgcaggccggcgtgctggactacgagaccttcgccaagagcctggaggccctggaggcctggatcgtggaggccgaggagatcctgcagggccaggaccccagccacagcagcgacctgagcaccatccaggagagaatggaggagctgaagggccagatgctgaagttcagcagcatggcccccgacctggacagactgaacgagctgggctacagactgcccctgaacgacaaggagatcaagagaatgcagaacctgaacagacactggagcctgatcagcagccagaccaccgagagattcagcaagctgcagagcttcctgctgcagcaccagaccttcctggagaagtgcgagacctggatggagttcctggtgcagaccgagcagaagctggccgtggagatcagcggcaactaccagcacctgctggagcagcagagagcccacgagctgttccaggccgagatgttcagcagacagcagatcctgcacagcatcatcatcgacggccagagactgctggagcagggccaggtggacgacagagacgagttcaacctgaagctgaccctgctgagcaaccagtggcagggcgtgatcagaagagcccagcagagaagaggcatcatcgacagccagatcagacagtggcagagatacagagagatggccgagaagctgagaaagtggctggtggaggtgagctacctgcccatgagcggcctgggcagcgtgcccatccccctgcagcaggccagaaccctgttcgacgaggtgcagttcaaggagaaggtgttcctgagacagcagggcagctacatcctgaccgtggaggccggcaagcagctgctgctgagcgccgacagcggcgccgaggccgccctgcaggccgagctggccgagatccaggagaagtggaagagcgccagcatgagactggaggagcagaagaagaagctggccttcctgctgaaggactgggagaagtgcgagaagggcatcgccgacagcctggagaagctgagaaccttcaagaagaagctgagccagagcctgcccgaccaccacgaggagctgcacgccgagcagatgagatgcaaggagctggagaacgccgtgggcagctggaccgacgacctgacccagctgagcctgctgaaggacaccctgagcgcctacatcagcgccgacgacatcagcatcctgaacgagagagtggagctgctgcagagacagtgggaggagctgtgccaccagctgagcctgagaagacagcagatcggcgagagactgaacgagtgggccgtgttcagcgagaagaacaaggagctgtgcgagtggctgacccagatggagagcaaggtgagccagaacggcgacatcctgatcgaggagatgatcgagaagctgaagaaggactaccaggaggagatcgccatcgcccaggagaacaagatccagctgcagcagatgggcgagagactggccaaggccagccacgagagcaaggccagcgagatcgagtacaagctgggcaaggtgaacgacagatggcagcacctgctggacctgatcgccgccagagtgaagaagctgaaggagaccctggtggccgtgcagcagctggacaagaacatgagcagcctgagaacctggctggcccacatcgagagcgagctggccaagcccatcgtgtacgacagctgcaacagcgaggagatccagagaaagctgaacgagcagcaggagctgcagagagacatcgagaagcacagcaccggcgtggccagcgtgctgaacctgtgcgaggtgctgctgcacgactgcgacgcctgcgccaccgacgccgagtgcgacagcatccagcaggccaccagaaacctggacagaagatggagaaacatctgcgccatgagcatggagagaagactgaagatcgaggagacctggagactgtggcagaagttcctggacgactacagcagattcgaggactggctgaagagcagcgagagaaccgccgccttccccagcagcagcggcgtgatctacaccgtggccaaggaggagctgaagaagttcgaggccttccagagacaggtgcacgagtgcctgacccagctggagctgatcaacaagcagtacagaagactggccagagagaacagaaccgacagcgcctgcagcctgaagcagatggtgcacgagggcaaccagagatgggacaacctgcagaagagagtgaccagcatcctgagaagactgaagcacttcatcggccagagagaggagttcgagaccgccagagacagcatcctggtgtggctgaccgagatggacctgcagctgaccaacatcgagcacttcagcgagtgcgacgtgcaggccaagatcaagcagctgaaggccttccagcaggagatcagcctgaaccacaacaagatcgagcagatcatcgcccagggcgagcagctgatcgagaagagcgagcccctggacgccgccatcatcgaggaggagctggacgagctgagaagatactgccaggaggtgttcggcagagtggagagataccacaagaagctgatcagactgcccctgcccgacgacgagcacgacctgagcgacagagagctggagctggaggacagcgccgccctgagcgacctgcactggcacgacagaagcgccgacagcctgctgagcccccagcccagcagcaacctgagcctgagcctggcccagcccctgagaagcgagagaagcggcagagacacccccgccagcgtggacagcatccccctggagtgggaccacgactacgacctgagcagagacctggagagcgccatgagcagagccctgcccagcgaggacgaggagggccaggacgacaaggacttctacctgagaggcgccgtgggcctgagcgacgtgatgatccccgagagccccgaggcctacgtgaagctgaccgagaacgccatcaagaacaccagcggcgaccacagcgccctggagagccagatcagacagctgggcaaggccctggacgacagcagattccagatccagcagaccgagaacatcatcagaagcaagacccccaccggccccgagctggacaccagctacaagggctacatgaagctgctgggcgagtgcagcagcagcatcgacagcgtgaagagactggagcacaagctgaaggaggaggaggagagcctgcccggcttcgtgaacctgcacagcaccgagacccagaccgccggcgtgatcgacagatgggagctgctgcaggcccaggccctgagcaaggagctgagaatgaagcagaacctgcagaagtggcagcagttcaacagcgacctgaacagcatctgggcctggctgggcgacaccgaggaggagctggagcagctgcagagactggagctgagcaccgacatccagaccatcgagctgcagatcaagaagctgaaggagctgcagaaggccgtggaccacagaaaggccatcatcctgagcatcaacctgtgcagccccgagttcacccaggccgacagcaaggagagcagagacctgcaggacagactgagccagatgaacggcagatgggacagagtgtgcagcctgctggaggagtggagaggcctgctgcaggacgccctgatgcagtgccagggcttccacgagatgagccacggcctgctgctgatgctggagaacatcgacagaagaaagaacgagatcgtgcccatcgacagcaacctggacgccgagatcctgcaggaccaccacaagcagctgatgcagatcaagcacgagctgctggagagccagctgagagtggccagcctgcaggacatgagctgccagctgctggtgaacgccgagggcaccgactgcctggaggccaaggagaaggtgcacgtgatcggcaacagactgaagctgctgctgaaggaggtgagcagacacatcaaggagctggagaagctgctggacgtgagcagcagccagcaggacctgagcagctggagcagcgccgacgagctggacaccagcggcagcgtgagccccaccagcggcagaagcacccccaacagacagaagacccccagaggcaagtgcagcctgagccagcccggccccagcgtgagcagcccccacagcagaagcaccaagggcggcagcgacagcagcctgagcgagcccggccccggcagaagcggcagaggcttcctgttcagagtgctgagagccgccctgcccctgcagctgctgctgctgctgctgatcggcctggcctgcctggtgcccatgagcgaggaggactacagctgcgccctgagcaacaacttcgccagaagcttccaccccatgctgagatacaccaacggccccccccccctgtag

SEQ ID NO: 100478 - DNA, 26250 bp, synthetic construct
  misc_feature 1..26250: note = Description of Artificial Sequence: Synthetic coding sequence
  source 1..26250: mol_type = other DNA
atggccaccagcagaggcgccagcagatgccccagagacatcgccaacgtgatgcagagactgcaggacgagcaggagatcgtgcagaagagaaccttcaccaagtggatcaacagccacctggccaagagaaagccccccatggtggtggacgacctgttcgaggacatgaaggacggcgtgaagctgctggccctgctggaggtgctgagcggccagaagctgccctgcgagcagggcagaagaatgaagagaatccacgccgtggccaacatcggcaccgccctgaagttcctggagggcagaaagagcatgcacagaggcagccccatcaagctggtgaacatcaacagcaccgacatcgccgacggcagacccagcatcgtgctgggcctgatgtggaccatcatcctgtacttccagatcgaggagctgaccagcaacctgccccagctgcagagcctgagcagcagcgccagcagcgtggacagcatcgtgagcagcgagacccccagcccccccagcaagagaaaggtgaccaccaagatccagggcaacgccaagaaggccctgctgaagtgggtgcagtacaccgccggcaagcagaccggcatcgaggtgaaggacttcggcaagagctggagaagcggcgtggccttccacagcgtgatccacgccatcagacccgagctggtggacctggagaccgtgaagggcagaagcaacagagagaacctggaggacgccttcaccatcgccgagaccgagctgggcatccccagactgctggaccccgaggacgtggacgtggacaagcccgacgagaagagcatcatgacctacgtggcccagttcctgaagcactaccccgacatccacaacgccagcaccgacggccaggaggacgacgagatcctgcccggcttccccagcttcgccaacagcgtgcagaacttcaagagagaggacagagtgatcttcaaggagatgaaggtgtggatcgagcagttcgagagagacctgaccagagcccagatggtggagagcaacctgcaggacaagtaccagagcttcaagcacttcagagtgcagtacgagatgaagagaaagcagatcgagcacctgatccagcccctgcacagagacggcaagctgagcctggaccaggccctggtgaagcagagctgggacagagtgaccagcagactgttcgactggcacatccagctggacaagagcctgcccgcccccctgggcaccatcggcgcctggctgtacagagccgaggtggccctgagagaggagatcaccgtgcagcaggtgcacgaggagaccgccaacaccatccagagaaagctggagcagcacaaggacctgctgcagaacaccgacgcccacaagagagccttccacgagatctacagaaccagaagcgtgaacggcatccccgtgccccccgaccagctggaggacatggccgagagattccacttcgtgagcagcaccagcgagctgcacctgatgaagatggagttcctggagctgaagtacagactgctgagcctgctggtgctggccgagagcaagctgaagagctggatcatcaagtacggcagaagagagagcgtggagcagctgctgcagaactacgtgagcttcatcgagaacagcaagttcttcgagcagtacgaggtgacctaccagatcctgaagcagaccgccgagatgtacgtgaaggccgacggcagcgtggaggaggccgagaacgtgatgaagttcatgaacgagaccaccgcccagtggagaaacctgagcgtggaggtgagaagcgtgagaagcatgctggaggaggtgatcagcaactgggacagatacggcaacaccgtggccagcctgcaggcctggctggaggacgccgagaagatgctgaaccagagcgagaacgccaagaaggacttcttcagaaacctgccccactggatccagcagcacaccgccatgaacgacgccggcaacttcctgatcgagacctgcgacgagatggtgagcagagacctgaagcagcagctgctgctgctgaacggcagatggagagagctgttcatggaggtgaagcagtacgcccaggccgacgagatggacagaatgaagaaggagtacaccgactgcgtggtgaccctgagcgccttcgccaccgaggcccacaagaagctgagcgagcccctggaggtgagcttcatgaacgtgaagctgctgatccaggacctggaggacatcgagcagagagtgcccgtgatggacgcccagtacaagatcatcaccaagaccgcccacctgatcaccaaggagagcccccaggaggagggcaaggagatgttcgccaccatgagcaagctgaaggagcagctgaccaaggtgaaggagtgctacagccccctgctgtacgagagccagcagctgctgatccccctggaggagctggagaagcagatgaccagcttctacgacagcctgggcaagatcaacgagatcatcaccgtgctggagagagaggcccagagcagcgccctgttcaagcagaagcaccaggagctgctggcctgccaggagaactgcaagaagaccctgaccctgatcgagaagggcagccagagcgtgcagaagttcgtgaccctgagcaacgtgctgaagcacttcgaccagaccagactgcagagacagatcgccgacatccacgtggccttccagagcatggtgaagaagaccggcgactggaagaagcacgtggagaccaacagcagactgatgaagaagttcgaggagagcagagccgagctggagaaggtgctgagaatcgcccaggagggcctggaggagaagggcgaccccgaggagctgctgagaagacacaccgagttcttcagccagctggaccagagagtgctgaacgccttcctgaaggcctgcgacgagctgaccgacatcctgcccgagcaggagcagcagggcctgcaggaggccgtgagaaagctgcacaagcagtggaaggacctgcagggcgaggccccctaccacctgctgcacctgaagatcgacgtggagaagaacagattcctggccagcgtggaggagtgcagaaccgagctggacagagagaccaagctgatgccccaggagggcagcgagaagatcatcaaggagcacagagtgttcttcagcgacaagggcccccaccacctgtgcgagaagagactgcagctgatcgaggagctgtgcgtgaagctgcccgtgagagaccccgtgagagacacccccggcacctgccacgtgaccctgaaggagctgagagccgccatcgacagcacctacagaaagctgatggaggaccccgacaagtggaaggactacaccagcagattcagcgagttcagcagctggatcagcaccaacgagacccagctgaagggcatcaagggcgaggccatcgacaccgccaaccacggcgaggtgaagagagccgtggaggagatcagaaacggcgtgaccaagagaggcgagaccctgagctggctgaagagcagactgaaggtgctgaccgaggtgagcagcgagaacgaggcccagaagcagggcgacgagctggccaagctgagcagcagcttcaaggccctggtgaccctgctgagcgaggtggagaagatgctgagcaacttcggcgactgcgtgcagtacaaggagatcgtgaagaacagcctggaggagctgatcagcggcagcaaggaggtgcaggagcaggccgagaagatcctggacaccgagaacctgttcgaggcccagcagctgctgctgcaccaccagcagaagaccaagagaatcagcgccaagaagagagacgtgcagcagcagatcgcccaggcccagcagggcgagggcggcctgcccgacagaggccacgaggagctgagaaagctggagagcaccctggacggcctggagagaagcagagagagacaggagagaagaatccaggtgaccctgagaaagtgggagagattcgagaccaacaaggagaccgtggtgagatacctgttccagaccggcagcagccacgagagattcctgagcttcagcagcctggagagcctgagcagcgagctggagcagaccaaggagttcagcaagagaaccgagagcatcgccgtgcaggccgagaacctggtgaaggaggccagcgagatccccctgggcccccagaacaagcagctgctgcagcagcaggccaagagcatcaaggagcaggtgaagaagctggaggacaccctggaggaggacatcaagaccatggagatggtgaagaccaagtgggaccacttcggcagcaacttcgagaccctgagcgtgtggatcaccgagaaggagaaggagctgaacgccctggagaccagcagcagcgccatggacatgcagatcagccagatcaaggtgaccatccaggagatcgagagcaagctgagcagcatcgtgggcctggaggaggaggcccagagcttcgcccagttcgtgaccaccggcgagagcgccagaatcaaggccaagctgacccagatcagaagatacggcgaggagctgagagagcacgcccagtgcctggagggcaccatcctgggccacctgagccagcagcagaagttcgaggagaacctgagaaagatccagcagagcgtgagcgagttcgaggacaagctggccgtgcccatcaagatctgcagcagcgccaccgagacctacaaggtgctgcaggagcacatggacctgtgccaggccctggagagcctgagcagcgccatcaccgccttcagcgccagcgccagaaaggtggtgaacagagacagctgcgtgcaggaggccgccgccctgcagcagcagtacgaggacatcctgagaagagccaaggagagacagaccgccctggagaacctgctggcccactggcagagactggagaaggagctgagcagcttcctgacctggctggagagaggcgaggccaaggccagcagccccgagatggacatcagcgccgacagagtgaaggtggagggcgagctgcagctgatccaggccagcagcagaaagttcgtgagccaggccagcttctacagcaagctgctgcagctgaaggagagcctgttcagcgtggccagcaaggacgacgtgaagatgatgaagctgcacctggagcagctggacgagagatggagagacctgccccagatcatcaacaagagaatcaacttcctgcagagcgtggtggccgagcaccagcagttcgacgagctgctgctgagcttcagcgtgtggatcaagctgttcctgagcgagctgcagaccaccagcgagatcagcatcatggaccaccaggtggccctgaccagacacaaggaccacgccgccgaggtggagagcaagaagggcgagctgcagagcctgcagggccacctggccaagctgggcagcctgggcagagccgaggacctgcacctgctgcagggcaaggccgaggactgcttccagctgttcgaggaggccagccaggtggtggagagaagacagctggccctgagccacctggccgagttcctgcagagccacgccagcctgagcggcatcctgagacagctgagacagaccgtggaggccaccaacagcatgaacaagaacgagagcgacctgatcgagaaggacctgaacgacgccctgcagaacgccaaggccctggagagcgccgccgtgagcctggacggcatcctgagcaaggcccagtaccacctgaagatcggcagcagcgagcagagaaccagctgcagagccaccgccgaccagctgtgcggcgaggtggagagaatccagaacctgctgggcaccaagcagagcgaggccgacgccctggccgtgctgaagaaggccttccaggaccagaaggaggagctgctgaagagcatcgaggacatcgaggagagaaccgacaaggagagactgaaggagcccaccagacaggccctgcagcagagactgagagtgttcaaccagctggaggacgagctgaacagccacgagcacgagctgtgctggctgaaggacaaggccaagcagatcgcccagaaggacgtggccttcgcccccgaggtggacagagagatcaacagactggaggtgacctgggacgacaccaagagactgatccacgagaaccagggccagtgctgcggcctgatcgacctgatgagagagtaccagaacctgaagagcgccgtgagcaaggtgctggagaacgccagcagcgtgatcgtgaccagaaccaccatcaaggaccaggaggacctgaagtgggccttcagcaagcacgagaccgccaagaacaagatgaactacaagcagaaggacctggacaacttcaccagcaagggcaagcacctgctgagcgagctgaagaagatccacagcagcgacttcagcctggtgaagaccgacatggagagcaccgtggacaagtggctggacgtgagcgagaagctggaggagaacatggacagactgagagtgagcctgagcatctgggacgacgtgctgagcaccagagacgagatcgagggctggagcaacaactgcgtgccccagatggccgagaacatcagcaacctggacaaccacctgagagccgaggagctgctgaaggagttcgagagcgaggtgaagaacaaggccctgagactggaggagctgcacagcaaggtgaacgacctgaaggagctgaccaagaacctggagaccccccccgacctgcagttcatcgaggccgacctgatgcagaagctggagcacgccaaggagatcaccgaggtggccaagggcaccctgaaggacttcaccgcccagagcacccaggtggagaagttcatcaacgacatcaccacctggttcaccaaggtggaggagagcctgatgaactgcgcccagaacgagacctgcgaggccctgaagaaggtgaaggacatccagaaggagctgcagagccagcagagcaacatcagcagcacccaggagaacctgaacagcctgtgcagaaagtaccacagcgccgagctggagagcctgggcagagccatgaccggcctgatcaagaagcacgaggccgtgagccagctgtgcagcaagacccaggccagcctgcaggagagcctggagaagcacttcagcgagagcatgcaggagttccaggagtggttcctgggcgccaaggccgccgccaaggagagcagcgacagaaccggcgacagcaaggtgctggaggccaagctgcacgacctgcagaacatcctggacagcgtgagcgacggccagagcaagctggacgccgtgacccaggagggccagaccctgtacgcccacctgagcaagcagatcgtgagcagcatccaggagcagatcaccaaggccaacgaggagttccaggccttcctgaagcagtgcctgaaggacaagcaggccctgcaggactgcgccagcgagctgggcagcttcgaggaccagcacagaaagctgaacctgtggatccacgagatggaggagagattcaacaccgagaacctgggcgagagcaagcagcacatccccgagaagaagaacgaggtgcacaaggtggagatgttcctgggcgagctgctggccgccagagagagcctggacaagctgagccagagaggccagctgctgagcgaggagggccacggcgccggccaggagggcagactgtgcagccagctgctgaccagccaccagaacctgctgagaatgaccaaggagaagctgagaagctgccaggtggccctgcaggagcacgaggccctggaggaggccctgcagagcatgtggttctgggtgaaggccatccaggacagactggcctgcgccgagagcaccctgggcagcaaggacaccctggagaagagactgagccagatccaggacatcctgctgatgaagggcgagggcgaggtgaagctgaacatggccatcggcaagggcgagcaggccctgagaagcagcaacaaggagggccagagagtgatccagacccagctggagaccctgaaggaggtgtgggccgacatcatgagcagcagcgtgcacgcccagagcaccctggagagcgtgatcagccagtggaacgactacgtggagagaaagaaccagctggagcagtggatggagagcgtggaccagaagatcgagcaccccctgcagccccagcccggcctgaaggagaagttcgtgctgctggaccacctgcagagcatcctgagcgaggccgaggaccacaccagagccctgcacagactgatcgccaagagcagagagctgtacgagaagaccgaggacgagagcttcaaggacaccgcccaggaggagctgaagacccagttcaacgacatcatgaccgtggccaaggagaagatgagaaaggtggaggagatcgtgaaggaccacctgatgtacctggacgccgtgcacgagttcaccgactggctgcacagcgccaaggaggagctgcacagatggagcgacatgagcggcgacagcagcgccacccagaagaagctgagcaagatcaaggagctgatcgacagcagagagatcggcgccagcagactgagcagagtggagagcctggcccccgaggtgaagcagaacaccaccgccagcggctgcgagctgatgcacaccgagatgcaggccctgagagccgactggaagcagtgggaggacagcgtgttccagacccagagctgcctggagaacctggtgagccagatggccctgagcgagcaggagttcagcggccaggtggcccagctggagcaggccctggagcagttcagcgccctgctgaagacctgggcccagcagctgaccctgctggagggcaagaacaccgacgaggagatcgtggagtgctggcacaagggccaggagatcctggacgccctgcagaaggccgagcccagaaccgaggacctgaagagccagctgaacgagctgtgcagattcagcagagacctgagcacctacagcggcaaggtgagcggcctgatcaaggagtacaactgcctgtgcctgcaggccagcaagggctgccagaacaaggagcagatcctgcagcagagattcagaaaggccttcagagacttccagcagtggctggtgaacgccaagatcaccaccgccaagtgcttcgacatcccccagaacatcagcgaggtgagcaccagcctgcagaagatccaggagttcctgagcgagagcgagaacggccagcacaagctgaacatgatgctgagcaagggcgagctgctgagcaccctgctgaccaaggagaaggccaagggcatccaggccaaggtgaccgccgccaaggaggactggaagaacttccacagcaacctgcaccagaaggagagcgccctggagaacctgaagatccagatgaaggacttcgaggtgagcgccgagcccatccaggactggctgagcaagaccgagaagatggtgcacgagagcagcaacagactgtacgacctgcccgccaagagaagagagcagcagaagctgcagagcgtgctggaggagatccactgctacgagccccagctgaacagactgaaggagaaggcccagcagctgtgggagggccaggccgccagcaagagcttcagacacagagtgagccagctgagcagccagtacctggccctgagcaacctgaccaaggagaaggtgagcagactggacagaatcgtggccgagcacaaccagttcagcctgggcatcaaggagctgcaggactggatgaccgacgccatccacatgctggacagctactgccaccccaccagcgacaagagcgtgctggacagcagaaccctgaagctggaggccctgctgagcgtgaagcaggagaaggagatccagatgaagatgatcgtgaccagaggcgagagcgtgctgcagaacaccagccccgagggcatccccaccatccagcagcagctgcagagcgtgaaggacatgtgggccagcctgctgagcgccggcatcagatgcaagagccagctggagggcgccctgagcaagtggaccagctaccaggacggcgtgagacagttcagcggctggatggacagcatggaggccaacctgaacgagagcgagagacagcacgccgagctgagagacaagaccaccatgctgggcaaggccaagctgctgaacgaggaggtgctgagctacagcagcctgctggagaccatcgaggtgaagggcgccggcatgaccgagcactacgtgacccagctggagctgcaggacctgcaggagagatacagagccatccaggagagagccaaggaggccgtgaccaagagcgagaagctggtgagactgcaccaggagtaccagagagacctgaaggccttcgaggtgtggctgggccaggagcaggagaagctggaccagtacagcgtgctggagggcgacgcccacacccacgagaccaccctgagagacctgcaggagctgcaggtgcactgcgccgagggccaggccctgctgaacagcgtgctgcacaccagagaggacgtgatccccagcggcatcccccaggccgaggacagagccctggagagcctgagacaggactggcaggcctaccagcacagactgagcgagaccagaacccagttcaacaacgtggtgaacaagctgagactgatggagcagaagttccagcaggtggacgagtggctgaagaccgccgaggagaagaagtggcacgaggaggtgaccgcctacagagacgaggtggaggaggtgggcgccagagcccaggagatcctggacgagagccacgtgaacagcagaatgggctgccaggccacccagctgaccagcagataccaggccctgctgctgcaggtgctggagcagatcaagttcctggaggaggagatccagagcctggaggagagcgagagcagcctgagcagctacagcgactggtacggcagcacccacaagaacttcaagaacgtggccaccaagatcgacaaggtggacaccgtgatgatgggcaagaagctgaagaccctggaggtgctgctgaaggacatggagaagggccacagcctgctgaagagcgccagagagaagggcgagagagccgtgaagtacctggaggagggcgaggccgagagactgagaaaggagatccacgaccacatggagcagctgaaggagctgaccagcaccgtgagaaaggagcacatgaccctggagaagggcctgcacctggccaaggagttcagcgacaagtgcaaggccctgacccagtggatcgccgagtaccaggagatcctgcacgtgcccgaggagcccaagatggagctgtacgagaagaaggcccagctgagcaagtacaagagcctgcagcagaccgtgctgagccacgagcccagcgtgaagagcgtgagagagaagggcgaggccctgctggagctggtgcaggacgtgaccctgaaggacaagatcgaccagctgcagagcgactaccaggacctgtgcagcatcggcaaggccatgatggaggagatcgccggcttcgaggacagactgaacaacctgcagatgaagggcgacaccctgatcggccagtgcgccgaccacctgcaggccaagctgaagcagaacgtgcacgcccacctgcagggcaccaaggacagctacagcgccatctgcagcaccgcccagagaatgtaccagagcctggagcacgagctgcagaagcacgtgagcagacaggacaccctgcagcagtgccaggcctggctgagcgccgtgcagcccgacctggagcccagcccccagccccccctgagcagagccgaggccatcaagcaggtgaagcacttcagagccctgcaggagcaggccagaacctacctggacctgctgtgcagcatgtgcgacctgagcaacgccagcgtgaagaccaccgccaaggacatccagcagaccgagcagaccatcgagcagaagctggtgcaggcccagaacctgacccagggctgggaggagatcaagcacctgaagagcgagctgtggatctacctgcaggacgccgaccagcagctgcagaacatgaagagaagacacagcgagctggagctgaacatcgcccagaacatggtgagccaggtgaaggacttcgtgaagaagctgcagagcaagcaggccagcgtgaacaccatcatcgagaaggtgaacaagctgaccaagaaggaggagagccccgagcacaaggagatcaaccacctgaacgaccagtggctggacctgtgcagacagagcaacaacctgtgcctgcagagagaggaggacctgcagagaaccagagactaccacgactgcatgaacgtggtggaggtgttcctggagaagttcaccaccgagtgggacaacctggccagaagcgacgccgagagcaccgccgtgcacctggaggccctgaagaagctggccctggccctgcaggagagaaagtacgccatcgaggacctgaaggaccagaagcagaagatgatcgagcacctgaacctggacgacaaggagctggtgaaggagcagaccagccacctggagcagagatggttccagctggaggacctgatcaagagaaagatccaggtgagcgtgaccaacctggaggagctgaacgtggtgcagagcagattccaggagctgatggagtgggccgaggagcagcagcccaacatcgccgaggccctgaagcagagccccccccccgacatggcccagaacctgctgatggaccacctggccatctgcagcgagctggaggccaagcagatgctgctgaagagcctgatcaaggacgccgacagagtgatggccgacctgggcctgaacgagagacaggtgatccagaaggccctgagcgacgcccagagccacgtgaactgcctgagcgacctggtgggccagagaagaaagtacctgaacaaggccctgagcgagaagacccagttcctgatggccgtgttccaggccaccagccagatccagcagcacgagagaaagatcatgttcagagagcacatctgcctgctgcccgacgacgtgagcaagcaggtgaagacctgcaagagcgcccaggccagcctgaagacctaccagaacgaggtgaccggcctgtgggcccagggcagagagctgatgaaggaggtgaccgagcaggagaagagcgaggtgctgggcaagctgcaggagctgcagagcgtgtacgacagcgtgctgcagaagtgcagccacagactgcaggagctggagaagaacctggtgagcagaaagcacttcaaggaggacttcgacaaggcctgccactggctgaagcaggccgacatcgtgaccttccccgagatcaacctgatgaacgagagcagcgagctgcacacccagctggccaagtaccagaacatcctggagcagagccccgagtacgagaacctgctgctgaccctgcagagaaccggccagaccatcctgcccagcctgaacgaggtggaccacagctacctgagcgagaagctgaacgccctgcccagacagttcaacgtgatcgtggccctggccaaggacaagttctacaaggtgcaggaggccatcctggccagaaaggagtacgccagcctgatcgagctgaccacccagagcctgagcgagctggaggcccagttcctgagaatgagcaaggtgcccaccgacctggccgtggaggaggccctgagcctgcaggacggctgcagagccatcctggacgaggtggccggcctgggcgaggccgtggacgagctgaaccagaagaaggagggcttcagaagcaccggccagccctggcagcccgacaagatgctgcacctggtgaccctgtaccacagactgaagagacagaccgagcagagagtgagcctgctggaggacaccaccagcgcctaccaggagcacgagaagatgtgccagcagctggagagacagctgaagagcgtgaaggaggagcagagcaaggtgaacgaggagaccctgcccgccgaggagaagctgaagatgtaccacagcctggccggcagcctgcaggacagcggcatcgtgctgaagagagtgaccatccacctggaggacctggccccccacctggaccccctggcctacgagaaggccagacaccagatccagagctggcagggcgagctgaagctgctgaccagcgccatcggcgagaccgtgaccgagtgcgagagcagaatggtgcagagcatcgacttccagaccgagatgagcagaagcctggactggctgagaagagtgaaggccgagctgagcggccccgtgtacctggacctgaacctgcaggacatccaggaggagatcagaaagatccagatccaccaggaggaggtgcagagcagcctgagaatcatgaacgccctgagccacaaggagaaggagaagttcaccaaggccaaggagctgatcagcgccgacctggagcacagcctggccgagctgagcgagctggacggcgacatccaggaggccctgagaaccagacaggccaccctgaccgagatctacagccagtgccagagatactaccaggtgttccaggccgccaacgactggctggaggacgcccaggagctgctgcagctggccggcaacggcctggacgtggagagcgccgaggagaacctgaagagccacatggagttcttcagcaccgaggaccagttccacagcaacctggaggagctgcacagcctggtggccaccctggaccccctgatcaagcccaccggcaaggaggacctggagcagaaggtggccagcctggagctgagaagccagagaatgagcagagacagcggcgcccaggtggacctgctgcagagatgcaccgcccagtggcacgactaccagaaggccagagaggaggtgatcgagctgatgaacgacaccgagaagaagctgagcgagttcagcctgctgaagaccagcagcagccacgaggccgaggagaagctgagcgagcacaaggccctggtgagcgtggtgaacagcttccacgagaagatcgtggccctggaggagaaggccagccagctggagaagaccggcaacgacgccagcaaggccaccctgagcagaagcatgaccaccgtgtggcagagatggaccagactgagagccgtggcccaggaccaggagaagatcctggaggacgccgtggacgagtggaccggcttcaacaacaaggtgaagaaggccaccgagatgatcgaccagctgcaggacaagctgcccggcagcagcgccgagaaggccagcaaggccgagctgctgaccctgctggagtaccacgacaccttcgtgctggagctggagcagcagcagagcgccctgggcatgctgagacagcagaccctgagcatgctgcaggacggcgccgcccccacccccggcgaggagccccccctgatgcaggagatcaccgccatgcaggacagatgcctgaacatgcaggagaaggtgaagaccaacggcaagctggtgaagcaggagctgaaggacagagagatggtggagacccagatcaacagcgtgaagtgctgggtgcaggagaccaaggagtacctgggcaaccccaccatcgagatcgacgcccagctggaggagctgcagatcctgctgaccgaggccaccaaccacagacagaacatcgagaagatggccgaggagcagaaggagaagtacctgggcctgtacaccatcctgcccagcgagctgagcctgcagctggccgaggtggccctggacctgaagatcagagaccagatccaggacaagatcaaggaggtggagcagagcaaggccaccagccaggagctgagcagacagatccagaagctggccaaggacctgaccaccatcctgaccaagctgaaggccaagaccgacaacgtggtgcaggccaagaccgaccagaaggtgctgggcgaggagctggacggctgcaacagcaagctgatggagctggacgccgccgtgcagaagttcctggagcagaacggccagctgggcaagcccctggccaagaagatcggcaagctgaccgagctgcaccagcagaccatcagacaggccgagaacagactgagcaagctgaaccaggccgccagccacctggaggagtacaacgagatgctggagctgatcctgaagtggatcgagaaggccaaggtgctggcccacggcaccatcgcctggaacagcgccagccagctgagagagcagtacatcctgcaccagaccctgctggaggagagcaaggagatcgacagcgagctggaggccatgaccgagaagctgcagtacctgaccagcgtgtactgcaccgagaagatgagccagcaggtggccgagctgggcagagagaccgaggagctgagacagatgatcaagatcagactgcagaacctgcaggacgccgccaaggacatgaagaagttcgaggccgagctgaagaagctgcaggccgccctggagcaggcccaggccaccctgaccagccccgaggtgggcagactgagcctgaaggagcagctgagccacagacagcacctgctgagcgagatggagagcctgaagcccaaggtgcaggccgtgcagctgtgccagagcgccctgagaatccccgaggacgtggtggccagcctgcccctgtgccacgccgccctgagactgcaggaggaggccagcagactgcagcacaccgccatccagcagtgcaacatcatgcaggccgccgtggtgcagtacgagcagtacgagcaggagatgaagcacctgcagcagctgatcgagggcgcccacagagagatcgaggacaagcccgtggccaccagcaacatccaggagctgcaggcccagatcagcagacacgaggagctggcccagaagatcaagggctaccaggagcagatcgccagcctgaacagcaagtgcaagatgctgaccatgaaggccaagcacgccaccatgctgctgaccgtgaccgaggtggagggcctggccgagggcaccgaggacctggacggcgagctgctgcccacccccagcgcccaccccagcgtggtgatgatgaccgccggcagatgccacaccctgctgagccccgtgaccgaggagagcggcgaggagggcaccaacagcgagatcagcagcccccccgcctgcagaagccccagccccgtggccaacaccgacgccagcgtgaaccaggacatcgcctactaccaggccctgagcgccgagagactgcagaccgacgccgccaagatccaccccagcaccagcgccagccaggagttctacgagcccggcctggagcccagcgccaccgccaagctgggcgacctgcagagaagctgggagaccctgaagaacgtgatcagcgagaagcagagaaccctgtacgaggccctggagagacagcagaagtaccaggacagcctgcagagcatcagcaccaagatggaggccatcgagctgaagctgagcgagagccccgagcccggcagaagccccgagagccagatggccgagcaccaggccctgatggacgagatcctgatgctgcaggacgagatcaacgagctgcagagcagcctggccgaggagctggtgagcgagagctgcgaggccgaccccgccgagcagctggccctgcagagcaccctgaccgtgctggccgagagaatgagcaccatcagaatgaaggccagcggcaagagacagctgctggaggagaagctgaacgaccagctggaggagcagagacaggagcaggccctgcagagatacagatgcgaggccgacgagctggacagctggctgctgagcaccaaggccaccctggacaccgccctgagcccccccaaggagcccatggacatggaggcccagctgatggactgccagaacatgctggtggagatcgagcagaaggtggtggccctgagcgagctgagcgtgcacaacgagaacctgctgctggagggcaaggcccacaccaaggacgaggccgagcagctggccggcaagctgagaagactgaagggcagcctgctggagctgcagagagccctgcacgacaagcagctgaacatgcagggcaccgcccaggagaaggaggagagcgacgtggacctgaccgccacccagagccccggcgtgcaggagtggctggcccaggccagaaccacctggacccagcagagacagagcagcctgcagcagcagaaggagctggagcaggagctggccgagcagaagagcctgctgagaagcgtggccagcagaggcgaggagatcctgatccagcacagcgccgccgagaccagcggcgacgccggcgagaagcccgacgtgctgagccaggagctgggcatggagggcgagaagagcagcgccgaggaccagatgagaatgaagtgggagagcctgcaccaggagttcagcaccaagcagaagctgctgcagaacgtgctggagcaggagcaggagcaggtgctgtacagcagacccaacagactgctgagcggcgtgcccctgtacaagggcgacgtgcccacccaggacaagagcgccgtgaccagcctgctggacggcctgaaccaggccttcgaggaggtgagcagccagagcggcggcgccaagagacagagcatccacctggagcagaagctgtacgacggcgtgagcgccaccagcacctggctggacgacgtggaggagagactgttcgtggccaccgccctgctgcccgaggagaccgagacctgcctgttcaaccaggagatcctggccaaggacatcaaggagatgagcgaggagatggacaagaacaagaacctgttcagccaggccttccccgagaacggcgacaacagagacgtgatcgaggacaccctgggctgcctgctgggcagactgagcctgctggacagcgtggtgaaccagagatgccaccagatgaaggagagactgcagcagatcctgaacttccagaacgacctgaaggtgctgttcaccagcctggccgacaacaagtacatcatcctgcagaagctggccaacgtgttcgagcagcccgtggccgagcagatcgaggccatccagcaggccgaggacggcctgaaggagttcgacgccggcatcatcgagctgaagagaagaggcgacaagctgcaggtggagcagcccagcatgcaggagctgagcaagctgcaggacatgtacgacgagctgatgatgatcatcggcagcagaagaagcggcctgaaccagaacctgaccctgaagagccagtacgagagagccctgcaggacctggccgacctgctggagaccggccaggagaagatggccggcgaccagaagatcatcgtgagcagcaaggaggagatccagcagctgctggacaagcacaaggagtacttccagggcctggagagccacatgatcctgaccgagaccctgttcagaaagatcatcagcttcgccgtgcagaaggagacccagttccacaccgagctgatggcccaggccagcgccgtgctgaagagagcccacaagagaggcgtggagctggagtacatcctggagacctggagccacctggacgaggaccagcaggagctgagcagacagctggaggtggtggagagcagcatccccagcgtgggcctggtggaggagaacgaggacagactgatcgacagaatcaccctgtaccagcacctgaagagcagcctgaacgagtaccagcccaagctgtaccaggtgctggacgacggcaagagactgctgatcagcatcagctgcagcgacctggagagccagctgaaccagctgggcgagtgctggctgagcaacaccaacaagatgagcaaggagctgcacagactggagaccatcctgaagcactggaccagataccagagcgagagcgccgacctgatccactggctgcagagcgccaaggacagactggagttctggacccagcagagcgtgaccgtgccccaggagctggagatggtgagagaccacctgaacgccttcctggagttcagcaaggaggtggacgcccagagcagcctgaagagcagcgtgctgagcaccggcaaccagctgctgagactgaagaaggtggacaccgccaccctgagaagcgagctgagcagaatcgacagccagtggaccgacctgctgaccaacatccccgccgtgcaggagaagctgcaccagctgcagatggacaagctgcccagcagacacgccatcagcgaggtgatgagctggatcagcctgatggagaacgtgatccagaaggacgaggacaacatcaagaacagcatcggctacaaggccatccacgagtacctgcagaagtacaagggcttcaagatcgacatcaactgcaagcagctgaccgtggacttcgtgaaccagagcgtgctgcagatcagcagccaggacgtggagagcaagagaagcgacaagaccgacttcgccgagcagctgggcgccatgaacaagagctggcagatcctgcagggcctggtgaccgagaagatccagctgctggagggcctgctggagagctggagcgagtacgagaacaacgtgcagtgcctgaagacctggttcgagacccaggagaagagactgaagcagcagcacagaatcggcgaccaggccagcgtgcagaacgccctgaaggactgccaggacctggaggacctgatcaaggccaaggagaaggaggtggagaagatcgagcagaacggcctggccctgatccagaacaagaaggaggacgtgagcagcatcgtgatgagcaccctgagagagctgggccagacctgggccaacctggaccacatggtgggccagctgaagatcctgctgaagagcgtgctggaccagtggagcagccacaaggtggccttcgacaagatcaacagctacctgatggaggccagatacagcctgagcagattcagactgctgaccggcagcctggaggccgtgcaggtgcaggtggacaacctgcagaacctgcaggacgacctggagaagcaggagagaagcctgcagaagttcggcagcatcaccaaccagctgctgaaggagtgccacccccccgtgaccgagaccctgaccaacaccctgaaggaggtgaacatgagatggaacaacctgctggaggagatcgccgagcagctgcagagcagcaaggccctgctgcagctgtggcagagatacaaggactacagcaagcagtgcgccagcaccgtgcagcagcaggaggacagaaccaacgagctgctgaaggccgccaccaacaaggacatcgccgacgacgaggtggccacctggatccaggactgcaacgacctgctgaagggcctgggcaccgtgaaggacagcctgttcttcctgcacgagctgggcgagcagctgaagcagcaggtggacgccagcgccgccagcgccatccagagcgaccagctgagcctgagccagcacctgtgcgccctggagcaggccctgtgcaagcagcagaccagcctgcaggccggcgtgctggactacgagaccttcgccaagagcctggaggccctggaggcctggatcgtggaggccgaggagatcctgcagggccaggaccccagccacagcagcgacctgagcaccatccaggagagaatggaggagctgaagggccagatgctgaagttcagcagcatggcccccgacctggacagactgaacgagctgggctacagactgcccctgaacgacaaggagatcaagagaatgcagaacctgaacagacactggagcctgatcagcagccagaccaccgagagattcagcaagctgcagagcttcctgctgcagcaccagaccttcctggagaagtgcgagacctggatggagttcctggtgcagaccgagcagaagctggccgtggagatcagcggcaactaccagcacctgctggagcagcagagagcccacgagctgttccaggccgagatgttcagcagacagcagatcctgcacagcatcatcatcgacggccagagactgctggagcagggccaggtggacgacagagacgagttcaacctgaagctgaccctgctgagcaaccagtggcagggcgtgatcagaagagcccagcagagaagaggcatcatcgacagccagatcagacagtggcagagatacagagagatggccgagaagctgagaaagtggctggtggaggtgagctacctgcccatgagcggcctgggcagcgtgcccatccccctgcagcaggccagaaccctgttcgacgaggtgcagttcaaggagaaggtgttcctgagacagcagggcagctacatcctgaccgtggaggccggcaagcagctgctgctgagcgccgacagcggcgccgaggccgccctgcaggccgagctggccgagatccaggagaagtggaagagcgccagcatgagactggaggagcagaagaagaagctggccttcctgctgaaggactgggagaagtgcgagaagggcatcgccgacagcctggagaagctgagaaccttcaagaagaagctgagccagagcctgcccgaccaccacgaggagctgcacgccgagcagatgagatgcaaggagctggagaacgccgtgggcagctggaccgacgacctgacccagctgagcctgctgaaggacaccctgagcgcctacatcagcgccgacgacatcagcatcctgaacgagagagtggagctgctgcagagacagtgggaggagctgtgccaccagctgagcctgagaagacagcagatcggcgagagactgaacgagtgggccgtgttcagcgagaagaacaaggagctgtgcgagtggctgacccagatggagagcaaggtgagccagaacggcgacatcctgatcgaggagatgatcgagaagctgaagaaggactaccaggaggagatcgccatcgcccaggagaacaagatccagctgcagcagatgggcgagagactggccaaggccagccacgagagcaaggccagcgagatcgagtacaagctgggcaaggtgaacgacagatggcagcacctgctggacctgatcgccgccagagtgaagaagctgaaggagaccctggtggccgtgcagcagctggacaagaacatgagcagcctgagaacctggctggcccacatcgagagcgagctggccaagcccatcgtgtacgacagctgcaacagcgaggagatccagagaaagctgaacgagcagcaggagctgcagagagacatcgagaagcacagcaccggcgtggccagcgtgctgaacctgtgcgaggtgctgctgcacgactgcgacgcctgcgccaccgacgccgagtgcgacagcatccagcaggccaccagaaacctggacagaagatggagaaacatctgcgccatgagcatggagagaagactgaagatcgaggagacctggagactgtggcagaagttcctggacgactacagcagattcgaggactggctgaagagcagcgagagaaccgccgccttccccagcagcagcggcgtgatctacaccgtggccaaggaggagctgaagaagttcgaggccttccagagacaggtgcacgagtgcctgacccagctggagctgatcaacaagcagtacagaagactggccagagagaacagaaccgacagcgcctgcagcctgaagcagatggtgcacgagggcaaccagagatgggacaacctgcagaagagagtgaccagcatcctgagaagactgaagcacttcatcggccagagagaggagttcgagaccgccagagacagcatcctggtgtggctgaccgagatggacctgcagctgaccaacatcgagcacttcagcgagtgcgacgtgcaggccaagatcaagcagctgaaggccttccagcaggagatcagcctgaaccacaacaagatcgagcagatcatcgcccagggcgagcagctgatcgagaagagcgagcccctggacgccgccatcatcgaggaggagctggacgagctgagaagatactgccaggaggtgttcggcagagtggagagataccacaagaagctgatcagactgcccctgcccgacgacgagcacgacctgagcgacagagagctggagctggaggacagcgccgccctgagcgacctgcactggcacgacagaagcgccgacagcctgctgagcccccagcccagcagcaacctgagcctgagcctggcccagcccctgagaagcgagagaagcggcagagacacccccgccagcgtggacagcatccccctggagtgggaccacgactacgacctgagcagagacctggagagcgccatgagcagagccctgcccagcgaggacgaggagggccaggacgacaaggacttctacctgagaggcgccgtgggcctgagcgacgtgatgatccccgagagccccgaggcctacgtgaagctgaccgagaacgccatcaagaacaccagcggcgaccacagcgccctggagagccagatcagacagctgggcaaggccctggacgacagcagattccagatccagcagaccgagaacatcatcagaagcaagacccccaccggccccgagctggacaccagctacaagggctacatgaagctgctgggcgagtgcagcagcagcatcgacagcgtgaagagactggagcacaagctgaaggaggaggaggagagcctgcccggcttcgtgaacctgcacagcaccgagacccagaccgccggcgtgatcgacagatgggagctgctgcaggcccaggccctgagcaaggagctgagaatgaagcagaacctgcagaagtggcagcagttcaacagcgacctgaacagcatctgggcctggctgggcgacaccgaggaggagctggagcagctgcagagactggagctgagcaccgacatccagaccatcgagctgcagatcaagaagctgaaggagctgcagaaggccgtggaccacagaaaggccatcatcctgagcatcaacctgtgcagccccgagttcacccaggccgacagcaaggagagcagagacctgcaggacagactgagccagatgaacggcagatgggacagagtgtgcagcctgctggaggagtggagaggcctgctgcaggacgccctgatgcagtgccagggcttccacgagatgagccacggcctgctgctgatgctggagaacatcgacagaagaaagaacgagatcgtgcccatcgacagcaacctggacgccgagatcctgcaggaccaccacaagcagctgatgcagatcaagcacgagctgctggagagccagctgagagtggccagcctgcaggacatgagctgccagctgctggtgaacgccgagggcaccgactgcctggaggccaaggagaaggtgcacgtgatcggcaacagactgaagctgctgctgaaggaggtgagcagacacatcaaggagctggagaagctgctggacgtgagcagcagccagcaggacctgagcagctggagcagcgccgacgagctggacaccagcggcagcgtgagccccaccagcggcagaagcacccccaacagacagaagacccccagaggcaagtgcagcctgagccagcccggccccagcgtgagcagcccccacagcagaagcaccaagggcggcagcgacagcagcctgagcgagcccggccccggcagaagcggcagaggcttcctgttcagagtgctgagagccgccctgcccctgcagctgctgctgctgctgctgatcggcctggcctgcctggtgcccatgagcgaggaggactacagctgcgccctgagcaacaacttcgccagaagcttccaccccatgctgagatacaccaacggccccccccccctgtag

SEQ ID NO: 100479 - DNA, 2859 bp, synthetic construct
  misc_feature 1..2859: note = Description of Artificial Sequence: Synthetic coding sequence
  source 1..2859: mol_type = other DNA
atggtggtggccgaggacctgagcgccctgagaatggccgaggacagctgcgtggacgccgacctgcccgactgcaactgcgacgtgaccagagtgaagaagctgaaggagaccctggtggccgtgcagcagctggacaagaacatgagcagcctgagaacctggctggcccacatcgagagcgagctggccaagcccatcgtgtacgacagctgcaacagcgaggagatccagagaaagctgaacgagcagcaggagctgcagagagacatcgagaagcacagcaccggcgtggccagcgtgctgaacctgtgcgaggtgctgctgcacgactgcgacgcctgcgccaccgacgccgagtgcgacagcatccagcaggccaccagaaacctggacagaagatggagaaacatctgcgccatgagcatggagagaagactgaagatcgaggagacctggagactgtggcagaagttcctggacgactacagcagattcgaggactggctgaagagcagcgagagaaccgccgccttccccagcagcagcggcgtgatctacaccgtggccaaggaggagctgaagaagttcgaggccttccagagacaggtgcacgagtgcctgacccagctggagctgatcaacaagcagtacagaagactggccagagagaacagaaccgacagcgcctgcagcctgaagcagatggtgcacgagggcaaccagagatgggacaacctgcagaagagagtgaccagcatcctgagaagactgaagcacttcatcggccagagagaggagttcgagaccgccagagacagcatcctggtgtggctgaccgagatggacctgcagctgaccaacatcgagcacttcagcgagtgcgacgtgcaggccaagatcaagcagctgaaggccttccagcaggagatcagcctgaaccacaacaagatcgagcagatcatcgcccagggcgagcagctgatcgagaagagcgagcccctggacgccgccatcatcgaggaggagctggacgagctgagaagatactgccaggaggtgttcggcagagtggagagataccacaagaagctgatcagactgcccctgcccgacgacgagcacgacctgagcgacagagagctggagctggaggacagcgccgccctgagcgacctgcactggcacgacagaagcgccgacagcctgctgagcccccagcccagcagcaacctgagcctgagcctggcccagcccctgagaagcgagagaagcggcagagacacccccgccagcgtggacagcatccccctggagtgggaccacgactacgacctgagcagagacctggagagcgccatgagcagagccctgcccagcgaggacgaggagggccaggacgacaaggacttctacctgagaggcgccgtgggcctgagcggcgaccacagcgccctggagagccagatcagacagctgggcaaggccctggacgacagcagattccagatccagcagaccgagaacatcatcagaagcaagacccccaccggccccgagctggacaccagctacaagggctacatgaagctgctgggcgagtgcagcagcagcatcgacagcgtgaagagactggagcacaagctgaaggaggaggaggagagcctgcccggcttcgtgaacctgcacagcaccgagacccagaccgccggcgtgatcgacagatgggagctgctgcaggcccaggccctgagcaaggagctgagaatgaagcagaacctgcagaagtggcagcagttcaacagcgacctgaacagcatctgggcctggctgggcgacaccgaggaggagctggagcagctgcagagactggagctgagcaccgacatccagaccatcgagctgcagatcaagaagctgaaggagctgcagaaggccgtggaccacagaaaggccatcatcctgagcatcaacctgtgcagccccgagttcacccaggccgacagcaaggagagcagagacctgcaggacagactgagccagatgaacggcagatgggacagagtgtgcagcctgctggaggagtggagaggcctgctgcaggacgccctgatgcagtgccagggcttccacgagatgagccacggcctgctgctgatgctggagaacatcgacagaagaaagaacgagatcgtgcccatcgacagcaacctggacgccgagatcctgcaggaccaccacaagcagctgatgcagatcaagcacgagctgctggagagccagctgagagtggccagcctgcaggacatgagctgccagctgctggtgaacgccgagggcaccgactgcctggaggccaaggagaaggtgcacgtgatcggcaacagactgaagctgctgctgaaggaggtgagcagacacatcaaggagctggagaagctgctggacgtgagcagcagccagcaggacctgagcagctggagcagcgccgacgagctggacaccagcggcagcgtgagccccaccagcggcagaagcacccccaacagacagaagacccccagaggcaagtgcagcctgagccagcccggccccagcgtgagcagcccccacagcagaagcaccaagggcggcagcgacagcagcctgagcgagcccggccccggcagaagcggcagaggcttcctgttcagagtgctgagagccgccctgcccctgcagctgctgctgctgctgctgatcggcctggcctgcctggtgcccatgagcgaggaggactacagctgcgccctgagcaacaacttcgccagaagcttccaccccatgctgagatacaccaacggccccccccccctgtag

SEQ ID NO: 100480 - DNA, 20475 bp, synthetic construct
  misc_feature 1..20475: note = Description of Artificial Sequence: Synthetic coding sequence
  source 1..20475: mol_type = other DNA
atggccagcagccccgagctgcccaccgaggacgagcagggcagctggggcatcgacgacctgcacatcagcctgcaggccgagcaggaggacacccagaagaaggccttcacctgctggatcaacagccagctggccagacacaccagccccagcgtgatcagcgacctgttcaccgacatcaagaagggccacgtgctgctggacctgctggaggtgctgagcggccagcagctgcccagagacaagggcagcaacaccttccagtgcagaatcaacatcgagcacgccctgaccttcctgagaaacagaagcatcaagctgatcaacatccacgtgaccgacatcatcgacggcaaccccagcatcatcctgggcctgatctggaccatcatcctgcacttccacatcgagaagctggcccagaccctgagctgcaactacaaccagcccagcctggacgacgtgagcgtggtggacagcagccccgccagcagcccccccgccaagaagtgcagcaaggtgcaggccagatggcagatgagcgccagaaaggccctgctgctgtgggcccaggagcagtgcgccacctacgagagcgtgaacgtgaccgacttcaagagcagctggagaaacggcatggccttcctggccatcatccacgccctgagacccgacctgatcgacatgaagagcgtgaagcacagaagcaacaaggacaacctgagagaggccttcagaatcgccgagcaggagctgaagatccccagactgctggagcccgaggacgtggacgtggtggaccccgacgagaagagcatcatgacctacgtggcccagttcctgcagtacagcaaggacgcccccggcaccggcgaggaggcccagggcaaggtgaaggacgccatgggctggctgaccctgcagaaggagaagctgcagaagctgctgaaggacagcgagaacgacacctacttcaagaagtacaacagcctgctgagcttcatggagagcttcaacgaggagaagaagagcttcctggacgtgctgagcatcaagagagacctggacgagctggacaaggaccacctgcagctgagagaggcctgggacggcctggaccaccagatcaacgcctggaagatcaagctgaactacgccctgcccccccccctgcaccagaccgaggcctggctgcaggaggtggaggagctgatggacgaggacctgagcgccagccaggaccacagccaggccgtgaccctgatccaggagaagatgaccctgttcaagagcctgatggacagattcgagcaccacagcaacatcctgctgaccttcgagaacaaggacgagaaccacctgcccctggtgccccccaacaagctggaggagatgaagagaagaatcaacaacatcctggagaagaagttcatcctgctgctggagttccactactacaagtgcctggtgctgggcctggtggacgaggtgaagagcaagctggacatctggaacatcaagtacggcagcagagagagcgtggagctgctgctggaggactggcacaagttcatcgaggagaaggagttcctggccagactggacaccagcttccagaagtgcggcgagatctacaagaacctggccggcgagtgccagaacatcaacaagcagtacatgatggtgaagagcgacgtgtgcatgtacagaaagaacatctacaacgtgaagagcaccctgcagaaggtgctggcctgctgggccacctacgtggagaacctgagactgctgagagcctgcttcgaggagaccaagaaggaggagatcaaggaggtgcccttcgagaccctggcccagtggaacctggagcacgccaccctgaacgaggccggcaacttcctggtggaggtgagcaacgacgtggtgggcagcagcatcagcaaggagctgagaagactgaacaagagatggagaaagctggtgagcaagacccagctggagatgaacctgcccctgatgatcaagaagcaggaccagcccaccttcgacaacagcggcaacatcctgagcaaggaggagaaggccaccgtggagttcagcaccgacatgagcgtggagctgcccgagaactacaaccagaacatcaaggccggcgagaagcacgagaaggagaacgaggagttcaccggccagctgaaggtggccaaggacgtggagaagctgatcggccaggtggagatctgggaggccgaggccaagagcgtgctggaccaggacgacgtggacaccagcatggaggagagcctgaagcacctgatcgccaagggcagcatgttcgacgagctgatggccagaagcgaggacatgctgcagatggacatccagaacatcagcagccaggagagcttccagcacgtgctgaccaccggcctgcaggccaagatccaggaggccaaggagaaggtgcagatcaacgtggtgaagctgatcgccgccctgaagaacctgaccgacgtgagccccgacctggacatcagactgaagatggaggagagccagaaggagctggagagctacatgatgagagcccagcagctgctgggccagagagagagccccggcgagctgatcagcaagcacaaggaggccctgatcatcagcaacaccaagagcctggccaagtacctgaaggccgtggaggagctgaagaacaacgtgaccgaggacatcaagatgagcctggaggagaagagcagagacgtgtgcgccaagtgggagagcctgcaccacgagctgagcctgtacgtgcagcagctgaagatcgacatcgagaagggcaagctgagcgacaacatcctgaagctggagaagcagatcaacaaggagaagaagctgatcagaagaggcagaaccaagggcctgatcaaggagcacgaggcctgcttcagcgaggagggctgcctgtaccagctgaaccaccacatggaggtgctgagagagctgtgcgaggagctgcccagccagaagagccagcaggaggtgaagagactgctgaaggactacgagcagaagatcgagagactgctgaagtgcgccagcgagatccacatgaccctgcagcccaccgccggcggcaccagcaagaacgagggcaccatcaccaccagcgagaacagaggcggcgacccccacagcgaggcccccttcgccaagagcgacaaccagcccagcaccgagaaggccatggagcccaccatgaagttcagcctggccagcgtgctgagacccctgcaggaggagagcatcatggagaaggactacagcgccagcatcaacagcctgctggagagatacgacacctacagagacatcctggagcaccacctgcagaacaacaagttcagaatcaccagcgacttcagcagcgaggaggacagaagcagcagctgcctgcaggccaagctgaccgacctgcaggtgatcaagaacgagaccgacgccagatggaaggagttcgagatcatcagcctgaagctggagaaccacgtgaacgacatcaagaagcccttcgtgatcaaggagagagacaccctgaaggagagagagagagagctgcagatgaccctgaacaccagaatggagagcctggagaccgccctgagactggtgctgcccgtggagaaggccagcctgctgctgtgcggcagcgacctgcccctgcacaagatggccatccagggcttccacctgatcgacgccgacagaatctaccagcacctgagaaacatccaggacagcatcgccaagcagatcgagatctgcaacagactggaggagcccggcaacttcgtgctgaaggagctgcaccccttcgacctgcacgccatgcagaacatcatcctgaagtacaagacccagttcgagggcatgaaccacagagtgcagagaagcgaggacaccctgaaggccctggaggacttcctggccagcctgagaaccgccaagctgagcgccgagcccgtgaccgacctgagcgccagcgacacccaggtggcccaggagaacaccctgaccgtgaagaacaaggagggcgagatccacctgatgaaggacaaggccaagcacctggacaagtgcctgaagatgctggacatgagcttcaaggacgccgagagaggcgacgacaccagctgcgagaacctgctggacgccttcagcatcaagctgagcgagacccacggctacggcgtgcaggaggagttcaccgaggagaacaagctgctggaggcctgcatcttcaagaacaacgagctgctgaagaacatccaggacgtgcagagccagatcagcaagatcggcctgaaggaccccaccgtgcccgccgtgaagcacagaaagaagagcctgatcagactggacaaggtgctggacgagtacgaggaggagaagagacacctgcaggagatggccaacagcctgccccacttcaaggacggcagagagaagaccgtgaaccagcagtgccagaacaccgtggtgctgtgggagaacaccaaggccctggtgaccgagtgcctggagcagtgcggcagagtgctggagctgctgaagcagtaccagaacttcaagagcatcctgaccaccctgatccagaaggaggagagcgtgatcagcctgcaggccagctacatgggcaaggagaacctgaagaagagaatcgccgagatcgagatcgtgaaggaggagttcaacgagcacctggaggtggtggacaagatcaaccaggtgtgcaagaacctgcagttctacctgaacaagatgaagaccttcgaggagccccccttcgagaaggaggccaacatcatcgtggacagatggctggacatcaacgagaagaccgaggactactacgagaacctgggcagagccctggccctgtgggacaagctgttcaacctgaagaacgtgatcgacgagtggaccgagaaggccctgcagaagatggagctgcaccagctgaccgaggaggacagagagagactgaaggaggagctgcaggtgcacgagcagaagaccagcgagttcagcagaagagtggccgagatccagttcctgctgcagagcagcgagatccccctggagctgcaggtgatggagagcagcatcctgaacaagatggagcacgtgcagaagtgcctgaccggcgagagcaactgccacgccctgagcggcagcaccgccgagctgagagaggacctggaccaggccaagacccagatcggcatgaccgagagcctgctgaaggccctgagccccagcgacagcctggagatcttcaccaagctggaggagatccagcagcagatcctgcagcagaagcacagcatgatcctgctggagaaccagatcggctgcctgacccccgagctgagcgagctgaagaagcagtacgagagcgtgagcgacctgttcaacaccaagaagagcgtgctgcaggaccacttcagcaagctgctgaacgaccagtgcaagaacttcaacgactggttcagcaacatcaaggtgaacctgaaggagtgcttcgagagcagcgagaccaagaagagcgtggagcagaagctgcagaagctgagcgacttcctgaccctggagggcagaaacagcaagatcaagcaggtggacagcgtgctgaagcacgtgaagaagcacctgcccaaggcccacgtgaaggagctgatcagctggctggtgggccaggagttcgagctggagaagatggagagcatctgccaggccagagccaaggagctggaggacagcctgcagcagctgctgagactgcaggacgaccacagaaacctgagaaagtggctgaccaaccaggaggagaagtggaagggcatggaggagcccggcgagaagaccgagctgttctgccaggccctggccagaaagagagagcagttcgagagcgtggcccagctgaacaacagcctgaaggagtacggcttcaccgaggaggaggagatcatcatggaggccacctgcctgatggacagataccagaccctgctgagacagctgagcgagatcgaggaggaggacaagctgctgcccaccgaggaccagagcttcaacgacctggcccacgacgtgatccactggatcaaggagatcaaggagagcctgatggtgctgaacagcagcgagggcaagatgcccctggaggagagaatccagaagatcaaggagatcatcctgctgaagcccgagggcgacgccagaatcgagaccatcatgaagcaggccgagagcagcgaggcccccctggtgcagaagaccctgaccgacatcagcaaccagtgggacaacaccctgcacctggccagcacctacctgagccaccaggagaagctgctgctggagggcgagaagtacctgcagagcaaggaggacctgagactgatgctgatcgagctgaagaagaagcaggaggccggcttcgccctgcagcacggcctgcaggagaagaaggcccagctgaagatctacaagaagttcctgaagaaggcccaggacctgaccagcctgctgaaggagctgaagagccagggcaactacctgctggagtgcaccaagaaccccagcttcagcgaggagccctggctggagatcaagcacctgcacgagagcctgctgcagcagctgcaggacagcgtgcagaacctggacggccacgtgagagagcacgacagctaccaggtgtgcgtgaccgacctgaacaccaccctggacaacttcagcaaggagttcgtgagcttcagcgacaagcccgtggaccagatcgccgtggaggagaagctgcagaagctgcaggagctggagaacagactgagcctgcaggacggcaccctgaagaagatcctggccctggccaagagcgtgaagcagaacaccagcagcgtgggccagaagatcatcaaggacgacatcaagagcctgcagtgcaagcagaaggacctggagaacagactggccagcgccaagcaggagatggagtgctgcctgaacagcatcctgaagagcaagagaagcaccgagaagaagggcaagttcaccctgcccggcagagagaagcaggccaccagcgacgtgcaggagagcacccaggagagcgccgccgtggagaagctggaggaggactgggagatcaacaagaacttcgtggagaacgtgatggccgtgagcaagaactgccaccacagcatgtacatcttcgagagcatcgtgaagaacttcatcagcgacgagatgcaggacagcgccgtggagatggccatgagcaagcagctgagcctgaacgcccaggagagcatgaagaacaccgaggacgagagaaaggtgaacgagctgcagaaccagcccctggagctggacaccatgctgagaaacgagcagctggaggagatcgagaagctgtacacccagctggaggccaagaaggccgccatcaagcccctggagcagaccgagtgcctgaacaagaccgagaccggcgccctggtgctgcacaacatcggctacagcgcccagcacctggacaacctgctgcaggccctgatcaccctgaagaagaacaaggagagccagtactgcgtgctgagagacttccaggagtacctggccgccgtggagagcagcatgaaggccctgctgaccgacaaggagagcctgaaggtgggccccctggacagcgtgacctacctggacaagatcaagaagttcatcgccagcatcgagaaggagaaggacagcctgggcaacctgaagatcaagtgggagaacctgagcaaccacgtgaccgacatggacaagaagctgctggagagccagatcaagcagctggagcacggctgggagcaggtggagcagcagatccagaagaagtacagccagcaggtggtggagtacgacgagttcaccaccctgatgaacaaggtgcaggacaccgagatcagcctgcagcagcagcagcagcacctgcagctgagactgaagagccccgaggagagagccggcaaccagagcatgatcgccctgaccaccgacctgcaggccaccaagcacggcttcagcgtgctgaagggccaggccgagctgcagatgaagagaatctggggcgagaaggagaagaagaacctggaggacggcatcaacaacctgaagaagcagtgggagaccctggagcccctgcacctggaggccgagaaccagatcaagaagtgcgacatcagaaacaagatgaaggagaccatcctgtgggccaagaacctgctgggcgagctgaaccccagcatccccctgctgcccgacgacatcctgagccagatcagaaagtgcaaggtgacccacgacggcatcctggccagacagcagagcgtggagagcctggccgaggaggtgaaggacaaggtgcccagcctgaccacctacgagggcagcgacctgaacaacaccctggaggacctgagaaaccagtaccagatgctggtgctgaagagcacccagagaagccagcagctggagttcaagctggaggagagaagcaacttcttcgccatcatcagaaagttccagctgatggtgcaggagagcgagaccctgatcatccccagagtggagaccgccgccaccgaggccgagctgaagcaccaccacgtgaccctggaggccagccagaaggagctgcaggagatcgacagcggcatcagcacccacctgcaggagctgaccaacatctacgaggagctgaacgtgttcgagagactgttcctggaggaccagctgaagaacctgaagatcagaaccaacagaatccagagattcatccagaacacctgcaacgaggtggagcacaagatcaagttctgcagacagttccacgagaagaccagcgccctgcaggaggaggccgacagcatccagagaaacgagctgctgctgaaccaggaggtgaacaagggcgtgaaggaggagatctacaacctgaaggacagactgaccgccatcaagtgctgcatcctgcaggtgctgaagctgaagaaggtgttcgactacatcggcctgaactgggacttcagccagctggaccagctgcagacccaggtgttcgagaaggagaaggagctggaggagaagatcaagcagctggacaccttcgaggaggagcacggcaagtaccaggccctgctgagcaagatgagagccatcgacctgcagatcaagaagatgaccgaggtggtgctgaaggcccccgacagcagccccgagagcagaagactgaacgcccagatcctgagccagagaatcgagaaggccaagtgcctgtgcgacgagatcatcaagaagctgaacgagaacaagaccttcgacgacagcttcaaggagaaggagatcctgcagatcaagctgaacgccgaggagaacgacaagctgtacaaggtgctgcagaacatggtgctggagctgagccccaaggagctggacgagaagaactgccaggacaagctggagaccagcctgcacgtgctgaaccagatcaagagccagctgcagcagcccctgctgatcaacctggagatcaagcacatccagaacgagaaggacaactgcgaggccttccaggagcaggtgtgggccgagatgtgcagcatcaaggccgtgaccgccatcgagaagcagagagaggagaacagcagcgaggccagcgacgtggagaccaagctgagagagttcgaggacctgcagatgcagctgaacaccagcatcgacctgagaaccaacgtgctgaacgacgcctacgagaacctgaccagatacaaggaggccgtgaccagagccgtggagagcatcaccagcctggaggccatcatcatcccctacagagtggacgtgggcaaccccgaggagagcctggagatgcccctgagaaagcaggaggagctggagagcaccgtggcccacatccaggacctgaccgagaagctgggcatgatcagcagccccgaggccaagctgcagctgcagtacaccctgcaggagctggtgagcaagaacagcgccatgaaggaggccttcaaggcccaggagaccgaggccgagagatacctggagaactacaagtgctacagaaagatggaggaggacatctacaccaacctgagcaagatggagaccgtgctgggccagagcatgagcagcctgcccctgagctacagagaggccctggagagactggagcagagcaaggccctggtgagcaacctgatcagcaccaaggaggagctgatgaagctgagacagatcctgagactgctgagactgagatgcaccgagaacgacggcatctgcctgctgaagatcgtgagcgccctgtgggagaagtggctgagcctgctggaggccgccaaggagtgggagatgtggtgcgaggagctgaagcaggagtggaagttcgtgagcgaggagatcgagagagaggccatcatcctggacaacctgcaggaggagctgcccgagatcagcaagaccaaggaggccgccaccaccgaggagctgagcgagctgctggactgcctgtgccagtacggcgagaacgtggagaagcagcagctgctgctgaccctgctgctgcagagaatcagaagcatccagaacgtgcccgagagcagcggcgccgtggagaccgtgcccgccttccaggagatcaccagcatgaaggagagatgcaacaagctgctgcagaaggtgcagaagaacaaggagctggtgcagaccgagatccaggagagacacagcttcaccaaggagatcatcgccctgaagaacttcttccagcagaccaccaccagcttccagaacatggccttccaggaccaccccgagaagagcgagcagttcgaggagctgcagagcatcctgaagaagggcaagctgaccttcgagaacatcatggagaagctgagaatcaagtacagcgagatgtacaccatcgtgcccgccgagatcgagagccaggtggaggagtgcagaaaggccctggaggacatcgacgagaagatcagcaacgaggtgctgaagagcagccccagctacgccatgagaagaaagatcgaggagatcaacaacggcctgcacaacgtggagaagatgctgcagcagaagagcaagaacatcgagaaggcccaggagatccagaagaagatgtgggacgagctggacctgtggcacagcaagctgaacgagctggacagcgaggtgcaggacatcgtggagcaggaccccggccaggcccaggagtggatggacaacctgatgatccccttccagcagtaccagcaggtgagccagagagccgagtgcagaaccagccagctgaacaaggccaccgtgaagatggaggagtacagcgacctgctgaagagcaccgaggcctggatcgagaacaccagccacctgctggccaaccccgccgactacgacagcctgagaaccctgagccaccacgccagcaccgtgcagatggccctggaggacagcgagcagaagcacaacctgctgcacagcatcttcatggacctggaggacctgagcatcatcttcgagaccgacgagctgacccagagcatccaggagctgagcaaccaggtgaccgccctgcagcagaagatcatggagagcctgccccagatccagagaatggccgacgacgtggtggccatcgagagcgaggtgaagagcatggagaagagagtgagcaagatcaagaccatcctgctgagcaaggagatcttcgacttcagccccgaggagcacctgaagcacggcgaggtgatcctggagaacatcagacccatgaagaagaccatcgccgagatcgtgagctaccaggtggagctgagactgccccagaccggcatgaagcccctgcccgtgttccagagaaccaaccagctgctgcaggacatcaagctgctggagaacgtgacccaggagcagaacgagctgctgaaggtggtgatcaagcagaccaacgagtgggacgaggagatcgagaacctgaagcagatcctgaacaactacagcgcccagttcagcctggagcacatgagccccgaccaggccgacaagctgccccagctgcagggcgagatcgagagaatggagaagcagatcctgagcctgaaccagagaaaggaggacctgctggtggacctgaaggccaccgtgctgaacctgcaccagcacctgaagcaggagcaggagggcgtggagagagacagactgcccgccgtgaccagcgaggagggcggcgtggccgagagagacgccagcgagagaaagctgaacagaagaggcagcatgagctacctggccgccgtggaggaggaggtggaggagagcagcgtgaagagcgaccacgacaaggacatggaggaggacagagccagcagcagcagcggcaccatcgtgcaggaggcctacggcaagatcagcaccagcgacaacagcatggcccagatcctgacccccgacagcctgaacaccgagcagggccccgagtgcagcctgagacccaaccagaccgaggagggcaccaccccccccatcgaggccgacaccctggacagcagcgacgcccagggcggcctggagcccagagtggagaagaccagacccgagcccaccgaggtgctgcacgcctgcaagacccaggtggccgagctggagctgtggctgcagcaggccaacgtggccgtggagcccgagaccctgaacgccgacatgcagcaggtgctggagcagcagctggtgggctgccaggccatgctgaccgagatcgagcacaaggtggccttcctgctggagacctgcaaggaccagggcctgggcgacaacggcgccacccagcacgaggccgaggccctgagcctgaagctgaagaccgtgaagtgcaacctggagaaggtgcagatgatgctgcaggagaagcacagcgaggaccagcaccccaccatcctgaagaagagcagcgagcccgagcaccaggaggccctgcagcccgtgaacctgagcgagctggagagcatcgtgaccgagagaccccagttcagcagacagaaggacttccagcagcagcaggtgctggagctgaagcccatggagcagaaggacttcatcaagttcatcgagttcaacgccaagaagatgtggccccagtactgccagcacgacaacgacaccacccaggagagcagcgccagataccccaccaccgaggagctgaagacctacaccacccagctggaggacctgagacaggaggccagcaacctgcagacccaggagaacatgaccgaggaggcctacatcaacctggacaagaagctgttcgagctgttcctgaccctgagccagtgcctgagcagcgtggaggagatgctggagatgcccagactgtacagagaggacggcagcggccagcaggtgcactacgagaccctggccctggagctgaagaagctgtacctggccctgagcgacaagaagggcgacctgctgaaggccatgacctggcccggcgagaacaccaacctgctgctggagtgcttcgacaacctgcaggtgtgcctggagcacacccaggccgccgccgtgtgcagaagcaagagcctgaaggccggcctggactacaacagaagctaccagaaggccgacgcctacaccgtggagctggagaacgccgagagcagagtggccaagctgagagacgagggcgagagactgcacctgccctacgccctgctgcaggaggtgtacaagctggaggacgtgctggacagcatgtggggcatgctgagagccagatacaccgagctgagcagccccttcgtgaccgagagccagcaggacgccctgctgcagggcatggtggagctggtgaagatcggcaaggagaagctggcccacggccacctgaagcagaccaagagcaaggtggccctgcaggcccagatcgagaaccacaaggtgttcttccagaagctggtggccgacatgctgctgatccaggcctacagcgccaagatcctgcccagcctgctgcagaacagagagaccttctgggccgagcaggtgaccgaggtgaagatcctggaggagaagagcagacagtgcggcatgaagctgcagagcctgctgcagaagtgggaggagttcgacgagaactacgccagcctggagaaggacctggagatcctgatcagcaccctgcccagcgtgagcctggtggaggagaccgaggagagactggtggagagaatcagcttctaccagcagatcaagagaaacatcggcggcaagcacgccagactgtaccagaccctgaacgagggcaagcagctggtggccagcgtgagctgccccgagctggagggccagatcgccaagctggaggagcagtggctgagcctgaacaagaagatcgaccacgagctgcacagactgcaggccctgctgaagcacctgctgagaagcgccttcctgggcgtgtacaacagagacagcgaccagctgaccaagtggctggagagcagccagcacaccctgaactactggaaggagcagagcctgaacgtgagccaggacctggacaccatcagaagcaacatcaacaacttcttcgagttcagcaaggaggtggacgagaagagcagcctgaagaccgccgtgatcagcatcggcaaccagctgctgcacctgaaggagaccgacaccgccaccctgagagccagcctggcccagttcgagcagaagtggaccatgctgatcacccagctgcccgacatccaggagaagctgcaccagctgcagatggagaagctgcccagcagaaaggccatcaccgagatgatcagctggatgaacaacgtggagcaccagaccagcgacgaggacagcgtgcacagccccagcagcgccagccaggtgaagcacctgctgcagaagcacaaggagttcagaatggagatggactacaagcagtggatcgtggacttcgtgaaccagagcctgctgcagctgagcacctgcgacgtggagagcaagagatacgagagaaccgagttcgccgagcacctgggcgagatgaacagacagtggcacagagtgcacggcatgctgaacagaaagatccagcacctggagcagctgctggagagcatcaccgagagcgagaacaagatccagatcctgaacaactggctggaggcccaggaggagagactgaagaccctgcagaagcccgagagcgtgatcagcgtgcagaagctgctgctggactgccaggacatcgagaaccagctggccatcaagagcaaggccctggacgagctgaagcagagctacctgaccctggagagcggcgccgtgcccctgctggaggacaccgccagcagaatcgacgagctgttccagaagagaagcagcgtgctgacccaggtgaaccagctgaagaccagcatgcagagcgtgctgcaggagtggaagatctacgaccagctgtacgacgaggtgaacatgatgaccatcagattctggtactgcatggagcacagcaagcccgtggtgctgagcctggagaccctgagatgccaggtggagaacctgcagagcctgcaggacgaggccgagagcagcgagggcagctgggagaagctgcaggaggtgatcggcaagctgaagggcctgtgccccagcgtggccgagatcatcgaggagaagtgccagaacacccacaagagatggacccaggtgaaccaggccatcgccgaccagctgcagaaggcccagagcctgctgcagctgtggaaggcctacagcaacgcccacggcgaggccgccgccagactgaagcagcaggaggccaagttccagcagctggccaacatcagcatgagcggcaacaacctggccgagatcctgccccccgccctgcaggacatcaaggagctgcagcacgacgtgcagaagaccaaggaggccttcctgcagaacagcagcgtgctggacagactgccccagcccgccgagagcagcacccacatgctgctgcccggccccctgcacagcctgcagagagccgcctacctggagaagatgctgctggtgaaggccaacgagttcgagaaccacgtgctggccctgaccgcccagagccccgacatcgagcacctgaacgaggtgagcctgaagctgcccctgagcgacgtggccgtgaagaccctgcagaacatgaacagacagtggatcagagccaccgccaccgccctggagagatgcagcgagctgcagggcatcggcctgaacgagaagttcctgtactgctgcgagaagtggatccagctgctggagaagatcgaggaggccctgaaggtggacgtggccaacagcctgcccgagctgctggagcagcagaagacctacaagatgctggaggccgaggtgagcatcaaccagaccatcgccgacagctacgtgacccagagcctgcagctgctggacaccaccgagatcgagaacagacccgagttcatcaccgagttcagcaagctgaccgacagatggcagaacgccgtgcagggcgtgagacagagaaagggcgacgtggacggcctgaacgcccacgtggccagatgcggcggcgccagcctgaagaagcaggacctgagatacagcctgcacaccgcctgcggcgccgccctgctgtgcagaagcagccacggcgccaacaaggagatccacttccagagaagaagaaccacctgcgccctgaccctggaggccggcgagaagctgctgctgaccaccgacctgaagaccaaggagagcgtgggcagaagaatcagccagctgcaggacagctggaaggacatggagccccagctggccgagatgatcaagcagttccagagcaccgtggagacctgggaccagtgcgagaagaagatcaaggagctgaagagcagactgcaggtgctgaaggcccagagcgaggaccccctgcccgagctgcacgaggacctgcacaacgagaaggagctgatcaaggtggccatcagaaagcaggagatcgaggacagactgaacacctgggtggtgttcaacgagaagaacaaggagctgtgcgcctggctggtgcagatggagaacaaggtgctgcagaccgccgacatcagcatcgaggagatgatcgagaagctgcagaagagaaccgtgggcagagaggaggtgcccgagagatgggagtgcgagaccatcgtgagcggccacggcaccgaggagagctgcttcctgagcatcagaaagttccaccagggcagaggcctgcacatcctgacctgccagctgatcccccaggactgcatggaggagatcaacctgttcagcgagaacaagctgcagctgaagcagatgggcgaccagctgatcaaggccagcaacaagagcagagccgccgagatcgacgacaagctgaacaagatcaacgacagatggcagcacctgttcgacgtgatcggcagcagcatggccgaccagaccaacagcagatggatgttcttccagtggcccagaggcatccagagaaccgtgacctggccctgggaccacctgtgcagctgcgccagcaccggccacaccggccccttccacagcagcgtgctgagatgcttcgagcagcacatcgagttcggcatctacagaagaacctacaaggtgaacaaggagctgggcggcgacaagaacggccagagatgccccatcatctacccccacggcctggtgcagtgcatcagactgggcgagcccctgatcctgaagagagtgaagaagctgaaggagaccttcgccttcatccagcagctggacaagaacatgagcaacctgagaacctggctggccagaatcgagagcgagctgagcaagcccgtggtgtacgacgtgtgcgacgaccaggagatccagaagagactggccgagcagcaggacctgcagagagacatcgagcagcacagcgccggcgtggagagcgtgttcaacatctgcgacgtgctgctgcacgacagcgacgcctgcgccaacgagaccgagtgcgacagcatccagcagaccaccagaagcctggacagaagatggagaaacatctgcgccatgagcatggagagaagaatgaagatcgaggagacctggagactgtggcagaagttcctggacgactacagcagattcgaggactggctgaagagcgccgagagaaccgccgcctgccccaacagcagcgaggtgctgtacaccagcgccaaggaggagctgaagagattcgagagacagatccacgagagactgacccagctggagctgatcaacaagcagtacagaagactggccagagagaacagaaccgacaccgccagcagactgaagcagatggtgcacgagggcaaccagagatgggacaacctgcagagaagagtgaccgccgtgctgagaagactgagacacttcaccaaccagagagaggagttcgagggcaccagagagagcatcctggtgtggctgaccgagatggacctgcagctgaccaacgtggagcacttcagcgagagcgacgccgacgacaagatgagacagctgaacggcttccagcaggagatcaccctgaacaccaacaagatcgaccagctgatcgtgttcggcgagcagctgatccagaagagcgagcccctggacgccgtgctgatcgaggacgagctggaggagctgcacagatactgccaggagggcctggaggacgagaaggaggccagcgagaacgagaccgacatggaggaccccagagagatccagaccgacagctggagaaagagaggcgagagcgaggagcccagcagcccccagagcctgtgccacctggtggcccccggccacgagagaagcggctgcgagacccccgtgagcgtggacagcatccccctggagtgggaccacaccggcgacgtgggcggcagcagcagccacgaggaggacgaggagggcccctactacagcgccctgagcggcaagagcatcagcgacggccacagctggcacgtgcccgacagccccagctgccccgagcaccactacaagcagatggagggcgacagaaacgtgccccccgtgccccccgccagcagcaccccctacaagcccccctacgtgagcctgaacttcaccggcagcaccgcctacgtgtgcgccttcgacagatgggagatgatccaggcccaggagctgcacaacaagctgaagatcaagcagaacctgcagcagctgaacagcgacatcagcgccatcaccacctggctgaagaagaccgaggccgagctggagatgctgaagatggccaagccccccagcgacatccaggagatcgagctgagagtgaagagactgcaggagatcctgaaggccttcgacacctacaaggccctggtggtgagcgtgaacgtgagcagcaaggagttcctgcagaccgagagccccgagagcaccgagctgcagagcagactgagacagctgagcctgctgtgggaggccgcccagggcgccgtggacagctggagaggcggcctgagacagagcctgatgcagtgccaggacttccaccagctgagccagaacctgctgctgtggctggccagcgccaagaacagaagacagaaggcccacgtgaccgaccccaaggccgaccccagagccctgctggagtgcagaagagagctgatgcagctggagaaggagctggtggagagacagccccaggtggacatgctgcaggagatcagcaacagcctgctgatcaagggccacggcgaggactgcatcgaggccgaggagaaggtgcacgtgatcgagaagaagctgaagcagctgagagagcaggtgagccaggacctgatggccctgcagggcacccagaaccccgccagccccctgcccagcttcgacgaggtggacagcggcgaccagccccccgccaccagcgtgcccgcccccagagccaagttcctgtaccccgccgtgcagagcagcgagaactacagaagaagaggcggcgacagagagcagggccccagacagcacaccgccaccgccctgctgcccctgaagggcggccccggcagccccacccccgccgccgccccccccgccgccgccgcccccggcctgcccgccgccctgctgagaagaagactgcagctgcacagcggccagcagctgtgccccgtgctgctgccccacgccgaggtgcaccagtgggccaccccccacatcgagggcatcgccggccacagcgccaccccccccgcctag

SEQ ID NO: 100481 - DNA, 20658 bp, synthetic construct
  misc_feature 1..20658: note = Description of Artificial Sequence: Synthetic coding sequence
  source 1..20658: mol_type = other DNA
atggccagcagccccgagctgcccaccgaggacgagcagggcagctggggcatcgacgacctgcacatcagcctgcaggccgagcaggaggacacccagaagaaggccttcacctgctggatcaacagccagctggccagacacaccagccccagcgtgatcagcgacctgttcaccgacatcaagaagggccacgtgctgctggacctgctggaggtgctgagcggccagcagctgcccagagacaagggcagcaacaccttccagtgcagaatcaacatcgagcacgccctgaccttcctgagaaacagaagcatcaagctgatcaacatccacgtgaccgacatcatcgacggcaaccccagcatcatcctgggcctgatctggaccatcatcctgcacttccacatcgagaagctggcccagaccctgagctgcaactacaaccagcccagcctggacgacgtgagcgtggtggacagcagccccgccagcagcccccccgccaagaagtgcagcaaggtgcaggccagatggcagatgagcgccagaaaggccctgctgctgtgggcccaggagcagtgcgccacctacgagagcgtgaacgtgaccgacttcaagagcagctggagaaacggcatggccttcctggccatcatccacgccctgagacccgacctgatcgacatgaagagcgtgaagcacagaagcaacaaggacaacctgagagaggccttcagaatcgccgagcaggagctgaagatccccagactgctggagcccgaggacgtggacgtggtggaccccgacgagaagagcatcatgacctacgtggcccagttcctgcagtacagcaaggacgcccccggcaccggcgaggaggcccagggcaaggtgaaggacgccatgggctggctgaccctgcagaaggagaagctgcagaagctgctgaaggacagcgagaacgacacctacttcaagaagtacaacagcctgctgagcttcatggagagcttcaacgaggagaagaagagcttcctggacgtgctgagcatcaagagagacctggacgagctggacaaggaccacctgcagctgagagaggcctgggacggcctggaccaccagatcaacgcctggaagatcaagctgaactacgccctgcccccccccctgcaccagaccgaggcctggctgcaggaggtggaggagctgatggacgaggacctgagcgccagccaggaccacagccaggccgtgaccctgatccaggagaagatgaccctgttcaagagcctgatggacagattcgagcaccacagcaacatcctgctgaccttcgagaacaaggacgagaaccacctgcccctggtgccccccaacaagctggaggagatgaagagaagaatcaacaacatcctggagaagaagttcatcctgctgctggagttccactactacaagtgcctggtgctgggcctggtggacgaggtgaagagcaagctggacatctggaacatcaagtacggcagcagagagagcgtggagctgctgctggaggactggcacaagttcatcgaggagaaggagttcctggccagactggacaccagcttccagaagtgcggcgagatctacaagaacctggccggcgagtgccagaacatcaacaagcagtacatgatggtgaagagcgacgtgtgcatgtacagaaagaacatctacaacgtgaagagcaccctgcagaaggtgctggcctgctgggccacctacgtggagaacctgagactgctgagagcctgcttcgaggagaccaagaaggaggagatcaaggaggtgcccttcgagaccctggcccagtggaacctggagcacgccaccctgaacgaggccggcaacttcctggtggaggtgagcaacgacgtggtgggcagcagcatcagcaaggagctgagaagactgaacaagagatggagaaagctggtgagcaagacccagctggagatgaacctgcccctgatgatcaagaagcaggaccagcccaccttcgacaacagcggcaacatcctgagcaaggaggagaaggccaccgtggagttcagcaccgacatgagcgtggagctgcccgagaactacaaccagaacatcaaggccggcgagaagcacgagaaggagaacgaggagttcaccggccagctgaaggtggccaaggacgtggagaagctgatcggccaggtggagatctgggaggccgaggccaagagcgtgctggaccaggacgacgtggacaccagcatggaggagagcctgaagcacctgatcgccaagggcagcatgttcgacgagctgatggccagaagcgaggacatgctgcagatggacatccagaacatcagcagccaggagagcttccagcacgtgctgaccaccggcctgcaggccaagatccaggaggccaaggagaaggtgcagatcaacgtggtgaagctgatcgccgccctgaagaacctgaccgacgtgagccccgacctggacatcagactgaagatggaggagagccagaaggagctggagagctacatgatgagagcccagcagctgctgggccagagagagagccccggcgagctgatcagcaagcacaaggaggccctgatcatcagcaacaccaagagcctggccaagtacctgaaggccgtggaggagctgaagaacaacgtgaccgaggacatcaagatgagcctggaggagaagagcagagacgtgtgcgccaagtgggagagcctgcaccacgagctgagcctgtacgtgcagcagctgaagatcgacatcgagaagggcaagctgagcgacaacatcctgaagctggagaagcagatcaacaaggagaagaagctgatcagaagaggcagaaccaagggcctgatcaaggagcacgaggcctgcttcagcgaggagggctgcctgtaccagctgaaccaccacatggaggtgctgagagagctgtgcgaggagctgcccagccagaagagccagcaggaggtgaagagactgctgaaggactacgagcagaagatcgagagactgctgaagtgcgccagcgagatccacatgaccctgcagcccaccgccggcggcaccagcaagaacgagggcaccatcaccaccagcgagaacagaggcggcgacccccacagcgaggcccccttcgccaagagcgacaaccagcccagcaccgagaaggccatggagcccaccatgaagttcagcctggccagcgtgctgagacccctgcaggaggagagcatcatggagaaggactacagcgccagcatcaacagcctgctggagagatacgacacctacagagacatcctggagcaccacctgcagaacaacaagttcagaatcaccagcgacttcagcagcgaggaggacagaagcagcagctgcctgcaggccaagctgaccgacctgcaggtgatcaagaacgagaccgacgccagatggaaggagttcgagatcatcagcctgaagctggagaaccacgtgaacgacatcaagaagcccttcgtgatcaaggagagagacaccctgaaggagagagagagagagctgcagatgaccctgaacaccagaatggagagcctggagaccgccctgagactggtgctgcccgtggagaaggccagcctgctgctgtgcggcagcgacctgcccctgcacaagatggccatccagggcttccacctgatcgacgccgacagaatctaccagcacctgagaaacatccaggacagcatcgccaagcagatcgagatctgcaacagactggaggagcccggcaacttcgtgctgaaggagctgcaccccttcgacctgcacgccatgcagaacatcatcctgaagtacaagacccagttcgagggcatgaaccacagagtgcagagaagcgaggacaccctgaaggccctggaggacttcctggccagcctgagaaccgccaagctgagcgccgagcccgtgaccgacctgagcgccagcgacacccaggtggcccaggagaacaccctgaccgtgaagaacaaggagggcgagatccacctgatgaaggacaaggccaagcacctggacaagtgcctgaagatgctggacatgagcttcaaggacgccgagagaggcgacgacaccagctgcgagaacctgctggacgccttcagcatcaagctgagcgagacccacggctacggcgtgcaggaggagttcaccgaggagaacaagctgctggaggcctgcatcttcaagaacaacgagctgctgaagaacatccaggacgtgcagagccagatcagcaagatcggcctgaaggaccccaccgtgcccgccgtgaagcacagaaagaagagcctgatcagactggacaaggtgctggacgagtacgaggaggagaagagacacctgcaggagatggccaacagcctgccccacttcaaggacggcagagagaagaccgtgaaccagcagtgccagaacaccgtggtgctgtgggagaacaccaaggccctggtgaccgagtgcctggagcagtgcggcagagtgctggagctgctgaagcagtaccagaacttcaagagcatcctgaccaccctgatccagaaggaggagagcgtgatcagcctgcaggccagctacatgggcaaggagaacctgaagaagagaatcgccgagatcgagatcgtgaaggaggagttcaacgagcacctggaggtggtggacaagatcaaccaggtgtgcaagaacctgcagttctacctgaacaagatgaagaccttcgaggagccccccttcgagaaggaggccaacatcatcgtggacagatggctggacatcaacgagaagaccgaggactactacgagaacctgggcagagccctggccctgtgggacaagctgttcaacctgaagaacgtgatcgacgagtggaccgagaaggccctgcagaagatggagctgcaccagctgaccgaggaggacagagagagactgaaggaggagctgcaggtgcacgagcagaagaccagcgagttcagcagaagagtggccgagatccagttcctgctgcagagcagcgagatccccctggagctgcaggtgatggagagcagcatcctgaacaagatggagcacgtgcagaagtgcctgaccggcgagagcaactgccacgccctgagcggcagcaccgccgagctgagagaggacctggaccaggccaagacccagatcggcatgaccgagagcctgctgaaggccctgagccccagcgacagcctggagatcttcaccaagctggaggagatccagcagcagatcctgcagcagaagcacagcatgatcctgctggagaaccagatcggctgcctgacccccgagctgagcgagctgaagaagcagtacgagagcgtgagcgacctgttcaacaccaagaagagcgtgctgcaggaccacttcagcaagctgctgaacgaccagtgcaagaacttcaacgactggttcagcaacatcaaggtgaacctgaaggagtgcttcgagagcagcgagaccaagaagagcgtggagcagaagctgcagaagctgagcgacttcctgaccctggagggcagaaacagcaagatcaagcaggtggacagcgtgctgaagcacgtgaagaagcacctgcccaaggcccacgtgaaggagctgatcagctggctggtgggccaggagttcgagctggagaagatggagagcatctgccaggccagagccaaggagctggaggacagcctgcagcagctgctgagactgcaggacgaccacagaaacctgagaaagtggctgaccaaccaggaggagaagtggaagggcatggaggagcccggcgagaagaccgagctgttctgccaggccctggccagaaagagagagcagttcgagagcgtggcccagctgaacaacagcctgaaggagtacggcttcaccgaggaggaggagatcatcatggaggccacctgcctgatggacagataccagaccctgctgagacagctgagcgagatcgaggaggaggacaagctgctgcccaccgaggaccagagcttcaacgacctggcccacgacgtgatccactggatcaaggagatcaaggagagcctgatggtgctgaacagcagcgagggcaagatgcccctggaggagagaatccagaagatcaaggagatcatcctgctgaagcccgagggcgacgccagaatcgagaccatcatgaagcaggccgagagcagcgaggcccccctggtgcagaagaccctgaccgacatcagcaaccagtgggacaacaccctgcacctggccagcacctacctgagccaccaggagaagctgctgctggagggcgagaagtacctgcagagcaaggaggacctgagactgatgctgatcgagctgaagaagaagcaggaggccggcttcgccctgcagcacggcctgcaggagaagaaggcccagctgaagatctacaagaagttcctgaagaaggcccaggacctgaccagcctgctgaaggagctgaagagccagggcaactacctgctggagtgcaccaagaaccccagcttcagcgaggagccctggctggagatcaagcacctgcacgagagcctgctgcagcagctgcaggacagcgtgcagaacctggacggccacgtgagagagcacgacagctaccaggtgtgcgtgaccgacctgaacaccaccctggacaacttcagcaaggagttcgtgagcttcagcgacaagcccgtggaccagatcgccgtggaggagaagctgcagaagctgcaggagctggagaacagactgagcctgcaggacggcaccctgaagaagatcctggccctggccaagagcgtgaagcagaacaccagcagcgtgggccagaagatcatcaaggacgacatcaagagcctgcagtgcaagcagaaggacctggagaacagactggccagcgccaagcaggagatggagtgctgcctgaacagcatcctgaagagcaagagaagcaccgagaagaagggcaagttcaccctgcccggcagagagaagcaggccaccagcgacgtgcaggagagcacccaggagagcgccgccgtggagaagctggaggaggactgggagatcaacaaggacagcgccgtggagatggccatgagcaagcagctgagcctgaacgcccaggagagcatgaagaacaccgaggacgagagaaaggtgaacgagctgcagaaccagcccctggagctggacaccatgctgagaaacgagcagctggaggagatcgagaagctgtacacccagctggaggccaagaaggccgccatcaagcccctggagcagaccgagtgcctgaacaagaccgagaccggcgccctggtgctgcacaacatcggctacagcgcccagcacctggacaacctgctgcaggccctgatcaccctgaagaagaacaaggagagccagtactgcgtgctgagagacttccaggagtacctggccgccgtggagagcagcatgaaggccctgctgaccgacaaggagagcctgaaggtgggccccctggacagcgtgacctacctggacaagatcaagaagttcatcgccagcatcgagaaggagaaggacagcctgggcaacctgaagatcaagtgggagaacctgagcaaccacgtgaccgacatggacaagaagctgctggagagccagatcaagcagctggagcacggctgggagcaggtggagcagcagatccagaagaagtacagccagcaggtggtggagtacgacgagttcaccaccctgatgaacaaggtgcaggacaccgagatcagcctgcagcagcagcagcagcacctgcagctgagactgaagagccccgaggagagagccggcaaccagagcatgatcgccctgaccaccgacctgcaggccaccaagcacggcttcagcgtgctgaagggccaggccgagctgcagatgaagagaatctggggcgagaaggagaagaagaacctggaggacggcatcaacaacctgaagaagcagtgggagaccctggagcccctgcacctggaggccgagaaccagatcaagaagtgcgacatcagaaacaagatgaaggagaccatcctgtgggccaagaacctgctgggcgagctgaaccccagcatccccctgctgcccgacgacatcctgagccagatcagaaagtgcaaggtgacccacgacggcatcctggccagacagcagagcgtggagagcctggccgaggaggtgaaggacaaggtgcccagcctgaccacctacgagggcagcgacctgaacaacaccctggaggacctgagaaaccagtaccagatgctggtgctgaagagcacccagagaagccagcagctggagttcaagctggaggagagaagcaacttcttcgccatcatcagaaagttccagctgatggtgcaggagagcgagaccctgatcatccccagagtggagaccgccgccaccgaggccgagctgaagcaccaccacgtgaccctggaggccagccagaaggagctgcaggagatcgacagcggcatcagcacccacctgcaggagctgaccaacatctacgaggagctgaacgtgttcgagagactgttcctggaggaccagctgaagaacctgaagatcagaaccaacagaatccagagattcatccagaacacctgcaacgaggtggagcacaagatcaagttctgcagacagttccacgagaagaccagcgccctgcaggaggaggccgacagcatccagagaaacgagctgctgctgaaccaggaggtgaacaagggcgtgaaggaggagatctacaacctgaaggacagactgaccgccatcaagtgctgcatcctgcaggtgctgaagctgaagaaggtgttcgactacatcggcctgaactgggacttcagccagctggaccagctgcagacccaggtgttcgagaaggagaaggagctggaggagaagatcaagcagctggacaccttcgaggaggagcacggcaagtaccaggccctgctgagcaagatgagagccatcgacctgcagatcaagaagatgaccgaggtggtgctgaaggcccccgacagcagccccgagagcagaagactgaacgcccagatcctgagccagagaatcgagaaggccaagtgcctgtgcgacgagatcatcaagaagctgaacgagaacaagaccttcgacgacagcttcaaggagaaggagatcctgcagatcaagctgaacgccgaggagaacgacaagctgtacaaggtgctgcagaacatggtgctggagctgagccccaaggagctggacgagaagaactgccaggacaagctggagaccagcctgcacgtgctgaaccagatcaagagccagctgcagcagcccctgctgatcaacctggagatcaagcacatccagaacgagaaggacaactgcgaggccttccaggagcaggtgtgggccgagatgtgcagcatcaaggccgtgaccgccatcgagaagcagagagaggagaacagcagcgaggccagcgacgtggagaccaagctgagagagttcgaggacctgcagatgcagctgaacaccagcatcgacctgagaaccaacgtgctgaacgacgcctacgagaacctgaccagatacaaggaggccgtgaccagagccgtggagagcatcaccagcctggaggccatcatcatcccctacagagtggacgtgggcaaccccgaggagagcctggagatgcccctgagaaagcaggaggagctggagagcaccgtggcccacatccaggacctgaccgagaagctgggcatgatcagcagccccgaggccaagctgcagctgcagtacaccctgcaggagctggtgagcaagaacagcgccatgaaggaggccttcaaggcccaggagaccgaggccgagagatacctggagaactacaagtgctacagaaagatggaggaggacatctacaccaacctgagcaagatggagaccgtgctgggccagagcatgagcagcctgcccctgagctacagagaggccctggagagactggagcagagcaaggccctggtgagcaacctgatcagcaccaaggaggagctgatgaagctgagacagatcctgagactgctgagactgagatgcaccgagaacgacggcatctgcctgctgaagatcgtgagcgccctgtgggagaagtggctgagcctgctggaggccgccaaggagtgggagatgtggtgcgaggagctgaagcaggagtggaagttcgtgagcgaggagatcgagagagaggccatcatcctggacaacctgcaggaggagctgcccgagatcagcaagaccaaggaggccgccaccaccgaggagctgagcgagctgctggactgcctgtgccagtacggcgagaacgtggagaagcagcagctgctgctgaccctgctgctgcagagaatcagaagcatccagaacgtgcccgagagcagcggcgccgtggagaccgtgcccgccttccaggagatcaccagcatgaaggagagatgcaacaagctgctgcagaaggtgcagaagaacaaggagctggtgcagaccgagatccaggagagacacagcttcaccaaggagatcatcgccctgaagaacttcttccagcagaccaccaccagcttccagaacatggccttccaggaccaccccgagaagagcgagcagttcgaggagctgcagagcatcctgaagaagggcaagctgaccttcgagaacatcatggagaagctgagaatcaagtacagcgagatgtacaccatcgtgcccgccgagatcgagagccaggtggaggagtgcagaaaggccctggaggacatcgacgagaagatcagcaacgaggtgctgaagagcagccccagctacgccatgagaagaaagatcgaggagatcaacaacggcctgcacaacgtggagaagatgctgcagcagaagagcaagaacatcgagaaggcccaggagatccagaagaagatgtgggacgagctggacctgtggcacagcaagctgaacgagctggacagcgaggtgcaggacatcgtggagcaggaccccggccaggcccaggagtggatggacaacctgatgatccccttccagcagtaccagcaggtgagccagagagccgagtgcagaaccagccagctgaacaaggccaccgtgaagatggaggagtacagcgacctgctgaagagcaccgaggcctggatcgagaacaccagccacctgctggccaaccccgccgactacgacagcctgagaaccctgagccaccacgccagcaccgtgcagatggccctggaggacagcgagcagaagcacaacctgctgcacagcatcttcatggacctggaggacctgagcatcatcttcgagaccgacgagctgacccagagcatccaggagctgagcaaccaggtgaccgccctgcagcagaagatcatggagagcctgccccagatccagagaatggccgacgacgtggtggccatcgagagcgaggtgaagagcatggagaagagagtgagcaagatcaagaccatcctgctgagcaaggagatcttcgacttcagccccgaggagcacctgaagcacggcgaggtgatcctggagaacatcagacccatgaagaagaccatcgccgagatcgtgagctaccaggtggagctgagactgccccagaccggcatgaagcccctgcccgtgttccagagaaccaaccagctgctgcaggacatcaagctgctggagaacgtgacccaggagcagaacgagctgctgaaggtggtgatcaagcagaccaacgagtgggacgaggagatcgagaacctgaagcagatcctgaacaactacagcgcccagttcagcctggagcacatgagccccgaccaggccgacaagctgccccagctgcagggcgagatcgagagaatggagaagcagatcctgagcctgaaccagagaaaggaggacctgctggtggacctgaaggccaccgtgctgaacctgcaccagcacctgaagcaggagcaggagggcgtggagagagacagactgcccgccgtgaccagcgaggagggcggcgtggccgagagagacgccagcgagagaaagctgaacagaagaggcagcatgagctacctggccgccgtggaggaggaggtggaggagagcagcgtgaagagcgacaacggcgacgagaaggccgagcccagcccccagagctggagcagcctgtggaagcacgacaaggacatggaggaggacagagccagcagcagcagcggcaccatcgtgcaggaggcctacggcaagatcagcaccagcgacaacagcatggcccagatcctgacccccgacagcctgaacaccgagcagggccccgagtgcagcctgagacccaaccagaccgaggagggcaccaccccccccatcgaggccgacaccctggacagcagcgacgcccagggcggcctggagcccagagtggagaagaccagacccgagcccaccgaggtgctgcacgcctgcaagacccaggtggccgagctggagctgtggctgcagcaggccaacgtggccgtggagcccgagaccctgaacgccgacatgcagcaggtgctggagcagcagctggtgggctgccaggccatgctgaccgagatcgagcacaaggtggccttcctgctggagacctgcaaggaccagggcctgggcgacaacggcgccacccagcacgaggccgaggccctgagcctgaagctgaagaccgtgaagtgcaacctggagaaggtgcagatgatgctgcaggagaagcacagcgaggaccagcaccccaccatcctgaagaagagcagcgagcccgagcaccaggaggccctgcagcccgtgaacctgagcgagctggagagcatcgtgaccgagagaccccagttcagcagacagaaggacttccagcagcagcaggtgctggagctgaagcccatggagcagaaggacttcatcaagttcatcgagttcaacgccaagaagatgtggccccagtactgccagcacgacaacgacaccacccaggagagcagcgccagcaaccaggccagcagccccgagaacgacgtgcccgacagcatcctgagcccccagggccagaacggcgacaagtggcagtacctgcaccacgagctgagcagcaagatcaagctgcccctgccccagctggtggagccccaggtgagcaccaacatgggcatcctgcccagcgtgaccatgtacaacttcagataccccaccaccgaggagctgaagacctacaccacccagctggaggacctgagacaggaggccagcaacctgcagacccaggagaacatgaccgaggaggcctacatcaacctggacaagaagctgttcgagctgttcctgaccctgagccagtgcctgagcagcgtggaggagatgctggagatgcccagactgtacagagaggacggcagcggccagcaggtgcactacgagaccctggccctggagctgaagaagctgtacctggccctgagcgacaagaagggcgacctgctgaaggccatgacctggcccggcgagaacaccaacctgctgctggagtgcttcgacaacctgcaggtgtgcctggagcacacccaggccgccgccgtgtgcagaagcaagagcctgaaggccggcctggactacaacagaagctaccagaacgagatcaagagactgtaccaccagctgatcaagagcaagaccagcctgcagcagagcctgaacgagatcagcggccagagcgtggccgagcagctgcagaaggccgacgcctacaccgtggagctggagaacgccgagagcagagtggccaagctgagagacgagggcgagagactgcacctgccctacgccctgctgcaggaggtgtacaagctggaggacgtgctggacagcatgtggggcatgctgagagccagatacaccgagctgagcagccccttcgtgaccgagagccagcaggacgccctgctgcagggcatggtggagctggtgaagatcggcaaggagaagctggcccacggccacctgaagcagaccaagagcaaggtggccctgcaggcccagatcgagaaccacaaggtgttcttccagaagctggtggccgacatgctgctgatccaggcctacagcgccaagatcctgcccagcctgctgcagaacagagagaccttctgggccgagcaggtgaccgaggtgaagatcctggaggagaagagcagacagtgcggcatgaagctgcagagcctgctgcagaagtgggaggagttcgacgagaactacgccagcctggagaaggacctggagatcctgatcagcaccctgcccagcgtgagcctggtggaggagaccgaggagagactggtggagagaatcagcttctaccagcagatcaagagaaacatcggcggcaagcacgccagactgtaccagaccctgaacgagggcaagcagctggtggccagcgtgagctgccccgagctggagggccagatcgccaagctggaggagcagtggctgagcctgaacaagaagatcgaccacgagctgcacagactgcaggccctgctgaagcacctgctgagctacaacagagacagcgaccagctgaccaagtggctggagagcagccagcacaccctgaactactggaaggagcagagcctgaacgtgagccaggacctggacaccatcagaagcaacatcaacaacttcttcgagttcagcaaggaggtggacgagaagagcagcctgaagaccgccgtgatcagcatcggcaaccagctgctgcacctgaaggagaccgacaccgccaccctgagagccagcctggcccagttcgagcagaagtggaccatgctgatcacccagctgcccgacatccaggagaagctgcaccagctgcagatggagaagctgcccagcagaaaggccatcaccgagatgatcagctggatgaacaacgtggagcaccagaccagcgacgaggacagcgtgcacagccccagcagcgccagccaggtgaagcacctgctgcagaagcacaaggagttcagaatggagatggactacaagcagtggatcgtggacttcgtgaaccagagcctgctgcagctgagcacctgcgacgtggagagcaagagatacgagagaaccgagttcgccgagcacctgggcgagatgaacagacagtggcacagagtgcacggcatgctgaacagaaagatccagcacctggagcagctgctggagagcatcaccgagagcgagaacaagatccagatcctgaacaactggctggaggcccaggaggagagactgaagaccctgcagaagcccgagagcgtgatcagcgtgcagaagctgctgctggactgccaggacatcgagaaccagctggccatcaagagcaaggccctggacgagctgaagcagagctacctgaccctggagagcggcgccgtgcccctgctggaggacaccgccagcagaatcgacgagctgttccagaagagaagcagcgtgctgacccaggtgaaccagctgaagaccagcatgcagagcgtgctgcaggagtggaagatctacgaccagctgtacgacgaggtgaacatgatgaccatcagattctggtactgcatggagcacagcaagcccgtggtgctgagcctggagaccctgagatgccaggtggagaacctgcagagcctgcaggacgaggccgagagcagcgagggcagctgggagaagctgcaggaggtgatcggcaagctgaagggcctgtgccccagcgtggccgagatcatcgaggagaagtgccagaacacccacaagagatggacccaggtgaaccaggccatcgccgaccagctgcagaaggcccagagcctgctgcagctgtggaaggcctacagcaacgcccacggcgaggccgccgccagactgaagcagcaggaggccaagttccagcagctggccaacatcagcatgagcggcaacaacctggccgagatcctgccccccgccctgcaggacatcaaggagctgcagcacgacgtgcagaagaccaaggaggccttcctgcagaacagcagcgtgctggacagactgccccagcccgccgagagcagcacccacatgctgctgcccggccccctgcacagcctgcagagagccgcctacctggagaagatgctgctggtgaaggccaacgagttcgagttcgtgctgagccagttcaaggacttcggcgtgagactggagagcctgaagggcctgatcatgcacgaggaggagaacctggacagactgcaccagcaggagaaggagaaccccgacagcttcctgaaccacgtgctggccctgaccgcccagagccccgacatcgagcacctgaacgaggtgagcctgaagctgcccctgagcgacgtggccgtgaagaccctgcagaacatgaacagacagtggatcagagccaccgccaccgccctggagagatgcagcgagctgcagggcatcggcctgaacgagaagttcctgtactgctgcgagaagtggatccagctgctggagaagatcgaggaggccctgaaggtggacgtggccaacagcctgcccgagctgctggagcagcagaagacctacaagatgctggaggccgaggtgagcatcaaccagaccatcgccgacagctacgtgacccagagcctgcagctgctggacaccaccgagatcgagaacagacccgagttcatcaccgagttcagcaagctgaccgacagatggcagaacgccgtgcagggcgtgagacagagaaagggcgacgtggacggcctggtgagacagtggcaggacttcaccaccagcgtggagaacctgttcagattcctgaccgacaccagccacctgctgagcgccgtgaagggccaggagagattcagcctgtaccagaccagaagcctgatccacgagctgaagaacaaggagatccacttccagagaagaagaaccacctgcgccctgaccctggaggccggcgagaagctgctgctgaccaccgacctgaagaccaaggagagcgtgggcagaagaatcagccagctgcaggacagctggaaggacatggagccccagctggccgagatgatcaagcagttccagagcaccgtggagacctgggaccagtgcgagaagaagatcaaggagctgaagagcagactgcaggtgctgaaggcccagagcgaggaccccctgcccgagctgcacgaggacctgcacaacgagaaggagctgatcaaggagctggagcagagcctggccagctggacccagaacctgaaggagctgcagaccatgaaggccgacctgaccagacacgtgctggtggaggacgtgatggtgctgaaggagcagatcgagcacctgcacagacagtgggaggacctgtgcctgagagtggccatcagaaagcaggagatcgaggacagactgaacacctgggtggtgttcaacgagaagaacaaggagctgtgcgcctggctggtgcagatggagaacaaggtgctgcagaccgccgacatcagcatcgaggagatgatcgagaagctgcagaaggactgcatggaggagatcaacctgttcagcgagaacaagctgcagctgaagcagatgggcgaccagctgatcaaggccagcaacaagagcagagccgccgagatcgacgacaagctgaacaagatcaacgacagatggcagcacctgttcgacgtgatcggcagcagagtgaagaagctgaaggagaccttcgccttcatccagcagctggacaagaacatgagcaacctgagaacctggctggccagaatcgagagcgagctgagcaagcccgtggtgtacgacgtgtgcgacgaccaggagatccagaagagactggccgagcagcaggacctgcagagagacatcgagcagcacagcgccggcgtggagagcgtgttcaacatctgcgacgtgctgctgcacgacagcgacgcctgcgccaacgagaccgagtgcgacagcatccagcagaccaccagaagcctggacagaagatggagaaacatctgcgccatgagcatggagagaagaatgaagatcgaggagacctggagactgtggcagaagttcctggacgactacagcagattcgaggactggctgaagagcgccgagagaaccgccgcctgccccaacagcagcgaggtgctgtacaccagcgccaaggaggagctgaagagattcgaggccttccagagacagatccacgagagactgacccagctggagctgatcaacaagcagtacagaagactggccagagagaacagaaccgacaccgccagcagactgaagcagatggtgcacgagggcaaccagagatgggacaacctgcagagaagagtgaccgccgtgctgagaagactgagacacttcaccaaccagagagaggagttcgagggcaccagagagagcatcctggtgtggctgaccgagatggacctgcagctgaccaacgtggagcacttcagcgagagcgacgccgacgacaagatgagacagctgaacggcttccagcaggagatcaccctgaacaccaacaagatcgaccagctgatcgtgttcggcgagcagctgatccagaagagcgagcccctggacgccgtgctgatcgaggacgagctggaggagctgcacagatactgccaggaggtgttcggcagagtgagcagattccacagaagactgaccagctgcacccccggcctggaggacgagaaggaggccagcgagaacgagaccgacatggaggaccccagagagatccagaccgacagctggagaaagagaggcgagagcgaggagcccagcagcccccagagcctgtgccacctggtggcccccggccacgagagaagcggctgcgagacccccgtgagcgtggacagcatccccctggagtgggaccacaccggcgacgtgggcggcagcagcagccacgaggaggacgaggagggcccctactacagcgccctgagcggcaagagcatcagcgacggccacagctggcacgtgcccgacagccccagctgccccgagcaccactacaagcagatggagggcgacagaaacgtgccccccgtgccccccgccagcagcaccccctacaagcccccctacggcaagctgctgctgccccccggcaccgacggcggcaaggagggccccagagtgctgaacggcaacccccagcaggaggacggcggcctggccggcatcaccgagcagcagagcggcgccttcgacagatgggagatgatccaggcccaggagctgcacaacaagctgaagatcaagcagaacctgcagcagctgaacagcgacatcagcgccatcaccacctggctgaagaagaccgaggccgagctggagatgctgaagatggccaagccccccagcgacatccaggagatcgagctgagagtgaagagactgcaggagatcctgaaggccttcgacacctacaaggccctggtggtgagcgtgaacgtgagcagcaaggagttcctgcagaccgagagccccgagagcaccgagctgcagagcagactgagacagctgagcctgctgtgggaggccgcccagggcgccgtggacagctggagaggcggcctgagacagagcctgatgcagtgccaggacttccaccagctgagccagaacctgctgctgtggctggccagcgccaagaacagaagacagaaggcccacgtgaccgaccccaaggccgaccccagagccctgctggagtgcagaagagagctgatgcagctggagaaggagctggtggagagacagccccaggtggacatgctgcaggagatcagcaacagcctgctgatcaagggccacggcgaggactgcatcgaggccgaggagaaggtgcacgtgatcgagaagaagctgaagcagctgagagagcaggtgagccaggacctgatggccctgcagggcacccagaaccccgccagccccctgcccagcttcgacgaggtggacagcggcgaccagccccccgccaccagcgtgcccgcccccagagccaagcagttcagagccgtgagaaccaccgagggcgaggaggagaccgagagcagagtgcccggcagcaccagaccccagagaagcttcctgagcagagtggtgagagccgccctgcccctgcagctgctgctgctgctgctgctgctgctggcctgcctgctgcccagcagcgaggaggactacagctgcacccaggccaacaacttcgccagaagcttctaccccatgctgagatacaccaacggccccccccccacctag

SEQ ID NO: 100482 - DNA, 804 bp, synthetic construct
  misc_feature 1..804: note = Description of Artificial Sequence: Synthetic coding sequence
  source 1..804: mol_type = other DNA
atggccagcagccccgagctgcccaccgaggacgagcagggcagctggggcatcgacgacctgcacatcagcctgcaggccgagcaggaggacacccagaagaaggccttcacctgctggatcaacagccagctggccagacacaccagccccagcgtgatcagcgacctgttcaccgacatcaagaagggccacgtgctgctggacctgctggaggtgctgagcggccagcagctgcccagagacaagggcagcaacaccttccagtgcagaatcaacatcgagcacgccctgaccttcctgagaaacagaagcatcaagctgatcaacatccacgtgaccgacatcatcgacggcaaccccagcatcatcctgggcctgatctggaccatcatcctgcacttccacatcgagaagctggcccagaccctgagctgcaactacaaccagcccagcctggacgacgtgagcgtggtggacagcagccccgccagcagcccccccgccaagaagtgcagcaaggtgcaggccagatggcagatgagcgccagaaaggccctgctgctgtgggcccaggagcagtgcgccacctacgagagcgtgaacgtgaccgacttcaagagcagctggagaaacggcatggccttcctggccatcatccacgccctgagacccgacctgatcgacatgaagagcgtgaagcacagaagcaacaaggacaacctgagagaggccttcagaatcgccgagcaggagctgaagatccccagactgctggagcccgaggcctacaagaacttctag

SEQ ID NO: 100483 - DNA, 9813 bp, synthetic construct
  misc_feature 1..9813: note = Description of Artificial Sequence: Synthetic coding sequence
  source 1..9813: mol_type = other DNA
atggagaagctgagaatcaagtacagcgagatgtacaccatcgtgcccgccgagatcgagagccaggtggaggagtgcagaaaggccctggaggacatcgacgagaagatcagcaacgaggtgctgaagagcagccccagctacgccatgagaagaaagatcgaggagatcaacaacggcctgcacaacgtggagaagatgctgcagcagaagagcaagaacatcgagaaggcccaggagatccagaagaagatgtgggacgagctggacctgtggcacagcaagctgaacgagctggacagcgaggtgcaggacatcgtggagcaggaccccggccaggcccaggagtggatggacaacctgatgatccccttccagcagtaccagcaggtgagccagagagccgagtgcagaaccagccagctgaacaaggccaccgtgaagatggaggagtacagcgacctgctgaagagcaccgaggcctggatcgagaacaccagccacctgctggccaaccccgccgactacgacagcctgagaaccctgagccaccacgccagcaccgtgcaggacagcaagtgcttcagaagcggccccagacccaacatctacgtgagctactacgtgaccgtgatccagatggccctggaggacagcgagcagaagcacaacctgctgcacagcatcttcatggacctggaggacctgagcatcatcttcgagaccgacgagctgacccagagcatccaggagctgagcaaccaggtgaccgccctgcagcagaagatcatggagagcctgccccagatccagagaatggccgacgacgtggtggccatcgagagcgaggtgaagagcatggagaagagagtgagcaagatcaagaccatcctgctgagcaaggagatcttcgacttcagccccgaggagcacctgaagcacggcgaggtgatcctggagaacatcagacccatgaagaagaccatcgccgagatcgtgagctaccaggtggagctgagactgccccagaccggcatgaagcccctgcccgtgttccagagaaccaaccagctgctgcaggacatcaagctgctggagaacgtgacccaggagcagaacgagctgctgaaggtggtgatcaagcagaccaacgagtgggacgaggagatcgagaacctgaagcagatcctgaacaactacagcgcccagttcagcctggagcacatgagccccgaccaggccgacaagctgccccagctgcagggcgagatcgagagaatggagaagcagatcctgagcctgaaccagagaaaggaggacctgctggtggacctgaaggccaccgtgctgaacctgcaccagcacctgaagcaggagcaggagggcgtggagagagacagactgcccgccgtgaccagcgaggagggcggcgtggccgagagagacgccagcgagagaaagctgaacagaagaggcagcatgagctacctggccgccgtggaggaggaggtggaggagagcagcgtgaagagcgacaacggcgacgagaaggccgagcccagcccccagagctggagcagcctgtggaagcacgacaaggacatggaggaggacagagccagcagcagcagcggcaccatcgtgcaggaggcctacggcaagatcagcaccagcgacaacagcatggcccagatcctgacccccgacagcctgaacaccgagcagggccccgagtgcagcctgagacccaaccagaccgaggagggcaccaccccccccatcgaggccgacaccctggacagcagcgacgcccagggcggcctggagcccagagtggagaagaccagacccgagcccaccgaggtgctgcacgcctgcaagacccaggtggccgagctggagctgtggctgcagcaggccaacgtggccgtggagcccgagaccctgaacgccgacatgcagcaggtgctggagcagcagctggtgggctgccaggccatgctgaccgagatcgagcacaaggtggccttcctgctggagacctgcaaggaccagggcctgggcgacaacggcgccacccagcacgaggccgaggccctgagcctgaagctgaagaccgtgaagtgcaacctggagaaggtgcagatgatgctgcaggagaagcacagcgaggaccagcaccccaccatcctgaagaagagcagcgagcccgagcaccaggaggccctgcagcccgtgaacctgagcgagctggagagcatcgtgaccgagagaccccagttcagcagacagaaggacttccagcagcagcaggtgctggagctgaagcccatggagcagaaggacttcatcaagttcatcgagttcaacgccaagaagatgtggccccagtactgccagcacgacaacgacaccacccaggagagcagcgccagcaaccaggccagcagccccgagaacgacgtgcccgacagcatcctgagcccccagggccagaacggcgacaagtggcagtacctgcaccacgagctgagcagcaagatcaagctgcccctgccccagctggtggagccccaggtgagcaccaacatgggcatcctgcccagcgtgaccatgtacaacttcagataccccaccaccgaggagctgaagacctacaccacccagctggaggacctgagacaggaggccagcaacctgcagacccaggagaacatgaccgaggaggcctacatcaacctggacaagaagctgttcgagctgttcctgaccctgagccagtgcctgagcagcgtggaggagatgctggagatgcccagactgtacagagaggacggcagcggccagcaggtgcactacgagaccctggccctggagctgaagaagctgtacctggccctgagcgacaagaagggcgacctgctgaaggccatgacctggcccggcgagaacaccaacctgctgctggagtgcttcgacaacctgcaggtgtgcctggagcacacccaggccgccgccgtgtgcagaagcaagagcctgaaggccggcctggactacaacagaagctaccagaacgagatcaagagactgtaccaccagctgatcaagagcaagaccagcctgcagcagagcctgaacgagatcagcggccagagcgtggccgagcagctgcagaaggccgacgcctacaccgtggagctggagaacgccgagagcagagtggccaagctgagagacgagggcgagagactgcacctgccctacgccctgctgcaggaggtgtacaagctggaggacgtgctggacagcatgtggggcatgctgagagccagatacaccgagctgagcagccccttcgtgaccgagagccagcaggacgccctgctgcagggcatggtggagctggtgaagatcggcaaggagaagctggcccacggccacctgaagcagaccaagagcaaggtggccctgcaggcccagatcgagaaccacaaggtgttcttccagaagctggtggccgacatgctgctgatccaggcctacagcgccaagatcctgcccagcctgctgcagaacagagagaccttctgggccgagcaggtgaccgaggtgaagatcctggaggagaagagcagacagtgcggcatgaagctgcagagcctgctgcagaagtgggaggagttcgacgagaactacgccagcctggagaaggacctggagatcctgatcagcaccctgcccagcgtgagcctggtggaggagaccgaggagagactggtggagagaatcagcttctaccagcagatcaagagaaacatcggcggcaagcacgccagactgtaccagaccctgaacgagggcaagcagctggtggccagcgtgagctgccccgagctggagggccagatcgccaagctggaggagcagtggctgagcctgaacaagaagatcgaccacgagctgcacagactgcaggccctgctgaagcacctgctgagctacaacagagacagcgaccagctgaccaagtggctggagagcagccagcacaccctgaactactggaaggagcagagcctgaacgtgagccaggacctggacaccatcagaagcaacatcaacaacttcttcgagttcagcaaggaggtggacgagaagagcagcctgaagaccgccgtgatcagcatcggcaaccagctgctgcacctgaaggagaccgacaccgccaccctgagagccagcctggcccagttcgagcagaagtggaccatgctgatcacccagctgcccgacatccaggagaagctgcaccagctgcagatggagaagctgcccagcagaaaggccatcaccgagatgatcagctggatgaacaacgtggagcaccagaccagcgacgaggacagcgtgcacagccccagcagcgccagccaggtgaagcacctgctgcagaagcacaaggagttcagaatggagatggactacaagcagtggatcgtggacttcgtgaaccagagcctgctgcagctgagcacctgcgacgtggagagcaagagatacgagagaaccgagttcgccgagcacctgggcgagatgaacagacagtggcacagagtgcacggcatgctgaacagaaagatccagcacctggagcagctgctggagagcatcaccgagagcgagaacaagatccagatcctgaacaactggctggaggcccaggaggagagactgaagaccctgcagaagcccgagagcgtgatcagcgtgcagaagctgctgctggactgccaggacatcgagaaccagctggccatcaagagcaaggccctggacgagctgaagcagagctacctgaccctggagagcggcgccgtgcccctgctggaggacaccgccagcagaatcgacgagctgttccagaagagaagcagcgtgctgacccaggtgaaccagctgaagaccagcatgcagagcgtgctgcaggagtggaagatctacgaccagctgtacgacgaggtgaacatgatgaccatcagattctggtactgcatggagcacagcaagcccgtggtgctgagcctggagaccctgagatgccaggtggagaacctgcagagcctgcaggacgaggccgagagcagcgagggcagctgggagaagctgcaggaggtgatcggcaagctgaagggcctgtgccccagcgtggccgagatcatcgaggagaagtgccagaacacccacaagagatggacccaggtgaaccaggccatcgccgaccagctgcagaaggcccagagcctgctgcagctgtggaaggcctacagcaacgcccacggcgaggccgccgccagactgaagcagcaggaggccaagttccagcagctggccaacatcagcatgagcggcaacaacctggccgagatcctgccccccgccctgcaggacatcaaggagctgcagcacgacgtgcagaagaccaaggaggccttcctgcagaacagcagcgtgctggacagactgccccagcccgccgagagcagcacccacatgctgctgcccggccccctgcacagcctgcagagagccgcctacctggagaagatgctgctggtgaaggccaacgagttcgagttcgtgctgagccagttcaaggacttcggcgtgagactggagagcctgaagggcctgatcatgcacgaggaggagaacctggacagactgcaccagcaggagaaggagaaccccgacagcttcctgaaccacgtgctggccctgaccgcccagagccccgacatcgagcacctgaacgaggtgagcctgaagctgcccctgagcgacgtggccgtgaagaccctgcagaacatgaacagacagtggatcagagccaccgccaccgccctggagagatgcagcgagctgcagggcatcggcctgaacgagaagttcctgtactgctgcgagaagtggatccagctgctggagaagatcgaggaggccctgaaggtggacgtggccaacagcctgcccgagctgctggagcagcagaagacctacaagatgctggaggccgaggtgagcatcaaccagaccatcgccgacagctacgtgacccagagcctgcagctgctggacaccaccgagatcgagaacagacccgagttcatcaccgagttcagcaagctgaccgacagatggcagaacgccgtgcagggcgtgagacagagaaagggcgacgtggacggcctggtgagacagtggcaggacttcaccaccagcgtggagaacctgttcagattcctgaccgacaccagccacctgctgagcgccgtgaagggccaggagagattcagcctgtaccagaccagaagcctgatccacgagctgaagaacaaggagatccacttccagagaagaagaaccacctgcgccctgaccctggaggccggcgagaagctgctgctgaccaccgacctgaagaccaaggagagcgtgggcagaagaatcagccagctgcaggacagctggaaggacatggagccccagctggccgagatgatcaagcagttccagagcaccgtggagacctgggaccagtgcgagaagaagatcaaggagctgaagagcagactgcaggtgctgaaggcccagagcgaggaccccctgcccgagctgcacgaggacctgcacaacgagaaggagctgatcaaggagctggagcagagcctggccagctggacccagaacctgaaggagctgcagaccatgaaggccgacctgaccagacacgtgctggtggaggacgtgatggtgctgaaggagcagatcgagcacctgcacagacagtgggaggacctgtgcctgagagtggccatcagaaagcaggagatcgaggacagactgaacacctgggtggtgttcaacgagaagaacaaggagctgtgcgcctggctggtgcagatggagaacaaggtgctgcagaccgccgacatcagcatcgaggagatgatcgagaagctgcagaaggactgcatggaggagatcaacctgttcagcgagaacaagctgcagctgaagcagatgggcgaccagctgatcaaggccagcaacaagagcagagccgccgagatcgacgacaagctgaacaagatcaacgacagatggcagcacctgttcgacgtgatcggcagcagagtgaagaagctgaaggagaccttcgccttcatccagcagctggacaagaacatgagcaacctgagaacctggctggccagaatcgagagcgagctgagcaagcccgtggtgtacgacgtgtgcgacgaccaggagatccagaagagactggccgagcagcaggacctgcagagagacatcgagcagcacagcgccggcgtggagagcgtgttcaacatctgcgacgtgctgctgcacgacagcgacgcctgcgccaacgagaccgagtgcgacagcatccagcagaccaccagaagcctggacagaagatggagaaacatctgcgccatgagcatggagagaagaatgaagatcgaggagacctggagactgtggcagaagttcctggacgactacagcagattcgaggactggctgaagagcgccgagagaaccgccgcctgccccaacagcagcgaggtgctgtacaccagcgccaaggaggagctgaagagattcgaggccttccagagacagatccacgagagactgacccagctggagctgatcaacaagcagtacagaagactggccagagagaacagaaccgacaccgccagcagactgaagcagatggtgcacgagggcaaccagagatgggacaacctgcagagaagagtgaccgccgtgctgagaagactgagacacttcaccaaccagagagaggagttcgagggcaccagagagagcatcctggtgtggctgaccgagatggacctgcagctgaccaacgtggagcacttcagcgagagcgacgccgacgacaagatgagacagctgaacggcttccagcaggagatcaccctgaacaccaacaagatcgaccagctgatcgtgttcggcgagcagctgatccagaagagcgagcccctggacgccgtgctgatcgaggacgagctggaggagctgcacagatactgccaggaggtgttcggcagagtgagcagattccacagaagactgaccagctgcacccccggcctggaggacgagaaggaggccagcgagaacgagaccgacatggaggaccccagagagatccagaccgacagctggagaaagagaggcgagagcgaggagcccagcagcccccagagcctgtgccacctggtggcccccggccacgagagaagcggctgcgagacccccgtgagcgtggacagcatccccctggagtgggaccacaccggcgacgtgggcggcagcagcagccacgaggaggacgaggagggcccctactacagcgccctgagcggcaagagcatcagcgacggccacagctggcacgtgcccgacagccccagctgccccgagcaccactacaagcagatggagggcgacagaaacgtgccccccgtgccccccgccagcagcaccccctacaagcccccctacggcaagctgctgctgccccccggcaccgacggcggcaaggagggccccagagtgctgaacggcaacccccagcaggaggacggcggcctggccggcatcaccgagcagcagagcggcgccttcgacagatgggagatgatccaggcccaggagctgcacaacaagctgaagatcaagcagaacctgcagcagctgaacagcgacatcagcgccatcaccacctggctgaagaagaccgaggccgagctggagatgctgaagatggccaagccccccagcgacatccaggagatcgagctgagagtgaagagactgcaggagatcctgaaggccttcgacacctacaaggccctggtggtgagcgtgaacgtgagcagcaaggagttcctgcagaccgagagccccgagagcaccgagctgcagagcagactgagacagctgagcctgctgtgggaggccgcccagggcgccgtggacagctggagaggcggcctgagacagagcctgatgcagtgccaggacttccaccagctgagccagaacctgctgctgtggctggccagcgccaagaacagaagacagaaggcccacgtgaccgaccccaaggccgaccccagagccctgctggagtgcagaagagagctgatgcagctggagaaggagctggtggagagacagccccaggtggacatgctgcaggagatcagcaacagcctgctgatcaagggccacggcgaggactgcatcgaggccgaggagaaggtgcacgtgatcgagaagaagctgaagcagctgagagagcaggtgagccaggacctgatggccctgcagggcacccagaaccccgccagccccctgcccagcttcgacgaggtggacagcggcgaccagccccccgccaccagcgtgcccgcccccagagccaagcagttcagagccgtgagaaccaccgagggcgaggaggagaccgagagcagagtgcccggcagcaccagaccccagagaagcttcctgagcagagtggtgagagccgccctgcccctgcagctgctgctgctgctgctgctgctgctggcctgcctgctgcccagcagcgaggaggactacagctgcacccaggccaacaacttcgccagaagcttctaccccatgctgagatacaccaacggccccccccccacctag

SEQ ID NO: 100484 - DNA, 20724 bp, synthetic construct
  misc_feature 1..20724: note = Description of Artificial Sequence: Synthetic coding sequence
  source 1..20724: mol_type = other DNA
atggccagcagccccgagctgcccaccgaggacgagcagggcagctggggcatcgacgacctgcacatcagcctgcaggccgagcaggaggacacccagaagaaggccttcacctgctggatcaacagccagctggccagacacaccagccccagcgtgatcagcgacctgttcaccgacatcaagaagggccacgtgctgctggacctgctggaggtgctgagcggccagcagctgcccagagacaagggcagcaacaccttccagtgcagaatcaacatcgagcacgccctgaccttcctgagaaacagaagcatcaagctgatcaacatccacgtgaccgacatcatcgacggcaaccccagcatcatcctgggcctgatctggaccatcatcctgcacttccacatcgagaagctggcccagaccctgagctgcaactacaaccagcccagcctggacgacgtgagcgtggtggacagcagccccgccagcagcccccccgccaagaagtgcagcaaggtgcaggccagatggcagatgagcgccagaaaggccctgctgctgtgggcccaggagcagtgcgccacctacgagagcgtgaacgtgaccgacttcaagagcagctggagaaacggcatggccttcctggccatcatccacgccctgagacccgacctgatcgacatgaagagcgtgaagcacagaagcaacaaggacaacctgagagaggccttcagaatcgccgagcaggagctgaagatccccagactgctggagcccgaggacgtggacgtggtggaccccgacgagaagagcatcatgacctacgtggcccagttcctgcagtacagcaaggacgcccccggcaccggcgaggaggcccagggcaaggtgaaggacgccatgggctggctgaccctgcagaaggagaagctgcagaagctgctgaaggacagcgagaacgacacctacttcaagaagtacaacagcctgctgagcttcatggagagcttcaacgaggagaagaagagcttcctggacgtgctgagcatcaagagagacctggacgagctggacaaggaccacctgcagctgagagaggcctgggacggcctggaccaccagatcaacgcctggaagatcaagctgaactacgccctgcccccccccctgcaccagaccgaggcctggctgcaggaggtggaggagctgatggacgaggacctgagcgccagccaggaccacagccaggccgtgaccctgatccaggagaagatgaccctgttcaagagcctgatggacagattcgagcaccacagcaacatcctgctgaccttcgagaacaaggacgagaaccacctgcccctggtgccccccaacaagctggaggagatgaagagaagaatcaacaacatcctggagaagaagttcatcctgctgctggagttccactactacaagtgcctggtgctgggcctggtggacgaggtgaagagcaagctggacatctggaacatcaagtacggcagcagagagagcgtggagctgctgctggaggactggcacaagttcatcgaggagaaggagttcctggccagactggacaccagcttccagaagtgcggcgagatctacaagaacctggccggcgagtgccagaacatcaacaagcagtacatgatggtgaagagcgacgtgtgcatgtacagaaagaacatctacaacgtgaagagcaccctgcagaaggtgctggcctgctgggccacctacgtggagaacctgagactgctgagagcctgcttcgaggagaccaagaaggaggagatcaaggaggtgcccttcgagaccctggcccagtggaacctggagcacgccaccctgaacgaggccggcaacttcctggtggaggtgagcaacgacgtggtgggcagcagcatcagcaaggagctgagaagactgaacaagagatggagaaagctggtgagcaagacccagctggagatgaacctgcccctgatgatcaagaagcaggaccagcccaccttcgacaacagcggcaacatcctgagcaaggaggagaaggccaccgtggagttcagcaccgacatgagcgtggagctgcccgagaactacaaccagaacatcaaggccggcgagaagcacgagaaggagaacgaggagttcaccggccagctgaaggtggccaaggacgtggagaagctgatcggccaggtggagatctgggaggccgaggccaagagcgtgctggaccaggacgacgtggacaccagcatggaggagagcctgaagcacctgatcgccaagggcagcatgttcgacgagctgatggccagaagcgaggacatgctgcagatggacatccagaacatcagcagccaggagagcttccagcacgtgctgaccaccggcctgcaggccaagatccaggaggccaaggagaaggtgcagatcaacgtggtgaagctgatcgccgccctgaagaacctgaccgacgtgagccccgacctggacatcagactgaagatggaggagagccagaaggagctggagagctacatgatgagagcccagcagctgctgggccagagagagagccccggcgagctgatcagcaagcacaaggaggccctgatcatcagcaacaccaagagcctggccaagtacctgaaggccgtggaggagctgaagaacaacgtgaccgaggacatcaagatgagcctggaggagaagagcagagacgtgtgcgccaagtgggagagcctgcaccacgagctgagcctgtacgtgcagcagctgaagatcgacatcgagaagggcaagctgagcgacaacatcctgaagctggagaagcagatcaacaaggagaagaagctgatcagaagaggcagaaccaagggcctgatcaaggagcacgaggcctgcttcagcgaggagggctgcctgtaccagctgaaccaccacatggaggtgctgagagagctgtgcgaggagctgcccagccagaagagccagcaggaggtgaagagactgctgaaggactacgagcagaagatcgagagactgctgaagtgcgccagcgagatccacatgaccctgcagcccaccgccggcggcaccagcaagaacgagggcaccatcaccaccagcgagaacagaggcggcgacccccacagcgaggcccccttcgccaagagcgacaaccagcccagcaccgagaaggccatggagcccaccatgaagttcagcctggccagcgtgctgagacccctgcaggaggagagcatcatggagaaggactacagcgccagcatcaacagcctgctggagagatacgacacctacagagacatcctggagcaccacctgcagaacaacaagttcagaatcaccagcgacttcagcagcgaggaggacagaagcagcagctgcctgcaggccaagctgaccgacctgcaggtgatcaagaacgagaccgacgccagatggaaggagttcgagatcatcagcctgaagctggagaaccacgtgaacgacatcaagaagcccttcgtgatcaaggagagagacaccctgaaggagagagagagagagctgcagatgaccctgaacaccagaatggagagcctggagaccgccctgagactggtgctgcccgtggagaaggccagcctgctgctgtgcggcagcgacctgcccctgcacaagatggccatccagggcttccacctgatcgacgccgacagaatctaccagcacctgagaaacatccaggacagcatcgccaagcagatcgagatctgcaacagactggaggagcccggcaacttcgtgctgaaggagctgcaccccttcgacctgcacgccatgcagaacatcatcctgaagtacaagacccagttcgagggcatgaaccacagagtgcagagaagcgaggacaccctgaaggccctggaggacttcctggccagcctgagaaccgccaagctgagcgccgagcccgtgaccgacctgagcgccagcgacacccaggtggcccaggagaacaccctgaccgtgaagaacaaggagggcgagatccacctgatgaaggacaaggccaagcacctggacaagtgcctgaagatgctggacatgagcttcaaggacgccgagagaggcgacgacaccagctgcgagaacctgctggacgccttcagcatcaagctgagcgagacccacggctacggcgtgcaggaggagttcaccgaggagaacaagctgctggaggcctgcatcttcaagaacaacgagctgctgaagaacatccaggacgtgcagagccagatcagcaagatcggcctgaaggaccccaccgtgcccgccgtgaagcacagaaagaagagcctgatcagactggacaaggtgctggacgagtacgaggaggagaagagacacctgcaggagatggccaacagcctgccccacttcaaggacggcagagagaagaccgtgaaccagcagtgccagaacaccgtggtgctgtgggagaacaccaaggccctggtgaccgagtgcctggagcagtgcggcagagtgctggagctgctgaagcagtaccagaacttcaagagcatcctgaccaccctgatccagaaggaggagagcgtgatcagcctgcaggccagctacatgggcaaggagaacctgaagaagagaatcgccgagatcgagatcgtgaaggaggagttcaacgagcacctggaggtggtggacaagatcaaccaggtgtgcaagaacctgcagttctacctgaacaagatgaagaccttcgaggagccccccttcgagaaggaggccaacatcatcgtggacagatggctggacatcaacgagaagaccgaggactactacgagaacctgggcagagccctggccctgtgggacaagctgttcaacctgaagaacgtgatcgacgagtggaccgagaaggccctgcagaagatggagctgcaccagctgaccgaggaggacagagagagactgaaggaggagctgcaggtgcacgagcagaagaccagcgagttcagcagaagagtggccgagatccagttcctgctgcagagcagcgagatccccctggagctgcaggtgatggagagcagcatcctgaacaagatggagcacgtgcagaagtgcctgaccggcgagagcaactgccacgccctgagcggcagcaccgccgagctgagagaggacctggaccaggccaagacccagatcggcatgaccgagagcctgctgaaggccctgagccccagcgacagcctggagatcttcaccaagctggaggagatccagcagcagatcctgcagcagaagcacagcatgatcctgctggagaaccagatcggctgcctgacccccgagctgagcgagctgaagaagcagtacgagagcgtgagcgacctgttcaacaccaagaagagcgtgctgcaggaccacttcagcaagctgctgaacgaccagtgcaagaacttcaacgactggttcagcaacatcaaggtgaacctgaaggagtgcttcgagagcagcgagaccaagaagagcgtggagcagaagctgcagaagctgagcgacttcctgaccctggagggcagaaacagcaagatcaagcaggtggacagcgtgctgaagcacgtgaagaagcacctgcccaaggcccacgtgaaggagctgatcagctggctggtgggccaggagttcgagctggagaagatggagagcatctgccaggccagagccaaggagctggaggacagcctgcagcagctgctgagactgcaggacgaccacagaaacctgagaaagtggctgaccaaccaggaggagaagtggaagggcatggaggagcccggcgagaagaccgagctgttctgccaggccctggccagaaagagagagcagttcgagagcgtggcccagctgaacaacagcctgaaggagtacggcttcaccgaggaggaggagatcatcatggaggccacctgcctgatggacagataccagaccctgctgagacagctgagcgagatcgaggaggaggacaagctgctgcccaccgaggaccagagcttcaacgacctggcccacgacgtgatccactggatcaaggagatcaaggagagcctgatggtgctgaacagcagcgagggcaagatgcccctggaggagagaatccagaagatcaaggagatcatcctgctgaagcccgagggcgacgccagaatcgagaccatcatgaagcaggccgagagcagcgaggcccccctggtgcagaagaccctgaccgacatcagcaaccagtgggacaacaccctgcacctggccagcacctacctgagccaccaggagaagctgctgctggagggcgagaagtacctgcagagcaaggaggacctgagactgatgctgatcgagctgaagaagaagcaggaggccggcttcgccctgcagcacggcctgcaggagaagaaggcccagctgaagatctacaagaagttcctgaagaaggcccaggacctgaccagcctgctgaaggagctgaagagccagggcaactacctgctggagtgcaccaagaaccccagcttcagcgaggagccctggctggagatcaagcacctgcacgagagcctgctgcagcagctgcaggacagcgtgcagaacctggacggccacgtgagagagcacgacagctaccaggtgtgcgtgaccgacctgaacaccaccctggacaacttcagcaaggagttcgtgagcttcagcgacaagcccgtggaccagatcgccgtggaggagaagctgcagaagctgcaggagctggagaacagactgagcctgcaggacggcaccctgaagaagatcctggccctggccaagagcgtgaagcagaacaccagcagcgtgggccagaagatcatcaaggacgacatcaagagcctgcagtgcaagcagaaggacctggagaacagactggccagcgccaagcaggagatggagtgctgcctgaacagcatcctgaagagcaagagaagcaccgagaagaagggcaagttcaccctgcccggcagagagaagcaggccaccagcgacgtgcaggagagcacccaggagagcgccgccgtggagaagctggaggaggactgggagatcaacaaggacagcgccgtggagatggccatgagcaagcagctgagcctgaacgcccaggagagcatgaagaacaccgaggacgagagaaaggtgaacgagctgcagaaccagcccctggagctggacaccatgctgagaaacgagcagctggaggagatcgagaagctgtacacccagctggaggccaagaaggccgccatcaagcccctggagcagaccgagtgcctgaacaagaccgagaccggcgccctggtgctgcacaacatcggctacagcgcccagcacctggacaacctgctgcaggccctgatcaccctgaagaagaacaaggagagccagtactgcgtgctgagagacttccaggagtacctggccgccgtggagagcagcatgaaggccctgctgaccgacaaggagagcctgaaggtgggccccctggacagcgtgacctacctggacaagatcaagaagttcatcgccagcatcgagaaggagaaggacagcctgggcaacctgaagatcaagtgggagaacctgagcaaccacgtgaccgacatggacaagaagctgctggagagccagatcaagcagctggagcacggctgggagcaggtggagcagcagatccagaagaagtacagccagcaggtggtggagtacgacgagttcaccaccctgatgaacaaggtgcaggacaccgagatcagcctgcagcagcagcagcagcacctgcagctgagactgaagagccccgaggagagagccggcaaccagagcatgatcgccctgaccaccgacctgcaggccaccaagcacggcttcagcgtgctgaagggccaggccgagctgcagatgaagagaatctggggcgagaaggagaagaagaacctggaggacggcatcaacaacctgaagaagcagtgggagaccctggagcccctgcacctggaggccgagaaccagatcaagaagtgcgacatcagaaacaagatgaaggagaccatcctgtgggccaagaacctgctgggcgagctgaaccccagcatccccctgctgcccgacgacatcctgagccagatcagaaagtgcaaggtgacccacgacggcatcctggccagacagcagagcgtggagagcctggccgaggaggtgaaggacaaggtgcccagcctgaccacctacgagggcagcgacctgaacaacaccctggaggacctgagaaaccagtaccagatgctggtgctgaagagcacccagagaagccagcagctggagttcaagctggaggagagaagcaacttcttcgccatcatcagaaagttccagctgatggtgcaggagagcgagaccctgatcatccccagagtggagaccgccgccaccgaggccgagctgaagcaccaccacgtgaccctggaggccagccagaaggagctgcaggagatcgacagcggcatcagcacccacctgcaggagctgaccaacatctacgaggagctgaacgtgttcgagagactgttcctggaggaccagctgaagaacctgaagatcagaaccaacagaatccagagattcatccagaacacctgcaacgaggtggagcacaagatcaagttctgcagacagttccacgagaagaccagcgccctgcaggaggaggccgacagcatccagagaaacgagctgctgctgaaccaggaggtgaacaagggcgtgaaggaggagatctacaacctgaaggacagactgaccgccatcaagtgctgcatcctgcaggtgctgaagctgaagaaggtgttcgactacatcggcctgaactgggacttcagccagctggaccagctgcagacccaggtgttcgagaaggagaaggagctggaggagaagatcaagcagctggacaccttcgaggaggagcacggcaagtaccaggccctgctgagcaagatgagagccatcgacctgcagatcaagaagatgaccgaggtggtgctgaaggcccccgacagcagccccgagagcagaagactgaacgcccagatcctgagccagagaatcgagaaggccaagtgcctgtgcgacgagatcatcaagaagctgaacgagaacaagaccttcgacgacagcttcaaggagaaggagatcctgcagatcaagctgaacgccgaggagaacgacaagctgtacaaggtgctgcagaacatggtgctggagctgagccccaaggagctggacgagaagaactgccaggacaagctggagaccagcctgcacgtgctgaaccagatcaagagccagctgcagcagcccctgctgatcaacctggagatcaagcacatccagaacgagaaggacaactgcgaggccttccaggagcaggtgtgggccgagatgtgcagcatcaaggccgtgaccgccatcgagaagcagagagaggagaacagcagcgaggccagcgacgtggagaccaagctgagagagttcgaggacctgcagatgcagctgaacaccagcatcgacctgagaaccaacgtgctgaacgacgcctacgagaacctgaccagatacaaggaggccgtgaccagagccgtggagagcatcaccagcctggaggccatcatcatcccctacagagtggacgtgggcaaccccgaggagagcctggagatgcccctgagaaagcaggaggagctggagagcaccgtggcccacatccaggacctgaccgagaagctgggcatgatcagcagccccgaggccaagctgcagctgcagtacaccctgcaggagctggtgagcaagaacagcgccatgaaggaggccttcaaggcccaggagaccgaggccgagagatacctggagaactacaagtgctacagaaagatggaggaggacatctacaccaacctgagcaagatggagaccgtgctgggccagagcatgagcagcctgcccctgagctacagagaggccctggagagactggagcagagcaaggccctggtgagcaacctgatcagcaccaaggaggagctgatgaagctgagacagatcctgagactgctgagactgagatgcaccgagaacgacggcatctgcctgctgaagatcgtgagcgccctgtgggagaagtggctgagcctgctggaggccgccaaggagtgggagatgtggtgcgaggagctgaagcaggagtggaagttcgtgagcgaggagatcgagagagaggccatcatcctggacaacctgcaggaggagctgcccgagatcagcaagaccaaggaggccgccaccaccgaggagctgagcgagctgctggactgcctgtgccagtacggcgagaacgtggagaagcagcagctgctgctgaccctgctgctgcagagaatcagaagcatccagaacgtgcccgagagcagcggcgccgtggagaccgtgcccgccttccaggagatcaccagcatgaaggagagatgcaacaagctgctgcagaaggtgcagaagaacaaggagctggtgcagaccgagatccaggagagacacagcttcaccaaggagatcatcgccctgaagaacttcttccagcagaccaccaccagcttccagaacatggccttccaggaccaccccgagaagagcgagcagttcgaggagctgcagagcatcctgaagaagggcaagctgaccttcgagaacatcatggagaagctgagaatcaagtacagcgagatgtacaccatcgtgcccgccgagatcgagagccaggtggaggagtgcagaaaggccctggaggacatcgacgagaagatcagcaacgaggtgctgaagagcagccccagctacgccatgagaagaaagatcgaggagatcaacaacggcctgcacaacgtggagaagatgctgcagcagaagagcaagaacatcgagaaggcccaggagatccagaagaagatgtgggacgagctggacctgtggcacagcaagctgaacgagctggacagcgaggtgcaggacatcgtggagcaggaccccggccaggcccaggagtggatggacaacctgatgatccccttccagcagtaccagcaggtgagccagagagccgagtgcagaaccagccagctgaacaaggccaccgtgaagatggaggagtacagcgacctgctgaagagcaccgaggcctggatcgagaacaccagccacctgctggccaaccccgccgactacgacagcctgagaaccctgagccaccacgccagcaccgtgcagatggccctggaggacagcgagcagaagcacaacctgctgcacagcatcttcatggacctggaggacctgagcatcatcttcgagaccgacgagctgacccagagcatccaggagctgagcaaccaggtgaccgccctgcagcagaagatcatggagagcctgccccagatccagagaatggccgacgacgtggtggccatcgagagcgaggtgaagagcatggagaagagagtgagcaagatcaagaccatcctgctgagcaaggagatcttcgacttcagccccgaggagcacctgaagcacggcgaggtgatcctggagaacatcagacccatgaagaagaccatcgccgagatcgtgagctaccaggtggagctgagactgccccagaccggcatgaagcccctgcccgtgttccagagaaccaaccagctgctgcaggacatcaagctgctggagaacgtgacccaggagcagaacgagctgctgaaggtggtgatcaagcagaccaacgagtgggacgaggagatcgagaacctgaagcagatcctgaacaactacagcgcccagttcagcctggagcacatgagccccgaccaggccgacaagctgccccagctgcagggcgagatcgagagaatggagaagcagatcctgagcctgaaccagagaaaggaggacctgctggtggacctgaaggccaccgtgctgaacctgcaccagcacctgaagcaggagcaggagggcgtggagagagacagactgcccgccgtgaccagcgaggagggcggcgtggccgagagagacgccagcgagagaaagctgaacagaagaggcagcatgagctacctggccgccgtggaggaggaggtggaggagagcagcgtgaagagcgacaacggcgacgagaaggccgagcccagcccccagagctggagcagcctgtggaagcacgacaaggacatggaggaggacagagccagcagcagcagcggcaccatcgtgcaggaggcctacggcaagatcagcaccagcgacaacagcatggcccagatcctgacccccgacagcctgaacaccgagcagggccccgagtgcagcctgagacccaaccagaccgaggagggcaccaccccccccatcgaggccgacaccctggacagcagcgacgcccagggcggcctggagcccagagtggagaagaccagacccgagcccaccgaggtgctgcacgcctgcaagacccaggtggccgagctggagctgtggctgcagcaggccaacgtggccgtggagcccgagaccctgaacgccgacatgcagcaggtgctggagcagcagctggtgggctgccaggccatgctgaccgagatcgagcacaaggtggccttcctgctggagacctgcaaggaccagggcctgggcgacaacggcgccacccagcacgaggccgaggccctgagcctgaagctgaagaccgtgaagtgcaacctggagaaggtgcagatgatgctgcaggagaagcacagcgaggaccagcaccccaccatcctgaagaagagcagcgagcccgagcaccaggaggccctgcagcccgtgaacctgagcgagctggagagcatcgtgaccgagagaccccagttcagcagacagaaggacttccagcagcagcaggtgctggagctgaagcccatggagcagaaggacttcatcaagttcatcgagttcaacgccaagaagatgtggccccagtactgccagcacgacaacgacaccacccaggagagcagcgccagcaaccaggccagcagccccgagaacgacgtgcccgacagcatcctgagcccccagggccagaacggcgacaagtggcagtacctgcaccacgagctgagcagcaagatcaagctgcccctgccccagctggtggagccccaggtgagcaccaacatgggcatcctgcccagcgtgaccatgtacaacttcagataccccaccaccgaggagctgaagacctacaccacccagctggaggacctgagacaggaggccagcaacctgcagacccaggagaacatgaccgaggaggcctacatcaacctggacaagaagctgttcgagctgttcctgaccctgagccagtgcctgagcagcgtggaggagatgctggagatgcccagactgtacagagaggacggcagcggccagcaggtgcactacgagaccctggccctggagctgaagaagctgtacctggccctgagcgacaagaagggcgacctgctgaaggccatgacctggcccggcgagaacaccaacctgctgctggagtgcttcgacaacctgcaggtgtgcctggagcacacccaggccgccgccgtgtgcagaagcaagagcctgaaggccggcctggactacaacagaagctaccagaacgagatcaagagactgtaccaccagctgatcaagagcaagaccagcctgcagcagagcctgaacgagatcagcggccagagcgtggccgagcagctgcagaaggccgacgcctacaccgtggagctggagaacgccgagagcagagtggccaagctgagagacgagggcgagagactgcacctgccctacgccctgctgcaggaggtgtacaagctggaggacgtgctggacagcatgtggggcatgctgagagccagatacaccgagctgagcagccccttcgtgaccgagagccagcaggacgccctgctgcagggcatggtggagctggtgaagatcggcaaggagaagctggcccacggccacctgaagcagaccaagagcaaggtggccctgcaggcccagatcgagaaccacaaggtgttcttccagaagctggtggccgacatgctgctgatccaggcctacagcgccaagatcctgcccagcctgctgcagaacagagagaccttctgggccgagcaggtgaccgaggtgaagatcctggaggagaagagcagacagtgcggcatgaagctgcagagcctgctgcagaagtgggaggagttcgacgagaactacgccagcctggagaaggacctggagatcctgatcagcaccctgcccagcgtgagcctggtggaggagaccgaggagagactggtggagagaatcagcttctaccagcagatcaagagaaacatcggcggcaagcacgccagactgtaccagaccctgaacgagggcaagcagctggtggccagcgtgagctgccccgagctggagggccagatcgccaagctggaggagcagtggctgagcctgaacaagaagatcgaccacgagctgcacagactgcaggccctgctgaagcacctgctgagctacaacagagacagcgaccagctgaccaagtggctggagagcagccagcacaccctgaactactggaaggagcagagcctgaacgtgagccaggacctggacaccatcagaagcaacatcaacaacttcttcgagttcagcaaggaggtggacgagaagagcagcctgaagaccgccgtgatcagcatcggcaaccagctgctgcacctgaaggagaccgacaccgccaccctgagagccagcctggcccagttcgagcagaagtggaccatgctgatcacccagctgcccgacatccaggagaagctgcaccagctgcagatggagaagctgcccagcagaaaggccatcaccgagatgatcagctggatgaacaacgtggagcaccagaccagcgacgaggacagcgtgcacagccccagcagcgccagccaggtgaagcacctgctgcagaagcacaaggagttcagaatggagatggactacaagcagtggatcgtggacttcgtgaaccagagcctgctgcagctgagcacctgcgacgtggagagcaagagatacgagagaaccgagttcgccgagcacctgggcgagatgaacagacagtggcacagagtgcacggcatgctgaacagaaagatccagcacctggagcagctgctggagagcatcaccgagagcgagaacaagatccagatcctgaacaactggctggaggcccaggaggagagactgaagaccctgcagaagcccgagagcgtgatcagcgtgcagaagctgctgctggactgccaggacatcgagaaccagctggccatcaagagcaaggccctggacgagctgaagcagagctacctgaccctggagagcggcgccgtgcccctgctggaggacaccgccagcagaatcgacgagctgttccagaagagaagcagcgtgctgacccaggtgaaccagctgaagaccagcatgcagagcgtgctgcaggagtggaagatctacgaccagctgtacgacgaggtgaacatgatgaccatcagattctggtactgcatggagcacagcaagcccgtggtgctgagcctggagaccctgagatgccaggtggagaacctgcagagcctgcaggacgaggccgagagcagcgagggcagctgggagaagctgcaggaggtgatcggcaagctgaagggcctgtgccccagcgtggccgagatcatcgaggagaagtgccagaacacccacaagagatggacccaggtgaaccaggccatcgccgaccagctgcagaaggcccagagcctgctgcagctgtggaaggcctacagcaacgcccacggcgaggccgccgccagactgaagcagcaggaggccaagttccagcagctggccaacatcagcatgagcggcaacaacctggccgagatcctgccccccgccctgcaggacatcaaggagctgcagcacgacgtgcagaagaccaaggaggccttcctgcagaacagcagcgtgctggacagactgccccagcccgccgagagcagcacccacatgctgctgcccggccccctgcacagcctgcagagagccgcctacctggagaagatgctgctggtgaaggccaacgagttcgagttcgtgctgagccagttcaaggacttcggcgtgagactggagagcctgaagggcctgatcatgcacgaggaggagaacctggacagactgcaccagcaggagaaggagaaccccgacagcttcctgaaccacgtgctggccctgaccgcccagagccccgacatcgagcacctgaacgaggtgagcctgaagctgcccctgagcgacgtggccgtgaagaccctgcagaacatgaacagacagtggatcagagccaccgccaccgccctggagagatgcagcgagctgcagggcatcggcctgaacgagaagttcctgtactgctgcgagaagtggatccagctgctggagaagatcgaggaggccctgaaggtggacgtggccaacagcctgcccgagctgctggagcagcagaagacctacaagatgctggaggccgaggtgagcatcaaccagaccatcgccgacagctacgtgacccagagcctgcagctgctggacaccaccgagatcgagaacagacccgagttcatcaccgagttcagcaagctgaccgacagatggcagaacgccgtgcagggcgtgagacagagaaagggcgacgtggacggcctggtgagacagtggcaggacttcaccaccagcgtggagaacctgttcagattcctgaccgacaccagccacctgctgagcgccgtgaagggccaggagagattcagcctgtaccagaccagaagcctgatccacgagctgaagaacaaggagatccacttccagagaagaagaaccacctgcgccctgaccctggaggccggcgagaagctgctgctgaccaccgacctgaagaccaaggagagcgtgggcagaagaatcagccagctgcaggacagctggaaggacatggagccccagctggccgagatgatcaagcagttccagagcaccgtggagacctgggaccagtgcgagaagaagatcaaggagctgaagagcagactgcaggtgctgaaggcccagagcgaggaccccctgcccgagctgcacgaggacctgcacaacgagaaggagctgatcaaggagctggagcagagcctggccagctggacccagaacctgaaggagctgcagaccatgaaggccgacctgaccagacacgtgctggtggaggacgtgatggtgctgaaggagcagatcgagcacctgcacagacagtgggaggacctgtgcctgagagtggccatcagaaagcaggagatcgaggacagactgaacacctgggtggtgttcaacgagaagaacaaggagctgtgcgcctggctggtgcagatggagaacaaggtgctgcagaccgccgacatcagcatcgaggagatgatcgagaagctgcagaaggactgcatggaggagatcaacctgttcagcgagaacaagctgcagctgaagcagatgggcgaccagctgatcaaggccagcaacaagagcagagccgccgagatcgacgacaagctgaacaagatcaacgacagatggcagcacctgttcgacgtgatcggcagcagagtgaagaagctgaaggagaccttcgccttcatccagcagctggacaagaacatgagcaacctgagaacctggctggccagaatcgagagcgagctgagcaagcccgtggtgtacgacgtgtgcgacgaccaggagatccagaagagactggccgagcagcaggacctgcagagagacatcgagcagcacagcgccggcgtggagagcgtgttcaacatctgcgacgtgctgctgcacgacagcgacgcctgcgccaacgagaccgagtgcgacagcatccagcagaccaccagaagcctggacagaagatggagaaacatctgcgccatgagcatggagagaagaatgaagatcgaggagacctggagactgtggcagaagttcctggacgactacagcagattcgaggactggctgaagagcgccgagagaaccgccgcctgccccaacagcagcgaggtgctgtacaccagcgccaaggaggagctgaagagattcgaggccttccagagacagatccacgagagactgacccagctggagctgatcaacaagcagtacagaagactggccagagagaacagaaccgacaccgccagcagactgaagcagatggtgcacgagggcaaccagagatgggacaacctgcagagaagagtgaccgccgtgctgagaagactgagacacttcaccaaccagagagaggagttcgagggcaccagagagagcatcctggtgtggctgaccgagatggacctgcagctgaccaacgtggagcacttcagcgagagcgacgccgacgacaagatgagacagctgaacggcttccagcaggagatcaccctgaacaccaacaagatcgaccagctgatcgtgttcggcgagcagctgatccagaagagcgagcccctggacgccgtgctgatcgaggacgagctggaggagctgcacagatactgccaggaggtgttcggcagagtgagcagattccacagaagactgaccagctgcacccccggcctggaggacgagaaggaggccagcgagaacgagaccgacatggaggaccccagagagatccagaccgacagctggagaaagagaggcgagagcgaggagcccagcagcccccagagcctgtgccacctggtggcccccggccacgagagaagcggctgcgagacccccgtgagcgtggacagcatccccctggagtgggaccacaccggcgacgtgggcggcagcagcagccacgaggaggacgaggagggcccctactacagcgccctgagcgacgtggagatccccgagaaccccgaggcctacctgaagatgaccaccaagaccctgaaggccagcagcggcaagagcatcagcgacggccacagctggcacgtgcccgacagccccagctgccccgagcaccactacaagcagatggagggcgacagaaacgtgccccccgtgccccccgccagcagcaccccctacaagcccccctacggcaagctgctgctgccccccggcaccgacggcggcaaggagggccccagagtgctgaacggcaacccccagcaggaggacggcggcctggccggcatcaccgagcagcagagcggcgccttcgacagatgggagatgatccaggcccaggagctgcacaacaagctgaagatcaagcagaacctgcagcagctgaacagcgacatcagcgccatcaccacctggctgaagaagaccgaggccgagctggagatgctgaagatggccaagccccccagcgacatccaggagatcgagctgagagtgaagagactgcaggagatcctgaaggccttcgacacctacaaggccctggtggtgagcgtgaacgtgagcagcaaggagttcctgcagaccgagagccccgagagcaccgagctgcagagcagactgagacagctgagcctgctgtgggaggccgcccagggcgccgtggacagctggagaggcggcctgagacagagcctgatgcagtgccaggacttccaccagctgagccagaacctgctgctgtggctggccagcgccaagaacagaagacagaaggcccacgtgaccgaccccaaggccgaccccagagccctgctggagtgcagaagagagctgatgcagctggagaaggagctggtggagagacagccccaggtggacatgctgcaggagatcagcaacagcctgctgatcaagggccacggcgaggactgcatcgaggccgaggagaaggtgcacgtgatcgagaagaagctgaagcagctgagagagcaggtgagccaggacctgatggccctgcagggcacccagaaccccgccagccccctgcccagcttcgacgaggtggacagcggcgaccagccccccgccaccagcgtgcccgcccccagagccaagttcagagccgtgagaaccaccgagggcgaggaggagaccgagagcagagtgcccggcagcaccagaccccagagaagcttcctgagcagagtggtgagagccgccctgcccctgcagctgctgctgctgctgctgctgctgctggcctgcctgctgcccagcagcgaggaggactacagctgcacccaggccaacaacttcgccagaagcttctaccccatgctgagatacaccaacggccccccccccacctag

SEQ ID NO: 100485 - DNA, 9813 bp, synthetic construct; identical to SEQ ID NO: 100483
  misc_feature 1..9813: note = Description of Artificial Sequence: Synthetic coding sequence
  source 1..9813: mol_type = other DNA

SEQ ID NO: 100486 - DNA, 1290 bp, synthetic construct
  misc_feature 1..1290: note = Description of Artificial Sequence: Synthetic coding sequence
  source 1..1290: mol_type = other DNA
atggagggcgacagaaacgtgccccccgtgccccccgccagcagcaccccctacaagcccccctacggcaagctgctgctgccccccggcaccgacggcggcaaggagggccccagagtgctgaacggcaacccccagcaggaggacggcggcctggccggcatcaccgagcagcagagcggcgccttcgacagatgggagatgatccaggcccaggagctgcacaacaagctgaagatcaagcagaacctgcagcagctgaacagcgacatcagcgccatcaccacctggctgaagaagaccgaggccgagctggagatgctgaagatggccaagccccccagcgacatccaggagatcgagctgagagtgaagagactgcaggagatcctgaaggccttcgacacctacaaggccctggtggtgagcgtgaacgtgagcagcaaggagttcctgcagaccgagagccccgagagcaccgagctgcagagcagactgagacagctgagcctgctgtgggaggccgcccagggcgccgtggacagctggagaggcggcctgagacagagcctgatgcagtgccagggcagcaagaccagacccagaagcgacgtgctgttcttcaaggacttccaccagctgagccagaacctgctgctgtggctggccagcgccaagaacagaagacagaaggcccacgtgaccgaccccaaggccgaccccagagccctgctggagtgcagaagagagctgatgcagctggagaaggagctggtggagagacagccccaggtggacatgctgcaggagatcagcaacagcctgctgatcaagggccacggcgaggactgcatcgaggccgaggagaaggtgcacgtgatcgagaagaagctgaagcagctgagagagcaggtgagccaggacctgatggccctgcagggcacccagaaccccgccagccccctgcccagcttcgacgaggtggacagcggcgaccagccccccgccaccagcgtgcccgcccccagagccaagttcagagccgtgagaaccaccgagggcgaggaggagaccgagagcagagtgcccggcagcaccagaccccagagaagcttcctgagcagagtggtgagagccgccctgcccctgcagctgctgctgctgctgctgctgctgctggcctgcctgctgcccagcagcgaggaggactacagctgcacccaggccaacaacttcgccagaagcttctaccccatgctgagatacaccaacggccccccccccacctag

SEQ ID NO: 100487 - DNA, 1671 bp, synthetic construct
  misc_feature 1..1671: note = Description of Artificial Sequence: Synthetic coding sequence
  source 1..1671: mol_type = other DNA
atggaggaccccagagagatccagaccgacagctggagaaagagaggcgagagcgaggagcccagcagcccccagagcctgtgccacctggtggcccccggccacgagagaagcggctgcgagacccccgtgagcgtggacagcatccccctggagtgggaccacaccggcgacgtgggcggcagcagcagccacgaggaggacgaggagggcccctactacagcgccctgagcgacgtggagatccccgagaaccccgaggcctacctgaagatgaccaccaagaccctgaaggccagcagcggcaagagcatcagcgacggccacagctggcacgtgcccgacagccccagctgccccgagcaccactacaagcagatggagggcgacagaaacgtgccccccgtgccccccgccagcagcaccccctacaagcccccctacggcaagctgctgctgccccccggcaccgacggcggcaaggagggccccagagtgctgaacggcaacccccagcaggaggacggcggcctggccggcatcaccgagcagcagagcggcgccttcgacagatgggagatgatccaggcccaggagctgcacaacaagctgaagatcaagcagaacctgcagcagctgaacagcgacatcagcgccatcaccacctggctgaagaagaccgaggccgagctggagatgctgaagatggccaagccccccagcgacatccaggagatcgagctgagagtgaagagactgcaggagatcctgaaggccttcgacacctacaaggccctggtggtgagcgtgaacgtgagcagcaaggagttcctgcagaccgagagccccgagagcaccgagctgcagagcagactgagacagctgagcctgctgtgggaggccgcccagggcgccgtggacagctggagaggcggcctgagacagagcctgatgcagtgccagggcagcaagaccagacccagaagcgacgtgctgttcttcaaggacttccaccagctgagccagaacctgctgctgtggctggccagcgccaagaacagaagacagaaggcccacgtgaccgaccccaaggccgaccccagagccctgctggagtgcagaagagagctgatgcagctggagaaggagctggtggagagacagccccaggtggacatgctgcaggagatcagcaacagcctgctgatcaagggccacggcgaggactgcatcgaggccgaggagaaggtgcacgtgatcgagaagaagctgaagcagctgagagagcaggtgagccaggacctgatggccctgcagggcacccagaaccccgccagccccctgcccagcttcgacgaggtggacagcggcgaccagccccccgccaccagcgtgcccgcccccagagccaagcagttcagagccgtgagaaccaccgagggcgaggaggagaccgagagcagagtgcccggcagcaccagaccccagagaagcttcctgagcagagtggtgagagccgccctgcccctgcagctgctgctgctgctgctgctgctgctggcctgcctgctgcccagcagcgaggaggactacagctgcacccaggccaacaacttcgccagaagcttctaccccatgctgagatacaccaacggccccccccccacctag

SEQ ID NO: 100488 - DNA, 2007 bp, synthetic construct
  misc_feature 1..2007: note = Description of Artificial Sequence: Synthetic coding sequence
  source 1..2007: mol_type = other DNA
atggtgcacgagggcaaccagagatgggacaacctgcagagaagagtgaccgccgtgctgagaagactgagacacttcaccaaccagagagaggagttcgagggcaccagagagagcatcctggtgtggctgaccgagatggacctgcagctgaccaacgtggagcacttcagcgagagcgacgccgacgacaagatgagacagctgaacggcttccagcaggagatcaccctgaacaccaacaagatcgaccagctgatcgtgttcggcgagcagctgatccagaagagcgagcccctggacgccgtgctgatcgaggacgagctggaggagctgcacagatactgccaggaggtgttcggcagagtgagcagattccacagaagactgaccagctgcacccccggcctggaggacgagaaggaggccagcgagaacgagaccgacatggaggaccccagagagatccagaccgacagctggagaaagagaggcgagagcgaggagcccagcagcccccagagcctgtgccacctggtggcccccggccacgagagaagcggctgcgagacccccgtgagcgtggacagcatccccctggagtgggaccacaccggcgacgtgggcggcagcagcagccacgaggaggacgaggagggcccctactacagcgccctgagcggcaagagcatcagcgacggccacagctggcacgtgcccgacagccccagctgccccgagcaccactacaagcagatggagggcgacagaaacgtgccccccgtgccccccgccagcagcaccccctacaagcccccctacggcaagctgctgctgccccccggcaccgacggcggcaaggagggccccagagtgctgaacggcaacccccagcaggaggacggcggcctggccggcatcaccgagcagcagagcggcgccttcgacagatgggagatgatccaggcccaggagctgcacaacaagctgaagatcaagcagaacctgcagcagctgaacagcgacatcagcgccatcaccacctggctgaagaagaccgaggccgagctggagatgctgaagatggccaagccccccagcgacatccaggagatcgagctgagagtgaagagactgcaggagatcctgaaggccttcgacacctacaaggccctggtggtgagcgtgaacgtgagcagcaaggagttcctgcagaccgagagccccgagagcaccgagctgcagagcagactgagacagctgagcctgctgtgggaggccgcccagggcgccgtggacagctggagaggcggcctgagacagagcctgatgcagtgccaggacttccaccagctgagccagaacctgctgctgtggctggccagcgccaagaacagaagacagaaggcccacgtgaccgaccccaaggccgaccccagagccctgctggagtgcagaagagagctgatgcagctggagaaggagctggtggagagacagccccaggtggacatgctgcaggagatcagcaacagcctgctgatcaagggccacggcgaggactgcatcgaggccgaggagaaggtgcacgtgatcgagaagaagctgaagcagctgagagagcaggtgagccaggacctgatggccctgcagggcacccagaaccccgccagccccctgcccagcttcgacgaggtggacagcggcgaccagccccccgccaccagcgtgcccgcccccagagccaagcagttcagagccgtgagaaccaccgagggcgaggaggagaccgagagcagagtgcccggcagcaccagaccccagagaagcttcctgagcagagtggtgagagccgccctgcccctgcagctgctgctgctgctgctgctgctgctggcctgcctgctgcccagcagcgaggaggactacagctgcacccaggccaacaacttcgccagaagcttctaccccatgctgagatacaccaacggccccccccccacctag

SEQ ID NO: 100489 - DNA, 10626 bp, synthetic construct
  misc_feature 1..10626: note = Description of Artificial Sequence: Synthetic coding sequence
  source 1..10626: mol_type = other DNA
atggaggaggacatctacaccaacctgagcaagatggagaccgtgctgggccagagcatgagcagcctgcccctgagctacagagaggccctggagagactggagcagagcaaggccctggtgagcaacctgatcagcaccaaggaggagctgatgaagctgagacagatcctgagactgctgagactgagatgcaccgagaacgacggcatctgcctgctgaagatcgtgagcgccctgtgggagaagtggctgagcctgctggaggccgccaaggagtgggagatgtggtgcgaggagctgaagcaggagtggaagttcgtgagcgaggagatcgagagagaggccatcatcctggacaacctgcaggaggagctgcccgagatcagcaagaccaaggaggccgccaccaccgaggagctgagcgagctgctggactgcctgtgccagtacggcgagaacgtggagaagcagcagctgctgctgaccctgctgctgcagagaatcagaagcatccagaacgtgcccgagagcagcggcgccgtggagaccgtgcccgccttccaggagatcaccagcatgaaggagagatgcaacaagctgctgcagaaggtgcagaagaacaaggagctggtgcagaccgagatccaggagagacacagcttcaccaaggagatcatcgccctgaagaacttcttccagcagaccaccaccagcttccagaacatggccttccaggaccaccccgagaagagcgagcagttcgaggagctgcagagcatcctgaagaagggcaagctgaccttcgagaacatcatggagaagctgagaatcaagtacagcgagatgtacaccatcgtgcccgccgagatcgagagccaggtggaggagtgcagaaaggccctggaggacatcgacgagaagatcagcaacgaggtgctgaagagcagccccagctacgccatgagaagaaagatcgaggagatcaacaacggcctgcacaacgtggagaagatgctgcagcagaagagcaagaacatcgagaaggcccaggagatccagaagaagatgtgggacgagctggacctgtggcacagcaagctgaacgagctggacagcgaggtgcaggacatcgtggagcaggaccccggccaggcccaggagtggatggacaacctgatgatccccttccagcagtaccagcaggtgagccagagagccgagtgcagaaccagccagctgaacaaggccaccgtgaagatggaggagtacagcgacctgctgaagagcaccgaggcctggatcgagaacaccagccacctgctggccaaccccgccgactacgacagcctgagaaccctgagccaccacgccagcaccgtgcagatggccctggaggacagcgagcagaagcacaacctgctgcacagcatcttcatggacctggaggacctgagcatcatcttcgagaccgacgagctgacccagagcatccaggagctgagcaaccaggtgaccgccctgcagcagaagatcatggagagcctgccccagatccagagaatggccgacgacgtggtggccatcgagagcgaggtgaagagcatggagaagagagtgagcaagatcaagaccatcctgctgagcaaggagatcttcgacttcagccccgaggagcacctgaagcacggcgaggtgatcctggagaacatcagacccatgaagaagaccatcgccgagatcgtgagctaccaggtggagctgagactgccccagaccggcatgaagcccctgcccgtgttccagagaaccaaccagctgctgcaggacatcaagctgctggagaacgtgacccaggagcagaacgagctgctgaaggtggtgatcaagcagaccaacgagtgggacgaggagatcgagaacctgaagcagatcctgaacaactacagcgcccagttcagcctggagcacatgagccccgaccaggccgacaagctgccccagctgcagggcgagatcgagagaatggagaagcagatcctgagcctgaaccagagaaaggaggacctgctggtggacctgaaggccaccgtgctgaacctgcaccagcacctgaagcaggagcaggagggcgtggagagagacagactgcccgccgtgaccagcgaggagggcggcgtggccgagagagacgccagcgagagaaagctgaacagaagaggcagcatgagctacctggccgccgtggaggaggaggtggaggagagcagcgtgaagagcgacaacggcgacgagaaggccgagcccagcccccagagctggagcagcctgtggaagcacgacaaggacatggaggaggacagagccagcagcagcagcggcaccatcgtgcaggaggcctacggcaagatcagcaccagcgacaacagcatggcccagatcctgacccccgacagcctgaacaccgagcagggccccgagtgcagcctgagacccaaccagaccgaggagggcaccaccccccccatcgaggccgacaccctggacagcagcgacgcccagggcggcctggagcccagagtggagaagaccagacccgagcccaccgaggtgctgcacgcctgcaagacccaggtggccgagctggagctgtggctgcagcaggccaacgtggccgtggagcccgagaccctgaacgccgacatgcagcaggtgctggagcagcagctggtgggctgccaggccatgctgaccgagatcgagcacaaggtggccttcctgctggagacctgcaaggaccagggcctgggcgacaacggcgccacccagcacgaggccgaggccctgagcctgaagctgaagaccgtgaagtgcaacctggagaaggtgcagatgatgctgcaggagaagcacagcgaggaccagcaccccaccatcctgaagaagagcagcgagcccgagcaccaggaggccctgcagcccgtgaacctgagcgagctggagagcatcgtgaccgagagaccccagttcagcagacagaaggacttccagcagcagcaggtgctggagctgaagcccatggagcagaaggacttcatcaagttcatcgagttcaacgccaagaagatgtggccccagtactgccagcacgacaacgacaccacccaggagagcagcgccagcaaccaggccagcagccccgagaacgacgtgcccgacagcatcctgagcccccagggccagaacggcgacaagtggcagtacctgcaccacgagctgagcagcaagatcaagctgcccctgccccagctggtggagccccaggtgagcaccaacatgggcatcctgcccagcgtgaccatgtacaacttcagataccccaccaccgaggagctgaagacctacaccacccagctggaggacctgagacaggaggccagcaacctgcagacccaggagaacatgaccgaggaggcctacatcaacctggacaagaagctgttcgagctgttcctgaccctgagccagtgcctgagcagcgtggaggagatgctggagatgcccagactgtacagagaggacggcagcggccagcaggtgcactacgagaccctggccctggagctgaagaagctgtacctggccctgagcgacaagaagggcgacctgctgaaggccatgacctggcccggcgagaacaccaacctgctgctggagtgcttcgacaacctgcaggtgtgcctggagcacacccaggccgccgccgtgtgcagaagcaagagcctgaaggccggcctggactacaacagaagctaccagaacgagatcaagagactgtaccaccagctgatcaagagcaagaccagcctgcagcagagcctgaacgagatcagcggccagagcgtggccgagcagctgcagaaggccgacgcctacaccgtggagctggagaacgccgagagcagagtggccaagctgagagacgagggcgagagactgcacctgccctacgccctgctgcaggaggtgtacaagctggaggacgtgctggacagcatgtggggcatgctgagagccagatacaccgagctgagcagccccttcgtgaccgagagccagcaggacgccctgctgcagggcatggtggagctggtgaagatcggcaaggagaagctggcccacggccacctgaagcagaccaagagcaaggtggccctgcaggcccagatcgagaaccacaaggtgttcttccagaagctggtggccgacatgctgctgatccaggcctacagcgccaagatcctgcccagcctgctgcagaacagagagaccttctgggccgagcaggtgaccgaggtgaagatcctggaggagaagagcagacagtgcggcatgaagctgcagagcctgctgcagaagtgggaggagttcgacgagaactacgccagcctggagaaggacctggagatcctgatcagcaccctgcccagcgtgagcctggtggaggagaccgaggagagactggtggagagaatcagcttctaccagcagatcaagagaaacatcggcggcaagcacgccagactgtaccagaccctgaacgagggcaagcagctggtggccagcgtgagctgccccgagctggagggccagatcgccaagctggaggagcagtggctgagcctgaacaagaagatcgaccacgagctgcacagactgcaggccctgctgaagcacctgctgagctacaacagagacagcgaccagctgaccaagtggctggagagcagccagcacaccctgaactactggaaggagcagagcctgaacgtgagccaggacctggacaccatcagaagcaacatcaacaacttcttcgagttcagcaaggaggtggacgagaagagcagcctgaagaccgccgtgatcagcatcggcaaccagctgctgcacctgaaggagaccgacaccgccaccctgagagccagcctggcccagttcgagcagaagtggaccatgctgatcacccagctgcccgacatccaggagaagctgcaccagctgcagatggagaagctgcccagcagaaaggccatcaccgagatgatcagctggatgaacaacgtggagcaccagaccagcgacgaggacagcgtgcacagccccagcagcgccagccaggtgaagcacctgctgcagaagcacaaggagttcagaatggagatggactacaagcagtggatcgtggacttcgtgaaccagagcctgctgcagctgagcacctgcgacgtggagagcaagagatacgagagaaccgagttcgccgagcacctgggcgagatgaacagacagtggcacagagtgcacggcatgctgaacagaaagatccagcacctggagcagctgctggagagcatcaccgagagcgagaacaagatccagatcctgaacaactggctggaggcccaggaggagagactgaagaccctgcagaagcccgagagcgtgatcagcgtgcagaagctgctgctggactgccaggacatcgagaaccagctggccatcaagagcaaggccctggacgagctgaagcagagctacctgaccctggagagcggcgccgtgcccctgctggaggacaccgccagcagaatcgacgagctgttccagaagagaagcagcgtgctgacccaggtgaaccagctgaagaccagcatgcagagcgtgctgcaggagtggaagatctacgaccagctgtacgacgaggtgaacatgatgaccatcagattctggtactgcatggagcacagcaagcccgtggtgctgagcctggagaccctgagatgccaggtggagaacctgcagagcctgcaggacgaggccgagagcagcgagggcagctgggagaagctgcaggaggtgatcggcaagctgaagggcctgtgccccagcgtggccgagatcatcgaggagaagtgccagaacacccacaagagatggacccaggtgaaccaggccatcgccgaccagctgcagaaggcccagagcctgctgcagctgtggaaggcctacagcaacgcccacggcgaggccgccgccagactgaagcagcaggaggccaagttccagcagctggccaacatcagcatgagcggcaacaacctggccgagatcctgccccccgccctgcaggacatcaaggagctgcagcacgacgtgcagaagaccaaggaggccttcctgcagaacagcagcgtgctggacagactgccccagcccgccgagagcagcacccacatgctgctgcccggccccctgcacagcctgcagagagccgcctacctggagaagatgctgctggtgaaggccaacgagttcgagttcgtgctgagccagttcaaggacttcggcgtgagactggagagcctgaagggcctgatcatgcacgaggaggagaacctggacagactgcaccagcaggagaaggagaaccccgacagcttcctgaaccacgtgctggccctgaccgcccagagccccgacatcgagcacctgaacgaggtgagcctgaagctgcccctgagcgacgtggccgtgaagaccctgcagaacatgaacagacagtggatcagagccaccgccaccgccctggagagatgcagcgagctgcagggcatcggcctgaacgagaagttcctgtactgctgcgagaagtggatccagctgctggagaagatcgaggaggccctgaaggtggacgtggccaacagcctgcccgagctgctggagcagcagaagacctacaagatgctggaggccgaggtgagcatcaaccagaccatcgccgacagctacgtgacccagagcctgcagctgctggacaccaccgagatcgagaacagacccgagttcatcaccgagttcagcaagctgaccgacagatggcagaacgccgtgcagggcgtgagacagagaaagggcgacgtggacggcctggtgagacagtggcaggacttcaccaccagcgtggagaacctgttcagattcctgaccgacaccagccacctgctgagcgccgtgaagggccaggagagattcagcctgtaccagaccagaagcctgatccacgagctgaagaacaaggagatccacttccagagaagaagaaccacctgcgccctgaccctggaggccggcgagaagctgctgctgaccaccgacctgaagaccaaggagagcgtgggcagaagaatcagccagctgcaggacagctggaaggacatggagccccagctggccgagatgatcaagcagttccagagcaccgtggagacctgggaccagtgcgagaagaagatcaaggagctgaagagcagactgcaggtgctgaaggcccagagcgaggaccccctgcccgagctgcacgaggacctgcacaacgagaaggagctgatcaaggagctggagcagagcctggccagctggacccagaacctgaaggagctgcagaccatgaaggccgacctgaccagacacgtgctggtggaggacgtgatggtgctgaaggagcagatcgagcacctgcacagacagtgggaggacctgtgcctgagagtggccatcagaaagcaggagatcgaggacagactgaacacctgggtggtgttcaacgagaagaacaaggagctgtgcgcctggctggtgcagatggagaacaaggtgctgcagaccgccgacatcagcatcgaggagatgatcgagaagctgcagaaggactgcatggaggagatcaacctgttcagcgagaacaagctgcagctgaagcagatgggcgaccagctgatcaaggccagcaacaagagcagagccgccgagatcgacgacaagctgaacaagatcaacgacagatggcagcacctgttcgacgtgatcggcagcagagtgaagaagctgaaggagaccttcgccttcatccagcagctggacaagaacatgagcaacctgagaacctggctggccagaatcgagagcgagctgagcaagcccgtggtgtacgacgtgtgcgacgaccaggagatccagaagagactggccgagcagcaggacctgcagagagacatcgagcagcacagcgccggcgtggagagcgtgttcaacatctgcgacgtgctgctgcacgacagcgacgcctgcgccaacgagaccgagtgcgacagcatccagcagaccaccagaagcctggacagaagatggagaaacatctgcgccatgagcatggagagaagaatgaagatcgaggagacctggagactgtggcagaagttcctggacgactacagcagattcgaggactggctgaagagcgccgagagaaccgccgcctgccccaacagcagcgaggtgctgtacaccagcgccaaggaggagctgaagagattcgaggccttccagagacagatccacgagagactgacccagctggagctgatcaacaagcagtacagaagactggccagagagaacagaaccgacaccgccagcagactgaagcagatggtgcacgagggcaaccagagatgggacaacctgcagagaagagtgaccgccgtgctgagaagactgagacacttcaccaaccagagagaggagttcgagggcaccagagagagcatcctggtgtggctgaccgagatggacctgcagctgaccaacgtggagcacttcagcgagagcgacgccgacgacaagatgagacagctgaacggcttccagcaggagatcaccctgaacaccaacaagatcgaccagctgatcgtgttcggcgagcagctgatccagaagagcgagcccctggacgccgtgctgatcgaggacgagctggaggagctgcacagatactgccaggaggtgttcggcagagtgagcagattccacagaagactgaccagctgcacccccggcctggaggacgagaaggaggccagcgagaacgagaccgacatggaggaccccagagagatccagaccgacagctggagaaagagaggcgagagcgaggagcccagcagcccccagagcctgtgccacctggtggcccccggccacgagagaagcggctgcgagacccccgtgagcgtggacagcatccccctggagtgggaccacaccggcgacgtgggcggcagcagcagccacgaggaggacgaggagggcccctactacagcgccctgagcgacgtggagatccccgagaaccccgaggcctacctgaagatgaccaccaagaccctgaaggccagcagcggcaagagcatcagcgacggccacagctggcacgtgcccgacagccccagctgccccgagcaccactacaagcagatggagggcgacagaaacgtgccccccgtgccccccgccagcagcaccccctacaagcccccctacggcaagctgctgctgccccccggcaccgacggcggcaaggagggccccagagtgctgaacggcaacccccagcaggaggacggcggcctggccggcatcaccgagcagcagagcggcgccttcgacagatgggagatgatccaggcccaggagctgcacaacaagctgaagatcaagcagaacctgcagcagctgaacagcgacatcagcgccatcaccacctggctgaagaagaccgaggccgagctggagatgctgaagatggccaagccccccagcgacatccaggagatcgagctgagagtgaagagactgcaggagatcctgaaggccttcgacacctacaaggccctggtggtgagcgtgaacgtgagcagcaaggagttcctgcagaccgagagccccgagagcaccgagctgcagagcagactgagacagctgagcctgctgtgggaggccgcccagggcgccgtggacagctggagaggcggcctgagacagagcctgatgcagtgccaggacttccaccagctgagccagaacctgctgctgtggctggccagcgccaagaacagaagacagaaggcccacgtgaccgaccccaaggccgaccccagagccctgctggagtgcagaagagagctgatgcagctggagaaggagctggtggagagacagccccaggtggacatgctgcaggagatcagcaacagcctgctgatcaagggccacggcgaggactgcatcgaggccgaggagaaggtgcacgtgatcgagaagaagctgaagcagctgagagagcaggtgagccaggacctgatggccctgcagggcacccagaaccccgccagccccctgcccagcttcgacgaggtggacagcggcgaccagccccccgccaccagcgtgcccgcccccagagccaagttcagagccgtgagaaccaccgagggcgaggaggagaccgagagcagagtgcccggcagcaccagaccccagagaagcttcctgagcagagtggtgagagccgccctgcccctgcagctgctgctgctgctgctgctgctgctggcctgcctgctgcccagcagcgaggaggactacagctgcacccaggccaacaacttcgccagaagcttctaccccatgctgagatacaccaacggccccccccccacctag

SEQ ID NO: 100490 - DNA, 2292 bp, synthetic construct
  misc_feature 1..2292: note = Description of Artificial Sequence: Synthetic coding sequence
  source 1..2292: mol_type = other DNA
atgagcatggagagaagaatgaagatcgaggagacctggagactgtggcagaagttcctggacgactacagcagattcgaggactggctgaagagcgccgagagaaccgccgcctgccccaacagcagcgaggtgctgtacaccagcgccaaggaggagctgaagagattcgaggccttccagagacagatccacgagagactgacccagctggagctgatcaacaagcagtacagaagactggccagagagaacagaaccgacaccgccagcagactgaagcagatggtgcacgagggcaaccagagatgggacaacctgcagagaagagtgaccgccgtgctgagaagactgagacacttcaccaaccagagagaggagttcgagggcaccagagagagcatcctggtgtggctgaccgagatggacctgcagctgaccaacgtggagcacttcagcgagagcgacgccgacgacaagatgagacagctgaacggcttccagcaggagatcaccctgaacaccaacaagatcgaccagctgatcgtgttcggcgagcagctgatccagaagagcgagcccctggacgccgtgctgatcgaggacgagctggaggagctgcacagatactgccaggaggtgttcggcagagtgagcagattccacagaagactgaccagctgcacccccggcctggaggacgagaaggaggccagcgagaacgagaccgacatggaggaccccagagagatccagaccgacagctggagaaagagaggcgagagcgaggagcccagcagcccccagagcctgtgccacctggtggcccccggccacgagagaagcggctgcgagacccccgtgagcgtggacagcatccccctggagtgggaccacaccggcgacgtgggcggcagcagcagccacgaggaggacgaggagggcccctactacagcgccctgagcggcaagagcatcagcgacggccacagctggcacgtgcccgacagccccagctgccccgagcaccactacaagcagatggagggcgacagaaacgtgccccccgtgccccccgccagcagcaccccctacaagcccccctacggcaagctgctgctgccccccggcaccgacggcggcaaggagggccccagagtgctgaacggcaacccccagcaggaggacggcggcctggccggcatcaccgagcagcagagcggcgccttcgacagatgggagatgatccaggcccaggagctgcacaacaagctgaagatcaagcagaacctgcagcagctgaacagcgacatcagcgccatcaccacctggctgaagaagaccgaggccgagctggagatgctgaagatggccaagccccccagcgacatccaggagatcgagctgagagtgaagagactgcaggagatcctgaaggccttcgacacctacaaggccctggtggtgagcgtgaacgtgagcagcaaggagttcctgcagaccgagagccccgagagcaccgagctgcagagcagactgagacagctgagcctgctgtgggaggccgcccagggcgccgtggacagctggagaggcggcctgagacagagcctgatgcagtgccaggacttccaccagctgagccagaacctgctgctgtggctggccagcgccaagaacagaagacagaaggcccacgtgaccgaccccaaggccgaccccagagccctgctggagtgcagaagagagctgatgcagctggagaaggagctggtggagagacagccccaggtggacatgctgcaggagatcagcaacagcctgctgatcaagggccacggcgaggactgcatcgaggccgaggagaaggtgcacgtgatcgagaagaagctgaagcagctgagagagcaggtgagccaggacctgatggccctgcagggcacccagaaccccgccagccccctgcccagcttcgacgaggtggacagcggcgaccagccccccgccaccagcgtgcccgcccccagagccaagcagttcagagccgtgagaaccaccgagggcgaggaggagaccgagagcagagtgcccggcagcaccagaccccagagaagcttcctgagcagagtggtgagagccgccctgcccctgcagctgctgctgctgctgctgctgctgctggcctgcctgctgcccagcagcgaggaggactacagctgcacccaggccaacaacttcgccagaagcttctaccccatgctgagatacaccaacggccccccccccacctag

SEQ ID NO: 100491 - DNA, 7251 bp, synthetic construct
  misc_feature 1..7251: note = Description of Artificial Sequence: Synthetic coding sequence
  source 1..7251: mol_type = other DNA
atggagcagttccccaaggagaccgtggtggagagcagcggccccaaggtgctggagaccgccgaggagatccaggagagaagacaggaggtgctgaccagataccagagcttcaaggagagagtggccgagagaggccagaagctggaggacagctaccacctgcaggtgttcaagagagacgccgacgacctgggcaagtggatcatggagaaggtgaacatcctgaccgacaagagctacgaggaccccaccaacatccagggcaagtaccagaagcaccagagcctggaggccgaggtgcagaccaagagcagactgatgagcgagctggagaagaccagagaggagagattcaccatgggccacagcgcccacgaggagaccaaggcccacatcgaggagctgagacacctgtgggacctgctgctggagctgaccctggagaagggcgaccagctgctgagagccctgaagttccagcagtacgtgcaggagtgcgccgacatcctggagtggatcggcgacaaggaggccatcgccaccagcgtggagctgggcgaggactgggagagaaccgaggtgctgcacaagaagttcgaggacttccaggtggagctggtggccaaggagggcagagtggtggaggtgaaccagtacgccaacgagtgcgccgaggagaaccaccccgacctgcccctgatccagagcaagcagaacgaggtgaacgccgcctgggagagactgagaggcctggccctgcagagacagaaggccctgagcaacgccgccaacctgcagagattcaagagagacgtgaccgaggccatccagtggatcaaggagaaggagcccgtgctgaccagcgaggactacggcaaggacctggtggccagcgagggcctgttccacagccacaagggcctggagagaaacctggccgtgatgagcgacaaggtgaaggagctgtgcgccaaggccgagaagctgaccctgagccaccccagcgacgccccccagatccaggagatgaaggaggacctggtgagcagctgggagcacatcagagccctggccaccagcagatacgagaagctgcaggccacctactggtaccacagattcagcagcgacttcgacgagctgagcggctggatgaacgagaagaccgccgccatcaacgccgacgagctgcccaccgacgtggccggcggcgaggtgctgctggacagacaccagcagcacaagcacgagatcgacagctacgacgacagattccagagcgccgacgagaccggccaggacctggtgaacgccaaccacgaggccagcgacgaggtgagagagaagatggagatcctggacaacaactggaccgccctgctggagctgtgggacgagagacacagacagtacgagcagtgcctggacttccacctgttctacagagacagcgagcaggtggacagctggatgagcagacaggaggccttcctggagaacgaggacctgggcaacagcctgggcagcgccgaggccctgctgcagaagcacgaggacttcgaggaggccttcaccgcccaggaggagaagatcatcaccgtggacaagaccgccaccaagctgatcggcgacgaccactacgacagcgagaacatcaaggccatcagagacggcctgctggccagaagagacgccctgagagagaaggccgccaccagaagaagactgctgaaggagagcctgctgctgcagaagctgtacgaggacagcgacgacctgaagaactggatcaacaagaagaagaagctggccgacgacgaggactacaaggacatccagaacctgaagagcagagtgcagaagcagcaggtgttcgagaaggagctggccgtgaacaagacccagctggagaacatccagaagaccggccaggagatgatcgagggcggccactacgccagcgacaacgtgaccaccagactgagcgaggtggccagcctgtgggaggagctgctggaggccaccaagcagaagggcacccagctgcacgaggccaaccagcagctgcagttcgagaacaacgccgaggacctgcagagatggctggaggacgtggagtggcaggtgaccagcgaggactacggcaagggcctggccgaggtgcagaacagactgagaaagcacggcctgctggagagcgccgtggccgccagacaggaccaggtggacatcctgaccgacctggccgcctacttcgaggagatcggccaccccgacagcaaggacatcagagccagacaggagagcctggtgtgcagattcgaggccctgaaggagcccctggccaccagaaagaagaagctgctggacctgctgcacctgcagctgatctgcagagacaccgaggacgaggaggcctggatccaggagaccgagcccagcgccaccagcacctacctgggcaaggacctgatcgccagcaagaagctgctgaacagacacagagtgatcctggagaacatcgccagccacgagcccagaatccaggagatcaccgagagaggcaacaagatggtggaggagggccacttcgccgccgaggacgtggccagcagagtgaagagcctgaaccagaacatggagagcctgagagccagagccgccagaagacagaacgacctggaggccaacgtgcagttccagcagtacctggccgacctgcacgaggccgagacctggatcagagagaaggagcccatcgtggacaacaccaactacggcgccgacgaggaggccgccggcgccctgctgaagaagcacgaggccttcctgctggacctgaacagcttcggcgacagcatgaaggccctgagaaaccaggccaacgcctgccagcagcagcaggccgcccccgtggagggcgtggccggcgagcagagagtgatggccctgtacgacttccaggccagaagccccagagaggtgaccatgaagaagggcgacgtgctgaccctgctgagcagcatcaacaaggactggtggaaggtggaggccgccgaccaccagggcatcgtgcccgccgtgtacgtgagaagactggcccacgacgagttccccatgctgccccagagaagaagagaggagcccggcaacatcacccagagacaggagcagatcgagaaccagtacagaagcctgctggacagagccgaggagagaagaagaagactgctgcagagatacaacgagttcctgctggcctacgaggccggcgacatgctggagtggatccaggagaagaaggccgagaacaccggcgtggagctggacgacgtgtgggagctgcagaagaagttcgacgagttccagaaggacctgaacaccaacgagcccagactgagagacatcaacaaggtggccgacgacctgctgttcgagggcctgctgacccccgagggcgcccagatcagacaggagctgaacagcagatggggcagcctgcagagactggccgacgagcagagacagctgctgggcagcgcccacgccgtggaggtgttccacagagaggccgacgacaccaaggagcagatcgagaagaagtgccaggccctgagcgccgccgaccccggcagcgacctgttcagcgtgcaggccctgcagagaagacacgagggcttcgagagagacctggtgcccctgggcgacaaggtgaccatcctgggcgagaccgccgagagactgagcgagagccaccccgacgccaccgaggacctgcagagacagaagatggagctgaacgaggcctgggaggacctgcagggcagaaccaaggacagaaaggagagcctgaacgaggcccagaagttctacctgttcctgagcaaggccagagacctgcagaactggatcagcagcatcggcggcatggtgagcagccaggagctggccgaggacctgaccggcatcgagatcctgctggagagacaccaggagcacagagccgacatggaggccgaggcccccaccttccaggccctggaggacttcagcgccgagctgatcgacagcggccaccacgccagccccgagatcgagaagaagctgcaggccgtgaagctggagagagacgacctggagaaggcctgggagaagagaaagaagatcctggaccagtgcctggagctgcagatgttccagggcaactgcgaccaggtggagagctggatggtggccagagagaacagcctgagaagcgacgacaagagcagcctggacagcctggaggccctgatgaagaagagagacgacctggacaaggccatcaccgcccaggagggcaagatcaccgacctggagcacttcgccgagagcctgatcgccgacgagcactacgccaaggaggagatcgccaccagactgcagagagtgctggacagatggaaggccctgaaggcccagctgatcgacgagagaaccaagctgggcgactacgccaacctgaagcagttctacagagacctggaggagctggaggagtggatcagcgagatgctgcccaccgcctgcgacgagagctacaaggacgccaccaacatccagagaaagtacctgaagcaccagaccttcgcccacgaggtggacggcagaagcgagcaggtgcacggcgtgatcaacctgggcaacagcctgatcgagtgcagcgcctgcgacggcaacgaggaggccatgaaggagcagctggagcagctgaaggagcactgggaccacctgctggagagaaccaacgacaagggcaagaagctgaacgaggccagcagacagcagagattcaacaccagcatcagagacttcgagttctggctgagcgaggccgagaccctgctggccatgaaggaccaggccagagacctggccagcgccggcaacctgctgaagaagcaccagctgctggagagagagatgctggccagagaggacgccctgaaggacctgaacaccctggccgaggacctgctgagcagcggcaccttcaacgtggaccagatcgtgaagaagaaggacaacgtgaacaagagattcctgaacgtgcaggagctggccgccgcccaccacgagaagctgaaggaggcctacgccctgttccagttcttccaggacctggacgacgaggagagctggatcgaggagaagctgatcagagtgagcagccaggactacggcagagacctgcagggcgtgcagaacctgctgaagaagcacaagagactggagggcgagctggtggcccacgagcccgccatccagaacgtgctggacatggccgagaagctgaaggacaaggccgccgtgggccaggaggagatccagctgagactggcccagttcgtggagcactgggagaagctgaaggagctggccaaggccagaggcctgaagctggaggagagcctggagtacctgcagttcatgcagaacgccgaggaggaggaggcctggatcaacgagaagaacgccctggccgtgagaggcgactgcggcgacaccctggccgccacccagagcctgctgatgaagcacgaggccctggagaacgacttcgccgtgcacgagaccagagtgcagaacgtgtgcgcccagggcgaggacatcctgaacaaggaggagagccagaacaaggagatcagcagcaagatcgaggccctgaacgagaagacccccagcctggccaaggccatcgccgcctggaagctgcagctggaggacgactacgccttccaggagttcaactggaaggccgacgtggtggaggcctggatcgccgacaaggagaccagcctgaagaccaacggcaacggcgccgacctgggcgacttcctgaccctgctggccaagcaggacaccctggacgccagcctgcagagcttccagcaggagagactgcccgagatcaccgacctgaaggacaagctgatcagcgcccagcacaaccagagcaaggccatcgaggagagatacgccgccctgctgaagagatgggagcagctgctggaggccagcgccgtgcacagacagaagctgctggagaagcagctgcccctgcagaaggccgaggacctgttcgtggagttcgcccacaaggccagcgccctgaacaactggtgcgagaagatggaggagaacctgagcgagcccgtgcactgcgtgagcctgaacgagatcagacagctgcagaaggaccacgaggacttcctggccagcctggccagagcccaggccgacttcaagtgcctgctggagctggaccagcagatcaaggccctgggcgtgcccagcagcccctacacctggctgaccgtggaggtgctggagagaacctggaagcacctgagcgacatcatcgaggagagagagcaggagctgcagaaggaggaggccagacaggtgaagaacttcgagatgtgccaggagttcgagcagaacgccagcaccttcctgcagtggatcctggagaccagagcctacttcctggacggcagcctgctgaaggagaccggcaccctggagagccagctggaggccaacaagagaaagcagaaggagatccaggccatgaagagacagctgaccaagatcgtggacctgggcgacaacctggaggacgccctgatcctggacatcaagtacagcaccatcggcctggcccagcagtgggaccagctgtaccagctgggcctgagaatgcagcacaacctggagcagcagatccaggccaaggacatcaagggcgtgagcgaggagaccctgaaggagttcagcaccatctacaagcacttcgacgagaacctgaccggcagactgacccacaaggagttcagaagctgcctgagaggcctgaactactacctgcccatggtggaggaggacgagcacgagcccaagttcgagaagttcctggacgccgtggaccccggcagaaagggctacgtgagcctggaggactacaccgccttcctgatcgacaaggagagcgagaacatcaagagcagcgacgagatcgagaacgccttccaggccctggccgagggcaagagctacatcaccaaggaggacatgaagcaggccctgacccccgagcaggtgagcttctgcgccacccacatgcagcagtacatggaccccagaggcagaagccacctgagcggctacgactacgtgggcttcaccaacagctacttcggcaactag

SEQ ID NO: 100492 - DNA, 7260 bp, synthetic construct
  misc_feature 1..7260: note = Description of Artificial Sequence: Synthetic coding sequence
  source 1..7260: mol_type = other DNA
atggagcagttccccaaggagaccgtggtggagagcagcggccccaaggtgctggagaccgccgaggagatccaggagagaagacaggaggtgctgaccagataccagagcttcaaggagagagtggccgagagaggccagaagctggaggacagctaccacctgcaggtgttcaagagagacgccgacgacctgggcaagtggatcatggagaaggtgaacatcctgaccgacaagagctacgaggaccccaccaacatccagggcaagtaccagaagcaccagagcctggaggccgaggtgcagaccaagagcagactgatgagcgagctggagaagaccagagaggagagattcaccatgggccacagcgcccacgaggagaccaaggcccacatcgaggagctgagacacctgtgggacctgctgctggagctgaccctggagaagggcgaccagctgctgagagccctgaagttccagcagtacgtgcaggagtgcgccgacatcctggagtggatcggcgacaaggaggccatcgccaccagcgtggagctgggcgaggactgggagagaaccgaggtgctgcacaagaagttcgaggacttccaggtggagctggtggccaaggagggcagagtggtggaggtgaaccagtacgccaacgagtgcgccgaggagaaccaccccgacctgcccctgatccagagcaagcagaacgaggtgaacgccgcctgggagagactgagaggcctggccctgcagagacagaaggccctgagcaacgccgccaacctgcagagattcaagagagacgtgaccgaggccatccagtggatcaaggagaaggagcccgtgctgaccagcgaggactacggcaaggacctggtggccagcgagggcctgttccacagccacaagggcctggagagaaacctggccgtgatgagcgacaaggtgaaggagctgtgcgccaaggccgagaagctgaccctgagccaccccagcgacgccccccagatccaggagatgaaggaggacctggtgagcagctgggagcacatcagagccctggccaccagcagatacgagaagctgcaggccacctactggtaccacagattcagcagcgacttcgacgagctgagcggctggatgaacgagaagaccgccgccatcaacgccgacgagctgcccaccgacgtggccggcggcgaggtgctgctggacagacaccagcagcacaagcacgagatcgacagctacgacgacagattccagagcgccgacgagaccggccaggacctggtgaacgccaaccacgaggccagcgacgaggtgagagagaagatggagatcctggacaacaactggaccgccctgctggagctgtgggacgagagacacagacagtacgagcagtgcctggacttccacctgttctacagagacagcgagcaggtggacagctggatgagcagacaggaggccttcctggagaacgaggacctgggcaacagcctgggcagcgccgaggccctgctgcagaagcacgaggacttcgaggaggccttcaccgcccaggaggagaagatcatcaccgtggacaagaccgccaccaagctgatcggcgacgaccactacgacagcgagaacatcaaggccatcagagacggcctgctggccagaagagacgccctgagagagaaggccgccaccagaagaagactgctgaaggagagcctgctgctgcagaagctgtacgaggacagcgacgacctgaagaactggatcaacaagaagaagaagctggccgacgacgaggactacaaggacatccagaacctgaagagcagagtgcagaagcagcaggtgttcgagaaggagctggccgtgaacaagacccagctggagaacatccagaagaccggccaggagatgatcgagggcggccactacgccagcgacaacgtgaccaccagactgagcgaggtggccagcctgtgggaggagctgctggaggccaccaagcagaagggcacccagctgcacgaggccaaccagcagctgcagttcgagaacaacgccgaggacctgcagagatggctggaggacgtggagtggcaggtgaccagcgaggactacggcaagggcctggccgaggtgcagaacagactgagaaagcacggcctgctggagagcgccgtggccgccagacaggaccaggtggacatcctgaccgacctggccgcctacttcgaggagatcggccaccccgacagcaaggacatcagagccagacaggagagcctggtgtgcagattcgaggccctgaaggagcccctggccaccagaaagaagaagctgctggacctgctgcacctgcagctgatctgcagagacaccgaggacgaggaggcctggatccaggagaccgagcccagcgccaccagcacctacctgggcaaggacctgatcgccagcaagaagctgctgaacagacacagagtgatcctggagaacatcgccagccacgagcccagaatccaggagatcaccgagagaggcaacaagatggtggaggagggccacttcgccgccgaggacgtggccagcagagtgaagagcctgaaccagaacatggagagcctgagagccagagccgccagaagacagaacgacctggaggccaacgtgcagttccagcagtacctggccgacctgcacgaggccgagacctggatcagagagaaggagcccatcgtggacaacaccaactacggcgccgacgaggaggccgccggcgccctgctgaagaagcacgaggccttcctgctggacctgaacagcttcggcgacagcatgaaggccctgagaaaccaggccaacgcctgccagcagcagcaggccgcccccgtggagggcgtggccggcgagcagagagtgatggccctgtacgacttccaggccagaagccccagagaggtgaccatgaagaagggcgacgtgctgaccctgctgagcagcatcaacaaggactggtggaaggtggaggccgccgaccaccagggcatcgtgcccgccgtgtacgtgagaagactggcccacgacgagttccccatgctgccccagagaagaagagaggagcccggcaacatcacccagagacaggagcagatcgagaaccagtacagaagcctgctggacagagccgaggagagaagaagaagactgctgcagagatacaacgagttcctgctggcctacgaggccggcgacatgctggagtggatccaggagaagaaggccgagaacaccggcgtggagctggacgacgtgtgggagctgcagaagaagttcgacgagttccagaaggacctgaacaccaacgagcccagactgagagacatcaacaaggtggccgacgacctgctgttcgagggcctgctgacccccgagggcgcccagatcagacaggagctgaacagcagatggggcagcctgcagagactggccgacgagcagagacagctgctgggcagcgcccacgccgtggaggtgttccacagagaggccgacgacaccaaggagcagatcgagaagaagtgccaggccctgagcgccgccgaccccggcagcgacctgttcagcgtgcaggccctgcagagaagacacgagggcttcgagagagacctggtgcccctgggcgacaaggtgaccatcctgggcgagaccgccgagagactgagcgagagccaccccgacgccaccgaggacctgcagagacagaagatggagctgaacgaggcctgggaggacctgcagggcagaaccaaggacagaaaggagagcctgaacgaggcccagaagttctacctgttcctgagcaaggccagagacctgcagaactggatcagcagcatcggcggcatggtgagcagccaggagctggccgaggacctgaccggcatcgagatcctgctggagagacaccaggagcacagagccgacatggaggccgaggcccccaccttccaggccctggaggacttcagcgccgagctgatcgacagcggccaccacgccagccccgagatcgagaagaagctgcaggccgtgaagctggagagagacgacctggagaaggcctgggagaagagaaagaagatcctggaccagtgcctggagctgcagatgttccagggcaactgcgaccaggtggagagctggatggtggccagagagaacagcctgagaagcgacgacaagagcagcctggacagcctggaggccctgatgaagaagagagacgacctggacaaggccatcaccgcccaggagggcaagatcaccgacctggagcacttcgccgagagcctgatcgccgacgagcactacgccaaggaggagatcgccaccagactgcagagagtgctggacagatggaaggccctgaaggcccagctgatcgacgagagaaccaagctgggcgactacgccaacctgaagcagttctacagagacctggaggagctggaggagtggatcagcgagatgctgcccaccgcctgcgacgagagctacaaggacgccaccaacatccagagaaagtacctgaagcaccagaccttcgcccacgaggtggacggcagaagcgagcaggtgcacggcgtgatcaacctgggcaacagcctgatcgagtgcagcgcctgcgacggcaacgaggaggccatgaaggagcagctggagcagctgaaggagcactgggaccacctgctggagagaaccaacgacaagggcaagaagctgaacgaggccagcagacagcagagattcaacaccagcatcagagacttcgagttctggctgagcgaggccgagaccctgctggccatgaaggaccaggccagagacctggccagcgccggcaacctgctgaagaagcaccagctgctggagagagagatgctggccagagaggacgccctgaaggacctgaacaccctggccgaggacctgctgagcagcggcaccttcaacgtggaccagatcgtgaagaagaaggacaacgtgaacaagagattcctgaacgtgcaggagctggccgccgcccaccacgagaagctgaaggaggcctacgccctgttccagttcttccaggacctggacgacgaggagagctggatcgaggagaagctgatcagagtgagcagccaggactacggcagagacctgcagggcgtgcagaacctgctgaagaagcacaagagactggagggcgagctggtggcccacgagcccgccatccagaacgtgctggacatggccgagaagctgaaggacaaggccgccgtgggccaggaggagatccagctgagactggcccagttcgtggagcactgggagaagctgaaggagctggccaaggccagaggcctgaagctggaggagagcctggagtacctgcagttcatgcagaacgccgaggaggaggaggcctggatcaacgagaagaacgccctggccgtgagaggcgactgcggcgacaccctggccgccacccagagcctgctgatgaagcacgaggccctggagaacgacttcgccgtgcacgagaccagagtgcagaacgtgtgcgcccagggcgaggacatcctgaacaaggtgctgcaggaggagagccagaacaaggagatcagcagcaagatcgaggccctgaacgagaagacccccagcctggccaaggccatcgccgcctggaagctgcagctggaggacgactacgccttccaggagttcaactggaaggccgacgtggtggaggcctggatcgccgacaaggagaccagcctgaagaccaacggcaacggcgccgacctgggcgacttcctgaccctgctggccaagcaggacaccctggacgccagcctgcagagcttccagcaggagagactgcccgagatcaccgacctgaaggacaagctgatcagcgcccagcacaaccagagcaaggccatcgaggagagatacgccgccctgctgaagagatgggagcagctgctggaggccagcgccgtgcacagacagaagctgctggagaagcagctgcccctgcagaaggccgaggacctgttcgtggagttcgcccacaaggccagcgccctgaacaactggtgcgagaagatggaggagaacctgagcgagcccgtgcactgcgtgagcctgaacgagatcagacagctgcagaaggaccacgaggacttcctggccagcctggccagagcccaggccgacttcaagtgcctgctggagctggaccagcagatcaaggccctgggcgtgcccagcagcccctacacctggctgaccgtggaggtgctggagagaacctggaagcacctgagcgacatcatcgaggagagagagcaggagctgcagaaggaggaggccagacaggtgaagaacttcgagatgtgccaggagttcgagcagaacgccagcaccttcctgcagtggatcctggagaccagagcctacttcctggacggcagcctgctgaaggagaccggcaccctggagagccagctggaggccaacaagagaaagcagaaggagatccaggccatgaagagacagctgaccaagatcgtggacctgggcgacaacctggaggacgccctgatcctggacatcaagtacagcaccatcggcctggcccagcagtgggaccagctgtaccagctgggcctgagaatgcagcacaacctggagcagcagatccaggccaaggacatcaagggcgtgagcgaggagaccctgaaggagttcagcaccatctacaagcacttcgacgagaacctgaccggcagactgacccacaaggagttcagaagctgcctgagaggcctgaactactacctgcccatggtggaggaggacgagcacgagcccaagttcgagaagttcctggacgccgtggaccccggcagaaagggctacgtgagcctggaggactacaccgccttcctgatcgacaaggagagcgagaacatcaagagcagcgacgagatcgagaacgccttccaggccctggccgagggcaagagctacatcaccaaggaggacatgaagcaggccctgacccccgagcaggtgagcttctgcgccacccacatgcagcagtacatggaccccagaggcagaagccacctgagcggctacgactacgtgggcttcaccaacagctacttcggcaactag

SEQ ID NO: 100493 - DNA, 7434 bp, synthetic construct
  misc_feature 1..7434: note = Description of Artificial Sequence: Synthetic coding sequence
  source 1..7434: mol_type = other DNA
atggaccccagcggcgtgaaggtgctggagaccgccgaggacatccaggagagaagacagcaggtgctggacagataccacagattcaaggagctgagcaccctgagaagacagaagctggaggacagctacagattccagttcttccagagagacgccgaggagctggagaagtggatccaggagaagctgcagatcgccagcgacgagaactacaaggaccccaccaacctgcagggcaagctgcagaagcaccaggccttcgaggccgaggtgcaggccaacagcggcgccatcgtgaagctggacgagaccggcaacctgatgatcagcgagggccacttcgccagcgagaccatcagaaccagactgatggagctgcacagacagtgggagctgctgctggagaagatgagagagaagggcatcaagctgctgcaggcccagaagctggtgcagtacctgagagagtgcgaggacgtgatggactggatcaacgacaaggaggccatcgtgaccagcgaggagctgggccaggacctggagcacgtggaggtgctgcagaagaagttcgaggagttccagaccgacatggccgcccacgaggagagagtgaacgaggtgaaccagttcgccgccaagctgatccaggagcagcaccccgaggaggagctgatcaagaccaagcaggacgaggtgaacgccgcctggcagagactgaagggcctggccctgcagagacagggcaagctgttcggcgccgccgaggtgcagagattcaacagagacgtggacgagaccatcagctggatcaaggagaaggagcagctgatggccagcgacgacttcggcagagacctggccagcgtgcaggccctgctgagaaagcacgagggcctggagagagacctggccgccctggaggacaaggtgaaggccctgtgcgccgaggccgacagactgcagcagagccaccccctgagcgccacccagatccaggtgaagagagaggagctgatcaccaactgggagcagatcagaaccctggccgccgagagacacgccagactgaacgacagctacagactgcagagattcctggccgacttcagagacctgaccagctgggtgaccgagatgaaggccctgatcaacgccgacgagctggccagcgacgtggccggcgccgaggccctgctggacagacaccaggagcacaagggcgagatcgacgcccacgaggacagcttcaagagcgccgacgagagcggccaggccctgctggccgccggccactacgccagcgacgaggtgagagagaagctgaccgtgctgagcgaggagagagccgccctgctggagctgtgggagctgagaagacagcagtacgagcagtgcatggacctgcagctgttctacagagacaccgagcaggtggacaactggatgagcaagcaggaggccttcctgctgaacgaggacctgggcgacagcctggacagcgtggaggccctgctgaagaagcacgaggacttcgagaagagcctgagcgcccaggaggagaagatcaccgccctggacgagttcgccaccaagctgatccagaacaaccactacgccatggaggacgtggccaccagaagagacgccctgctgagcagaagaaacgccctgcacgagagagccatgagaagaagagcccagctggccgacagcttccacctgcagcagttcttcagagacagcgacgagctgaagagctgggtgaacgagaagatgaagaccgccaccgacgaggcctacaaggaccccagcaacctgcagggcaaggtgcagaagcaccaggccttcgaggccgagctgagcgccaaccagagcagaatcgacgccctggagaaggccggccagaagctgatcgacgtgaaccactacgccaaggacgaggtggccgccagaatgaacgaggtgatcagcctgtggaagaagctgctggaggccaccgagctgaagggcatcaagctgagagaggccaaccagcagcagcagttcaacagaaacgtggaggacatcgagctgtggctgtacgaggtggagggccacctggccagcgacgactacggcaaggacctgaccaacgtgcagaacctgcagaagaagcacgccctgctggaggccgacgtggccgcccaccaggacagaatcgacggcatcaccatccaggccagacagttccaggacgccggccacttcgacgccgagaacatcaagaagaagcaggaggccctggtggccagatacgaggccctgaaggagcccatggtggccagaaagcagaagctggccgacagcctgagactgcagcagctgttcagagacgtggaggacgaggagacctggatcagagagaaggagcccatcgccgccagcaccaacagaggcaaggacctgatcggcgtgcagaacctgctgaagaagcaccaggccctgcaggccgagatcgccggccacgagcccagaatcaaggccgtgacccagaagggcaacgccatggtggaggagggccacttcgccgccgaggacgtgaaggccaagctgcacgagctgaaccagaagtgggaggccctgaaggccaaggccagccagagaagacaggacctggaggacagcctgcaggcccagcagtacttcgccgacgccaacgaggccgagagctggatgagagagaaggagcccatcgtgggcagcaccgactacggcaaggacgaggacagcgccgaggccctgctgaagaagcacgaggccctgatgagcgacctgagcgcctacggcagcagcatccaggccctgagagagcaggcccagagctgcagacagcaggtggcccccaccgacgacgagaccggcaaggagctggtgctggccctgtacgactaccaggagaagagccccagagaggtgaccatgaagaagggcgacatcctgaccctgctgaacagcaccaacaaggactggtggaaggtggaggtgaacgacagacagggcttcgtgcccgccgcctacgtgaagaagctggaccccgcccagagcgccagcagagagaacctgctggaggagcagggcagcatcgccctgagacaggagcagatcgacaaccagaccagaatcaccaaggaggccggcagcgtgagcctgagaatgaagcaggtggaggagctgtaccacagcctgctggagctgggcgagaagagaaagggcatgctggagaagagctgcaagaagttcatgctgttcagagaggccaacgagctgcagcagtggatcaacgagaaggaggccgccctgaccagcgaggaggtgggcgccgacctggagcaggtggaggtgctgcagaagaagttcgacgacttccagaaggacctgaaggccaacgagagcagactgaaggacatcaacaaggtggccgaggacctggagagcgagggcctgatggccgaggaggtgcaggccgtgcagcagcaggaggtgtacggcatgatgcccagagacgagaccgacagcaagaccgccagcccctggaagagcgccagactgatggtgcacaccgtggccaccttcaacagcatcaaggagctgaacgagagatggagaagcctgcagcagctggccgaggagagaagccagctgctgggcagcgcccacgaggtgcagagattccacagagacgccgacgagaccaaggagtggatcgaggagaagaaccaggccctgaacaccgacaactacggccacgacctggccagcgtgcaggccctgcagagaaagcacgagggcttcgagagagacctggccgccctgggcgacaaggtgaacagcctgggcgagaccgccgagagactgatccagagccaccccgagagcgccgaggacctgcaggagaagtgcaccgagctgaaccaggcctggagcagcctgggcaagagagccgaccagagaaaggccaagctgggcgacagccacgacctgcagagattcctgagcgacttcagagacctgatgagctggatcaacggcatcagaggcctggtgagcagcgacgagctggccaaggacgtgaccggcgccgaggccctgctggagagacaccaggagcacagaaccgagatcgacgccagagccggcaccttccaggccttcgagcagttcggccagcagctgctggcccacggccactacgccagccccgagatcaagcagaagctggacatcctggaccaggagagagccgacctggagaaggcctgggtgcagagaagaatgatgctggaccagtgcctggagctgcagctgttccacagagactgcgagcaggccgagaactggatggccgccagagaggccttcctgaacaccgaggacaagggcgacagcctggacagcgtggaggccctgatcaagaagcacgaggacttcgacaaggccatcaacgtgcaggaggagaagatcgccgccctgcaggccttcgccgaccagctgatcgccgccggccactacgccaagggcgacatcagcagcagaagaaacgaggtgctggacagatggagaagactgaaggcccagatgatcgagaagagaagcaagctgggcgagagccagaccctgcagcagttcagcagagacgtggacgagatcgaggcctggatcagcgagaagctgcagaccgccagcgacgagagctacaaggaccccaccaacatccaggtgagcctgatgctgagcaagcaccagaagcaccaggccttcgaggccgagctgcacgccaacgccgacagaatcagaggcgtgatcgacatgggcaacagcctgatcgagagaggcgcctgcgccggcagcgaggacgccgtgaaggccagactggccgccctggccgaccagtggcagttcctggtgcagaagagcgccgagaagagccagaagctgaaggaggccaacaagcagcagaacttcaacaccggcatcaaggacttcgacttctggctgagcgaggtggaggccctgctggccagcgaggactacggcaaggacctggccagcgtgaacaacctgctgaagaagcaccagctgctggaggccgacatcagcgcccacgaggacagactgaaggacctgaacagccaggccgacagcctgatgaccagcagcgccttcgacaccagccaggtgaaggacaagagagacaccatcaacggcagattccagaagatcaagagcatggccgccagcagaagagccaagctgaacgagagccacagactgcaccagttcttcagagacatggacgacgaggagagctggatcaaggagaagaagctgctggtgggcagcgaggactacggcagagacctgaccggcgtgcagaacctgagaaagaagcacaagagactggaggccgagctggccgcccacgagcccgccatccagggcgtgctggacaccggcaagaagctgagcgacgacaacaccatcggcaaggaggagatccagcagagactggcccagttcgtggagcactggaaggagctgaagcagctggccgccgccagaggccagagactggaggagagcctggagtaccagcagttcgtggccaacgtggaggaggaggaggcctggatcaacgagaagatgaccctggtggccagcgaggactacggcgacaccctggccgccatccagggcctgctgaagaagcacgaggccttcgagaccgacttcaccgtgcacaaggacagagtgaacgacgtgtgcaccaacggccaggacctgatcaagaagaacaaccaccacgaggagaacatcagcagcaagatgaagggcctgaacggcaaggtgagcgacctggagaaggccgccgcccagagaaaggccaagctggacgagaacagcgccttcctgcagttcaactggaaggccgacgtggtggagagctggatcggcgagaaggagaacagcctgaagaccgacgactacggcagagacctgagcagcgtgcagaccctgctgaccaagcaggagaccttcgacgccggcctgcaggccttccagcaggagggcatcgccaacatcaccgccctgaaggaccagctgctggccgccaagcacgtgcagagcaaggccatcgaggccagacacgccagcctgatgaagagatggagccagctgctggccaacagcgccgccagaaagaagaagctgctggaggcccagagccacttcagaaaggtggaggacctgttcctgaccttcgccaagaaggccagcgccttcaacagctggttcgagaacgccgaggaggacctgaccgaccccgtgagatgcaacagcctggaggagatcaaggccctgagagaggcccacgacgccttcagaagcagcctgagcagcgcccaggccgacttcaaccagctggccgagctggacagacagatcaagagcttcagagtggccagcaacccctacacctggttcaccatggaggccctggaggagacctggagaaacctgcagaagatcatcaaggagagagagctggagctgcagaaggagcagagaagacaggaggagaacgacaagctgagacaggagttcgcccagcacgccaacgccttccaccagtggatccaggagaccagatgccagcccgccggcgccagctgcatggtggaggagagcggcaccctggagagccagctggaggccaccaagagaaagcaccaggagatcagagccatgagaagccagctgaagaagatcgaggacctgggcgccgccatggaggaggccctgatcctggacaacaagtacaccgagcacagcaccgtgggcctggcccagcagtgggaccagctggaccagctgggcatgagaatgcagcacaacctggagcagcagatccaggccagaaacaccaccggcgtgaccgaggaggccctgaaggagttcagcatgatgttcaagcacttcgacaaggacaagagcggcagactgaaccaccaggagttcaagagctgcctgagaagcctgggctacgacctgcccatggtggaggagggcgagcccgaccccgagttcgaggccatcctggacaccgtggaccccaacagagacggccacgtgagcctgcaggagtacatggccttcatgatcagcagagagaccgagaacgtgaagagcagcgaggagatcgagagcgccttcagagccctgagcagcgagggcaagccctacgtgaccaaggaggagctgtaccagaacctgaccagagagcaggccgactactgcgtgagccacatgaagccctacgtggacggcaagggcagagagctgcccaccgccttcgactacgtggagttcaccagaagcctgttcgtgaactag

SEQ ID NO: 100494 - DNA, 7359 bp, synthetic construct
  misc_feature 1..7359: note = Description of Artificial Sequence: Synthetic coding sequence
  source 1..7359: mol_type = other DNA
atggaccccagcggcgtgaaggtgctggagaccgccgaggacatccaggagagaagacagcaggtgctggacagataccacagattcaaggagctgagcaccctgagaagacagaagctggaggacagctacagattccagttcttccagagagacgccgaggagctggagaagtggatccaggagaagctgcagatcgccagcgacgagaactacaaggaccccaccaacctgcagggcaagctgcagaagcaccaggccttcgaggccgaggtgcaggccaacagcggcgccatcgtgaagctggacgagaccggcaacctgatgatcagcgagggccacttcgccagcgagaccatcagaaccagactgatggagctgcacagacagtgggagctgctgctggagaagatgagagagaagggcatcaagctgctgcaggcccagaagctggtgcagtacctgagagagtgcgaggacgtgatggactggatcaacgacaaggaggccatcgtgaccagcgaggagctgggccaggacctggagcacgtggaggtgctgcagaagaagttcgaggagttccagaccgacatggccgcccacgaggagagagtgaacgaggtgaaccagttcgccgccaagctgatccaggagcagcaccccgaggaggagctgatcaagaccaagcaggacgaggtgaacgccgcctggcagagactgaagggcctggccctgcagagacagggcaagctgttcggcgccgccgaggtgcagagattcaacagagacgtggacgagaccatcagctggatcaaggagaaggagcagctgatggccagcgacgacttcggcagagacctggccagcgtgcaggccctgctgagaaagcacgagggcctggagagagacctggccgccctggaggacaaggtgaaggccctgtgcgccgaggccgacagactgcagcagagccaccccctgagcgccacccagatccaggtgaagagagaggagctgatcaccaactgggagcagatcagaaccctggccgccgagagacacgccagactgaacgacagctacagactgcagagattcctggccgacttcagagacctgaccagctgggtgaccgagatgaaggccctgatcaacgccgacgagctggccagcgacgtggccggcgccgaggccctgctggacagacaccaggagcacaagggcgagatcgacgcccacgaggacagcttcaagagcgccgacgagagcggccaggccctgctggccgccggccactacgccagcgacgaggtgagagagaagctgaccgtgctgagcgaggagagagccgccctgctggagctgtgggagctgagaagacagcagtacgagcagtgcatggacctgcagctgttctacagagacaccgagcaggtggacaactggatgagcaagcaggaggccttcctgctgaacgaggacctgggcgacagcctggacagcgtggaggccctgctgaagaagcacgaggacttcgagaagagcctgagcgcccaggaggagaagatcaccgccctggacgagttcgccaccaagctgatccagaacaaccactacgccatggaggacgtggccaccagaagagacgccctgctgagcagaagaaacgccctgcacgagagagccatgagaagaagagcccagctggccgacagcttccacctgcagcagttcttcagagacagcgacgagctgaagagctgggtgaacgagaagatgaagaccgccaccgacgaggcctacaaggaccccagcaacctgcagggcaaggtgcagaagcaccaggccttcgaggccgagctgagcgccaaccagagcagaatcgacgccctggagaaggccggccagaagctgatcgacgtgaaccactacgccaaggacgaggtggccgccagaatgaacgaggtgatcagcctgtggaagaagctgctggaggccaccgagctgaagggcatcaagctgagagaggccaaccagcagcagcagttcaacagaaacgtggaggacatcgagctgtggctgtacgaggtggagggccacctggccagcgacgactacggcaaggacctgaccaacgtgcagaacctgcagaagaagcacgccctgctggaggccgacgtggccgcccaccaggacagaatcgacggcatcaccatccaggccagacagttccaggacgccggccacttcgacgccgagaacatcaagaagaagcaggaggccctggtggccagatacgaggccctgaaggagcccatggtggccagaaagcagaagctggccgacagcctgagactgcagcagctgttcagagacgtggaggacgaggagacctggatcagagagaaggagcccatcgccgccagcaccaacagaggcaaggacctgatcggcgtgcagaacctgctgaagaagcaccaggccctgcaggccgagatcgccggccacgagcccagaatcaaggccgtgacccagaagggcaacgccatggtggaggagggccacttcgccgccgaggacgtgaaggccaagctgcacgagctgaaccagaagtgggaggccctgaaggccaaggccagccagagaagacaggacctggaggacagcctgcaggcccagcagtacttcgccgacgccaacgaggccgagagctggatgagagagaaggagcccatcgtgggcagcaccgactacggcaaggacgaggacagcgccgaggccctgctgaagaagcacgaggccctgatgagcgacctgagcgcctacggcagcagcatccaggccctgagagagcaggcccagagctgcagacagcaggtggcccccaccgacgacgagaccggcaaggagctggtgctggccctgtacgactaccaggagaagagccccagagaggtgaccatgaagaagggcgacatcctgaccctgctgaacagcaccaacaaggactggtggaaggtggaggtgaacgacagacagggcttcgtgcccgccgcctacgtgaagaagctggaccccgcccagagcgccagcagagagaacctgctggaggagcagggcagcatcgccctgagacaggagcagatcgacaaccagtaccacagcctgctggagctgggcgagaagagaaagggcatgctggagaagagctgcaagaagttcatgctgttcagagaggccaacgagctgcagcagtggatcaacgagaaggaggccgccctgaccagcgaggaggtgggcgccgacctggagcaggtggaggtgctgcagaagaagttcgacgacttccagaaggacctgaaggccaacgagagcagactgaaggacatcaacaaggtggccgaggacctggagagcgagggcctgatggccgaggaggtgcaggccgtgcagcagcaggaggtgtacggcatgatgcccagagacgagaccgacagcaagaccgccagcccctggaagagcgccagactgatggtgcacaccgtggccaccttcaacagcatcaaggagctgaacgagagatggagaagcctgcagcagctggccgaggagagaagccagctgctgggcagcgcccacgaggtgcagagattccacagagacgccgacgagaccaaggagtggatcgaggagaagaaccaggccctgaacaccgacaactacggccacgacctggccagcgtgcaggccctgcagagaaagcacgagggcttcgagagagacctggccgccctgggcgacaaggtgaacagcctgggcgagaccgccgagagactgatccagagccaccccgagagcgccgaggacctgcaggagaagtgcaccgagctgaaccaggcctggagcagcctgggcaagagagccgaccagagaaaggccaagctgggcgacagccacgacctgcagagattcctgagcgacttcagagacctgatgagctggatcaacggcatcagaggcctggtgagcagcgacgagctggccaaggacgtgaccggcgccgaggccctgctggagagacaccaggagcacagaaccgagatcgacgccagagccggcaccttccaggccttcgagcagttcggccagcagctgctggcccacggccactacgccagccccgagatcaagcagaagctggacatcctggaccaggagagagccgacctggagaaggcctgggtgcagagaagaatgatgctggaccagtgcctggagctgcagctgttccacagagactgcgagcaggccgagaactggatggccgccagagaggccttcctgaacaccgaggacaagggcgacagcctggacagcgtggaggccctgatcaagaagcacgaggacttcgacaaggccatcaacgtgcaggaggagaagatcgccgccctgcaggccttcgccgaccagctgatcgccgccggccactacgccaagggcgacatcagcagcagaagaaacgaggtgctggacagatggagaagactgaaggcccagatgatcgagaagagaagcaagctgggcgagagccagaccctgcagcagttcagcagagacgtggacgagatcgaggcctggatcagcgagaagctgcagaccgccagcgacgagagctacaaggaccccaccaacatccagagcaagcaccagaagcaccaggccttcgaggccgagctgcacgccaacgccgacagaatcagaggcgtgatcgacatgggcaacagcctgatcgagagaggcgcctgcgccggcagcgaggacgccgtgaaggccagactggccgccctggccgaccagtggcagttcctggtgcagaagagcgccgagaagagccagaagctgaaggaggccaacaagcagcagaacttcaacaccggcatcaaggacttcgacttctggctgagcgaggtggaggccctgctggccagcgaggactacggcaaggacctggccagcgtgaacaacctgctgaagaagcaccagctgctggaggccgacatcagcgcccacgaggacagactgaaggacctgaacagccaggccgacagcctgatgaccagcagcgccttcgacaccagccaggtgaaggacaagagagacaccatcaacggcagattccagaagatcaagagcatggccgccagcagaagagccaagctgaacgagagccacagactgcaccagttcttcagagacatggacgacgaggagagctggatcaaggagaagaagctgctggtgggcagcgaggactacggcagagacctgaccggcgtgcagaacctgagaaagaagcacaagagactggaggccgagctggccgcccacgagcccgccatccagggcgtgctggacaccggcaagaagctgagcgacgacaacaccatcggcaaggaggagatccagcagagactggcccagttcgtggagcactggaaggagctgaagcagctggccgccgccagaggccagagactggaggagagcctggagtaccagcagttcgtggccaacgtggaggaggaggaggcctggatcaacgagaagatgaccctggtggccagcgaggactacggcgacaccctggccgccatccagggcctgctgaagaagcacgaggccttcgagaccgacttcaccgtgcacaaggacagagtgaacgacgtgtgcaccaacggccaggacctgatcaagaagaacaaccaccacgaggagaacatcagcagcaagatgaagggcctgaacggcaaggtgagcgacctggagaaggccgccgcccagagaaaggccaagctggacgagaacagcgccttcctgcagttcaactggaaggccgacgtggtggagagctggatcggcgagaaggagaacagcctgaagaccgacgactacggcagagacctgagcagcgtgcagaccctgctgaccaagcaggagaccttcgacgccggcctgcaggccttccagcaggagggcatcgccaacatcaccgccctgaaggaccagctgctggccgccaagcacgtgcagagcaaggccatcgaggccagacacgccagcctgatgaagagatggagccagctgctggccaacagcgccgccagaaagaagaagctgctggaggcccagagccacttcagaaaggtggaggacctgttcctgaccttcgccaagaaggccagcgccttcaacagctggttcgagaacgccgaggaggacctgaccgaccccgtgagatgcaacagcctggaggagatcaaggccctgagagaggcccacgacgccttcagaagcagcctgagcagcgcccaggccgacttcaaccagctggccgagctggacagacagatcaagagcttcagagtggccagcaacccctacacctggttcaccatggaggccctggaggagacctggagaaacctgcagaagatcatcaaggagagagagctggagctgcagaaggagcagagaagacaggaggagaacgacaagctgagacaggagttcgcccagcacgccaacgccttccaccagtggatccaggagaccagatgccagcccgccggcgccagctgcatggtggaggagagcggcaccctggagagccagctggaggccaccaagagaaagcaccaggagatcagagccatgagaagccagctgaagaagatcgaggacctgggcgccgccatggaggaggccctgatcctggacaacaagtacaccgagcacagcaccgtgggcctggcccagcagtgggaccagctggaccagctgggcatgagaatgcagcacaacctggagcagcagatccaggccagaaacaccaccggcgtgaccgaggaggccctgaaggagttcagcatgatgttcaagcacttcgacaaggacaagagcggcagactgaaccaccaggagttcaagagctgcctgagaagcctgggctacgacctgcccatggtggaggagggcgagcccgaccccgagttcgaggccatcctggacaccgtggaccccaacagagacggccacgtgagcctgcaggagtacatggccttcatgatcagcagagagaccgagaacgtgaagagcagcgaggagatcgagagcgccttcagagccctgagcagcgagggcaagccctacgtgaccaaggaggagctgtaccagaacctgaccagagagcaggccgactactgcgtgagccacatgaagccctacgtggacggcaagggcagagagctgcccaccgccttcgactacgtggagttcaccagaagcctgttcgtgaactag

SEQ ID NO: 100495 - DNA, 1485 bp, synthetic construct
  misc_feature 1..1485: note = Description of Artificial Sequence: Synthetic coding sequence
  source 1..1485: mol_type = other DNA
atggccgccagcagaagagccaagctgaacgagagccacagactgcaccagttcttcagagacatggacgacgaggagagctggatcaaggagaagaagctgctggtgggcagcgaggactacggcagagacctgaccggcgtgcagaacctgagaaagaagcacaagagactggaggccgagctggccgcccacgagcccgccatccagggcgtgctggacaccggcaagaagctgagcgacgacaacaccatcggcaaggaggagatccagcagagactggcccagttcgtggagcactggaaggagctgaagcagctggccgccgccagaggccagagactggaggagagcctggagtaccagcagttcgtggccaacgtggaggaggaggaggcctggatcaacgagaagatgaccctggtggccagcgaggactacggcgacaccctggccgccatccagggcctgctgaagaagcacgaggccttcgagaccgacttcaccgtgcacaaggacagagtgaacgacgtgtgcaccaacggccaggacctgatcaagaagaacaaccaccacgaggagaacatcagcagcaagatgaagggcctgaacggcaaggtgagcgacctggagaaggccgccgcccagagaaaggccaagctggacgagaacagcgccttcctgcagttcaactggaaggccgacgtggtggagagctggatcggcgagaaggagaacagcctgaagaccgacgactacggcagagacctgagcagcgtgcagaccctgctgaccaagcaggagaccttcgacgccggcctgcaggccttccagcaggagggcatcgccaacatcaccgccctgaaggaccagctgctggccgccaagcacgtgcagagcaaggccatcgaggccagacacgccagcctgatgaagagatggagccagctgctggccaacagcgccgccagaaagaagaagctgctggaggcccagagccacttcagaaaggtggaggacctgttcctgaccttcgccaagaaggccagcgccttcaacagctggttcgagaacgccgaggaggacctgaccgaccccgtgagatgcaacagcctggaggagatcaaggccctgagagaggcccacgacgccttcagaagcagcctgagcagcgcccaggccgacttcaaccagctggccgagctggacagacagatcaagagcttcagagtggccagcaacccctacacctggttcaccatggaggccctggaggagacctggagaaacctgcagaagatcatcaaggagagagagctggagctgcagaaggagcagagaagacaggaggagaacgacaagctgagacaggagttcgcccagcacgccaacgccttccaccagtggatccaggagaccagatgccagagaaaggacggccagctgcagggcggcagagtgggcgaccccagaatccccgcctag

SEQ ID NO: 100496 - DNA, 7419 bp, synthetic construct
  misc_feature 1..7419: note = Description of Artificial Sequence: Synthetic coding sequence
  source 1..7419: mol_type = other DNA
atggaccccagcggcgtgaaggtgctggagaccgccgaggacatccaggagagaagacagcaggtgctggacagataccacagattcaaggagctgagcaccctgagaagacagaagctggaggacagctacagattccagttcttccagagagacgccgaggagctggagaagtggatccaggagaagctgcagatcgccagcgacgagaactacaaggaccccaccaacctgcagggcaagctgcagaagcaccaggccttcgaggccgaggtgcaggccaacagcggcgccatcgtgaagctggacgagaccggcaacctgatgatcagcgagggccacttcgccagcgagaccatcagaaccagactgatggagctgcacagacagtgggagctgctgctggagaagatgagagagaagggcatcaagctgctgcaggcccagaagctggtgcagtacctgagagagtgcgaggacgtgatggactggatcaacgacaaggaggccatcgtgaccagcgaggagctgggccaggacctggagcacgtggaggtgctgcagaagaagttcgaggagttccagaccgacatggccgcccacgaggagagagtgaacgaggtgaaccagttcgccgccaagctgatccaggagcagcaccccgaggaggagctgatcaagaccaagcaggacgaggtgaacgccgcctggcagagactgaagggcctggccctgcagagacagggcaagctgttcggcgccgccgaggtgcagagattcaacagagacgtggacgagaccatcagctggatcaaggagaaggagcagctgatggccagcgacgacttcggcagagacctggccagcgtgcaggccctgctgagaaagcacgagggcctggagagagacctggccgccctggaggacaaggtgaaggccctgtgcgccgaggccgacagactgcagcagagccaccccctgagcgccacccagatccaggtgaagagagaggagctgatcaccaactgggagcagatcagaaccctggccgccgagagacacgccagactgaacgacagctacagactgcagagattcctggccgacttcagagacctgaccagctgggtgaccgagatgaaggccctgatcaacgccgacgagctggccagcgacgtggccggcgccgaggccctgctggacagacaccaggagcacaagggcgagatcgacgcccacgaggacagcttcaagagcgccgacgagagcggccaggccctgctggccgccggccactacgccagcgacgaggtgagagagaagctgaccgtgctgagcgaggagagagccgccctgctggagctgtgggagctgagaagacagcagtacgagcagtgcatggacctgcagctgttctacagagacaccgagcaggtggacaactggatgagcaagcaggaggccttcctgctgaacgaggacctgggcgacagcctggacagcgtggaggccctgctgaagaagcacgaggacttcgagaagagcctgagcgcccaggaggagaagatcaccgccctggacgagttcgccaccaagctgatccagaacaaccactacgccatggaggacgtggccaccagaagagacgccctgctgagcagaagaaacgccctgcacgagagagccatgagaagaagagcccagctggccgacagcttccacctgcagcagttcttcagagacagcgacgagctgaagagctgggtgaacgagaagatgaagaccgccaccgacgaggcctacaaggaccccagcaacctgcagggcaaggtgcagaagcaccaggccttcgaggccgagctgagcgccaaccagagcagaatcgacgccctggagaaggccggccagaagctgatcgacgtgaaccactacgccaaggacgaggtggccgccagaatgaacgaggtgatcagcctgtggaagaagctgctggaggccaccgagctgaagggcatcaagctgagagaggccaaccagcagcagcagttcaacagaaacgtggaggacatcgagctgtggctgtacgaggtggagggccacctggccagcgacgactacggcaaggacctgaccaacgtgcagaacctgcagaagaagcacgccctgctggaggccgacgtggccgcccaccaggacagaatcgacggcatcaccatccaggccagacagttccaggacgccggccacttcgacgccgagaacatcaagaagaagcaggaggccctggtggccagatacgaggccctgaaggagcccatggtggccagaaagcagaagctggccgacagcctgagactgcagcagctgttcagagacgtggaggacgaggagacctggatcagagagaaggagcccatcgccgccagcaccaacagaggcaaggacctgatcggcgtgcagaacctgctgaagaagcaccaggccctgcaggccgagatcgccggccacgagcccagaatcaaggccgtgacccagaagggcaacgccatggtggaggagggccacttcgccgccgaggacgtgaaggccaagctgcacgagctgaaccagaagtgggaggccctgaaggccaaggccagccagagaagacaggacctggaggacagcctgcaggcccagcagtacttcgccgacgccaacgaggccgagagctggatgagagagaaggagcccatcgtgggcagcaccgactacggcaaggacgaggacagcgccgaggccctgctgaagaagcacgaggccctgatgagcgacctgagcgcctacggcagcagcatccaggccctgagagagcaggcccagagctgcagacagcaggtggcccccaccgacgacgagaccggcaaggagctggtgctggccctgtacgactaccaggagaagagccccagagaggtgaccatgaagaagggcgacatcctgaccctgctgaacagcaccaacaaggactggtggaaggtggaggtgaacgacagacagggcttcgtgcccgccgcctacgtgaagaagctggaccccgcccagagcgccagcagagagaacctgctggaggagcagggcagcatcgccctgagacaggagcagatcgacaaccagaccagaatcaccaaggaggccggcagcgtgagcctgagaatgaagcaggtggaggagctgtaccacagcctgctggagctgggcgagaagagaaagggcatgctggagaagagctgcaagaagttcatgctgttcagagaggccaacgagctgcagcagtggatcaacgagaaggaggccgccctgaccagcgaggaggtgggcgccgacctggagcaggtggaggtgctgcagaagaagttcgacgacttccagaaggacctgaaggccaacgagagcagactgaaggacatcaacaaggtggccgaggacctggagagcgagggcctgatggccgaggaggtgcaggccgtgcagcagcaggaggtgtacggcatgatgcccagagacgagaccgacagcaagaccgccagcccctggaagagcgccagactgatggtgcacaccgtggccaccttcaacagcatcaaggagctgaacgagagatggagaagcctgcagcagctggccgaggagagaagccagctgctgggcagcgcccacgaggtgcagagattccacagagacgccgacgagaccaaggagtggatcgaggagaagaaccaggccctgaacaccgacaactacggccacgacctggccagcgtgcaggccctgcagagaaagcacgagggcttcgagagagacctggccgccctgggcgacaaggtgaacagcctgggcgagaccgccgagagactgatccagagccaccccgagagcgccgaggacctgcaggagaagtgcaccgagctgaaccaggcctggagcagcctgggcaagagagccgaccagagaaaggccaagctgggcgacagccacgacctgcagagattcctgagcgacttcagagacctgatgagctggatcaacggcatcagaggcctggtgagcagcgacgagctggccaaggacgtgaccggcgccgaggccctgctggagagacaccaggagcacagaaccgagatcgacgccagagccggcaccttccaggccttcgagcagttcggccagcagctgctggcccacggccactacgccagccccgagatcaagcagaagctggacatcctggaccaggagagagccgacctggagaaggcctgggtgcagagaagaatgatgctggaccagtgcctggagctgcagctgttccacagagactgcgagcaggccgagaactggatggccgccagagaggccttcctgaacaccgaggacaagggcgacagcctggacagcgtggaggccctgatcaagaagcacgaggacttcgacaaggccatcaacgtgcaggaggagaagatcgccgccctgcaggccttcgccgaccagctgatcgccgccggccactacgccaagggcgacatcagcagcagaagaaacgaggtgctggacagatggagaagactgaaggcccagatgatcgagaagagaagcaagctgggcgagagccagaccctgcagcagttcagcagagacgtggacgagatcgaggcctggatcagcgagaagctgcagaccgccagcgacgagagctacaaggaccccaccaacatccagagcaagcaccagaagcaccaggccttcgaggccgagctgcacgccaacgccgacagaatcagaggcgtgatcgacatgggcaacagcctgatcgagagaggcgcctgcgccggcagcgaggacgccgtgaaggccagactggccgccctggccgaccagtggcagttcctggtgcagaagagcgccgagaagagccagaagctgaaggaggccaacaagcagcagaacttcaacaccggcatcaaggacttcgacttctggctgagcgaggtggaggccctgctggccagcgaggactacggcaaggacctggccagcgtgaacaacctgctgaagaagcaccagctgctggaggccgacatcagcgcccacgaggacagactgaaggacctgaacagccaggccgacagcctgatgaccagcagcgccttcgacaccagccaggtgaaggacaagagagacaccatcaacggcagattccagaagatcaagagcatggccgccagcagaagagccaagctgaacgagagccacagactgcaccagttcttcagagacatggacgacgaggagagctggatcaaggagaagaagctgctggtgggcagcgaggactacggcagagacctgaccggcgtgcagaacctgagaaagaagcacaagagactggaggccgagctggccgcccacgagcccgccatccagggcgtgctggacaccggcaagaagctgagcgacgacaacaccatcggcaaggaggagatccagcagagactggcccagttcgtggagcactggaaggagctgaagcagctggccgccgccagaggccagagactggaggagagcctggagtaccagcagttcgtggccaacgtggaggaggaggaggcctggatcaacgagaagatgaccctggtggccagcgaggactacggcgacaccctggccgccatccagggcctgctgaagaagcacgaggccttcgagaccgacttcaccgtgcacaaggacagagtgaacgacgtgtgcaccaacggccaggacctgatcaagaagaacaaccaccacgaggagaacatcagcagcaagatgaagggcctgaacggcaaggtgagcgacctggagaaggccgccgcccagagaaaggccaagctggacgagaacagcgccttcctgcagttcaactggaaggccgacgtggtggagagctggatcggcgagaaggagaacagcctgaagaccgacgactacggcagagacctgagcagcgtgcagaccctgctgaccaagcaggagaccttcgacgccggcctgcaggccttccagcaggagggcatcgccaacatcaccgccctgaaggaccagctgctggccgccaagcacgtgcagagcaaggccatcgaggccagacacgccagcctgatgaagagatggagccagctgctggccaacagcgccgccagaaagaagaagctgctggaggcccagagccacttcagaaaggtggaggacctgttcctgaccttcgccaagaaggccagcgccttcaacagctggttcgagaacgccgaggaggacctgaccgaccccgtgagatgcaacagcctggaggagatcaaggccctgagagaggcccacgacgccttcagaagcagcctgagcagcgcccaggccgacttcaaccagctggccgagctggacagacagatcaagagcttcagagtggccagcaacccctacacctggttcaccatggaggccctggaggagacctggagaaacctgcagaagatcatcaaggagagagagctggagctgcagaaggagcagagaagacaggaggagaacgacaagctgagacaggagttcgcccagcacgccaacgccttccaccagtggatccaggagaccagaacctacctgctggacggcagctgcatggtggaggagagcggcaccctggagagccagctggaggccaccaagagaaagcaccaggagatcagagccatgagaagccagctgaagaagatcgaggacctgggcgccgccatggaggaggccctgatcctggacaacaagtacaccgagcacagcaccgtgggcctggcccagcagtgggaccagctggaccagctgggcatgagaatgcagcacaacctggagcagcagatccaggccagaaacaccaccggcgtgaccgaggaggccctgaaggagttcagcatgatgttcaagcacttcgacaaggacaagagcggcagactgaaccaccaggagttcaagagctgcctgagaagcctgggctacgacctgcccatggtggaggagggcgagcccgaccccgagttcgaggccatcctggacaccgtggaccccaacagagacggccacgtgagcctgcaggagtacatggccttcatgatcagcagagagaccgagaacgtgaagagcagcgaggagatcgagagcgccttcagagccctgagcagcgagggcaagccctacgtgaccaaggaggagctgtaccagaacctgaccagagagcaggccgactactgcgtgagccacatgaagccctacgtggacggcaagggcagagagctgcccaccgccttcgactacgtggagttcaccagaagcctgttcgtgaactag

SEQ ID NO: 100497 - DNA, 7434 bp, synthetic construct
  misc_feature 1..7434: note = Description of Artificial Sequence: Synthetic coding sequence
  source 1..7434: mol_type = other DNA
atggaccccagcggcgtgaaggtgctggagaccgccgaggacatccaggagagaagacagcaggtgctggacagataccacagattcaaggagctgagcaccctgagaagacagaagctggaggacagctacagattccagttcttccagagagacgccgaggagctggagaagtggatccaggagaagctgcagatcgccagcgacgagaactacaaggaccccaccaacctgcagggcaagctgcagaagcaccaggccttcgaggccgaggtgcaggccaacagcggcgccatcgtgaagctggacgagaccggcaacctgatgatcagcgagggccacttcgccagcgagaccatcagaaccagactgatggagctgcacagacagtgggagctgctgctggagaagatgagagagaagggcatcaagctgctgcaggcccagaagctggtgcagtacctgagagagtgcgaggacgtgatggactggatcaacgacaaggaggccatcgtgaccagcgaggagctgggccaggacctggagcacgtggaggtgctgcagaagaagttcgaggagttccagaccgacatggccgcccacgaggagagagtgaacgaggtgaaccagttcgccgccaagctgatccaggagcagcaccccgaggaggagctgatcaagaccaagcaggacgaggtgaacgccgcctggcagagactgaagggcctggccctgcagagacagggcaagctgttcggcgccgccgaggtgcagagattcaacagagacgtggacgagaccatcagctggatcaaggagaaggagcagctgatggccagcgacgacttcggcagagacctggccagcgtgcaggccctgctgagaaagcacgagggcctggagagagacctggccgccctggaggacaaggtgaaggccctgtgcgccgaggccgacagactgcagcagagccaccccctgagcgccacccagatccaggtgaagagagaggagctgatcaccaactgggagcagatcagaaccctggccgccgagagacacgccagactgaacgacagctacagactgcagagattcctggccgacttcagagacctgaccagctgggtgaccgagatgaaggccctgatcaacgccgacgagctggccagcgacgtggccggcgccgaggccctgctggacagacaccaggagcacaagggcgagatcgacgcccacgaggacagcttcaagagcgccgacgagagcggccaggccctgctggccgccggccactacgccagcgacgaggtgagagagaagctgaccgtgctgagcgaggagagagccgccctgctggagctgtgggagctgagaagacagcagtacgagcagtgcatggacctgcagctgttctacagagacaccgagcaggtggacaactggatgagcaagcaggaggccttcctgctgaacgaggacctgggcgacagcctggacagcgtggaggccctgctgaagaagcacgaggacttcgagaagagcctgagcgcccaggaggagaagatcaccgccctggacgagttcgccaccaagctgatccagaacaaccactacgccatggaggacgtggccaccagaagagacgccctgctgagcagaagaaacgccctgcacgagagagccatgagaagaagagcccagctggccgacagcttccacctgcagcagttcttcagagacagcgacgagctgaagagctgggtgaacgagaagatgaagaccgccaccgacgaggcctacaaggaccccagcaacctgcagggcaaggtgcagaagcaccaggccttcgaggccgagctgagcgccaaccagagcagaatcgacgccctggagaaggccggccagaagctgatcgacgtgaaccactacgccaaggacgaggtggccgccagaatgaacgaggtgatcagcctgtggaagaagctgctggaggccaccgagctgaagggcatcaagctgagagaggccaaccagcagcagcagttcaacagaaacgtggaggacatcgagctgtggctgtacgaggtggagggccacctggccagcgacgactacggcaaggacctgaccaacgtgcagaacctgcagaagaagcacgccctgctggaggccgacgtggccgcccaccaggacagaatcgacggcatcaccatccaggccagacagttccaggacgccggccacttcgacgccgagaacatcaagaagaagcaggaggccctggtggccagatacgaggccctgaaggagcccatggtggccagaaagcagaagctggccgacagcctgagactgcagcagctgttcagagacgtggaggacgaggagacctggatcagagagaaggagcccatcgccgccagcaccaacagaggcaaggacctgatcggcgtgcagaacctgctgaagaagcaccaggccctgcaggccgagatcgccggccacgagcccagaatcaaggccgtgacccagaagggcaacgccatggtggaggagggccacttcgccgccgaggacgtgaaggccaagctgcacgagctgaaccagaagtgggaggccctgaaggccaaggccagccagagaagacaggacctggaggacagcctgcaggcccagcagtacttcgccgacgccaacgaggccgagagctggatgagagagaaggagcccatcgtgggcagcaccgactacggcaaggacgaggacagcgccgaggccctgctgaagaagcacgaggccctgatgagcgacctgagcgcctacggcagcagcatccaggccctgagagagcaggcccagagctgcagacagcaggtggcccccaccgacgacgagaccggcaaggagctggtgctggccctgtacgactaccaggagaagagccccagagaggtgaccatgaagaagggcgacatcctgaccctgctgaacagcaccaacaaggactggtggaaggtggaggtgaacgacagacagggcttcgtgcccgccgcctacgtgaagaagctggaccccgcccagagcgccagcagagagaacctgctggaggagcagggcagcatcgccctgagacaggagcagatcgacaaccagaccagaatcaccaaggaggccggcagcgtgagcctgagaatgaagcaggtggaggagctgtaccacagcctgctggagctgggcgagaagagaaagggcatgctggagaagagctgcaagaagttcatgctgttcagagaggccaacgagctgcagcagtggatcaacgagaaggaggccgccctgaccagcgaggaggtgggcgccgacctggagcaggtggaggtgctgcagaagaagttcgacgacttccagaaggacctgaaggccaacgagagcagactgaaggacatcaacaaggtggccgaggacctggagagcgagggcctgatggccgaggaggtgcaggccgtgcagcagcaggaggtgtacggcatgatgcccagagacgagaccgacagcaagaccgccagcccctggaagagcgccagactgatggtgcacaccgtggccaccttcaacagcatcaaggagctgaacgagagatggagaagcctgcagcagctggccgaggagagaagccagctgctgggcagcgcccacgaggtgcagagattccacagagacgccgacgagaccaaggagtggatcgaggagaagaaccaggccctgaacaccgacaactacggccacgacctggccagcgtgcaggccctgcagagaaagcacgagggcttcgagagagacctggccgccctgggcgacaaggtgaacagcctgggcgagaccgccgagagactgatccagagccaccccgagagcgccgaggacctgcaggagaagtgcaccgagctgaaccaggcctggagcagcctgggcaagagagccgaccagagaaaggccaagctgggcgacagccacgacctgcagagattcctgagcgacttcagagacctgatgagctggatcaacggcatcagaggcctggtgagcagcgacgagctggccaaggacgtgaccggcgccgaggccctgctggagagacaccaggagcacagaaccgagatcgacgccagagccggcaccttccaggccttcgagcagttcggccagcagctgctggcccacggccactacgccagccccgagatcaagcagaagctggacatcctggaccaggagagagccgacctggagaaggcctgggtgcagagaagaatgatgctggaccagtgcctggagctgcagctgttccacagagactgcgagcaggccgagaactggatggccgccagagaggccttcctgaacaccgaggacaagggcgacagcctggacagcgtggaggccctgatcaagaagcacgaggacttcgacaaggccatcaacgtgcaggaggagaagatcgccgccctgcaggccttcgccgaccagctgatcgccgccggccactacgccaagggcgacatcagcagcagaagaaacgaggtgctggacagatggagaagactgaaggcccagatgatcgagaagagaagcaagctgggcgagagccagaccctgcagcagttcagcagagacgtggacgagatcgaggcctggatcagcgagaagctgcagaccgccagcgacgagagctacaaggaccccaccaacatccagctgagcaagctgctgagcaagcaccagaagcaccaggccttcgaggccgagctgcacgccaacgccgacagaatcagaggcgtgatcgacatgggcaacagcctgatcgagagaggcgcctgcgccggcagcgaggacgccgtgaaggccagactggccgccctggccgaccagtggcagttcctggtgcagaagagcgccgagaagagccagaagctgaaggaggccaacaagcagcagaacttcaacaccggcatcaaggacttcgacttctggctgagcgaggtggaggccctgctggccagcgaggactacggcaaggacctggccagcgtgaacaacctgctgaagaagcaccagctgctggaggccgacatcagcgcccacgaggacagactgaaggacctgaacagccaggccgacagcctgatgaccagcagcgccttcgacaccagccaggtgaaggacaagagagacaccatcaacggcagattccagaagatcaagagcatggccgccagcagaagagccaagctgaacgagagccacagactgcaccagttcttcagagacatggacgacgaggagagctggatcaaggagaagaagctgctggtgggcagcgaggactacggcagagacctgaccggcgtgcagaacctgagaaagaagcacaagagactggaggccgagctggccgcccacgagcccgccatccagggcgtgctggacaccggcaagaagctgagcgacgacaacaccatcggcaaggaggagatccagcagagactggcccagttcgtggagcactggaaggagctgaagcagctggccgccgccagaggccagagactggaggagagcctggagtaccagcagttcgtggccaacgtggaggaggaggaggcctggatcaacgagaagatgaccctggtggccagcgaggactacggcgacaccctggccgccatccagggcctgctgaagaagcacgaggccttcgagaccgacttcaccgtgcacaaggacagagtgaacgacgtgtgcaccaacggccaggacctgatcaagaagaacaaccaccacgaggagaacatcagcagcaagatgaagggcctgaacggcaaggtgagcgacctggagaaggccgccgcccagagaaaggccaagctggacgagaacagcgccttcctgcagttcaactggaaggccgacgtggtggagagctggatcggcgagaaggagaacagcctgaagaccgacgactacggcagagacctgagcagcgtgcagaccctgctgaccaagcaggagaccttcgacgccggcctgcaggccttccagcaggagggcatcgccaacatcaccgccctgaaggaccagctgctggccgccaagcacgtgcagagcaaggccatcgaggccagacacgccagcctgatgaagagatggagccagctgctggccaacagcgccgccagaaagaagaagctgctggaggcccagagccacttcagaaaggtggaggacctgttcctgaccttcgccaagaaggccagcgccttcaacagctggttcgagaacgccgaggaggacctgaccgaccccgtgagatgcaacagcctggaggagatcaaggccctgagagaggcccacgacgccttcagaagcagcctgagcagcgcccaggccgacttcaaccagctggccgagctggacagacagatcaagagcttcagagtggccagcaacccctacacctggttcaccatggaggccctggaggagacctggagaaacctgcagaagatcatcaaggagagagagctggagctgcagaaggagcagagaagacaggaggagaacgacaagctgagacaggagttcgcccagcacgccaacgccttccaccagtggatccaggagaccagaacctacctgctggacggcagctgcatggtggaggagagcggcaccctggagagccagctggaggccaccaagagaaagcaccaggagatcagagccatgagaagccagctgaagaagatcgaggacctgggcgccgccatggaggaggccctgatcctggacaacaagtacaccgagcacagcaccgtgggcctggcccagcagtgggaccagctggaccagctgggcatgagaatgcagcacaacctggagcagcagatccaggccagaaacaccaccggcgtgaccgaggaggccctgaaggagttcagcatgatgttcaagcacttcgacaaggacaagagcggcagactgaaccaccaggagttcaagagctgcctgagaagcctgggctacgacctgcccatggtggaggagggcgagcccgaccccgagttcgaggccatcctggacaccgtggaccccaacagagacggccacgtgagcctgcaggagtacatggccttcatgatcagcagagagaccgagaacgtgaagagcagcgaggagatcgagagcgccttcagagccctgagcagcgagggcaagccctacgtgaccaaggaggagctgtaccagaacctgaccagagagcaggccgactactgcgtgagccacatgaagccctacgtggacggcaagggcagagagctgcccaccgccttcgactacgtggagttcaccagaagcctgttcgtgaactag

SEQ ID NO: 100498 - DNA, 3444 bp, synthetic construct
  misc_feature 1..3444: note = Description of Artificial Sequence: Synthetic coding sequence
  source 1..3444: mol_type = other DNA
atggagaacaacagagacaaggtgctgagccccgtggacagcggcaacaagctggtggccgagggcaacctgtacagcgacaagatcaaggagaaggtgcagctgatcgaggacagacacagaaagaacaacgagaaggcccaggaggccagcgtgctgctgagagacaacctggagctgcagaacttcctgcagaactgccaggagctgaccctgtggatcaacgacaagctgctgaccagccaggacgtgagctacgacgaggccagaaacctgcacaacaagtggctgaagcaccaggccttcgtggccgagctggccagccacgagggctggctggagaacatcgacgccgagggcaagcagctgatggacgagaagccccagttcaccgccctggtgagccagaagctggaggccctgcacagactgtgggacgagctgcaggccaccaccaaggagaagacccagcacctgagcgccgccagaagcagcgacctgagactgcagacccacgccgacctgaacaagtggatcagcgccatggaggaccagctgagaagcgacgaccccggcaaggacctgaccagcgtgaacagaatgctggccaagctgaagagagtggaggaccaggtgaacgtgagaaaggaggagctgggcgagctgttcgcccaggtgcccagcatgggcgaggagggcggcgacgccgacctgagcatcgagaagagattcctggacctgctggagcccctgggcagaagaaagaagcagctggagagcagcagagccaagctgcagatcagcagagacctggaggacgagaccctgtgggtggaggagagactgcccctggcccagagcgccgactacggcaccaacctgcagaccgtgcagctgttcatgaagaagaaccagaccctgcagaacgagatcctgggccacacccccagagtggaggacgtgctgcagagaggccagcagctggtggaggccgccgagatcgactgccaggacctggaggagagactgggccacctgcagagcagctgggacagactgagagaggccgccgccggcagactgcagagactgagagacgccaacgaggcccagcagtactacctggacgccgacgaggccgaggcctggatcggcgagcaggagctgtacgtgatcagcgacgagatccccaaggacgaggagggcgccatcgtgatgctgaagagacacctgagacagcagagagccgtggaggactacggcagaaacatcaagcagctggccagcagagcccagggcctgctgagcgccggccaccccgagggcgagcagatcatcagactgcagggccaggtggacaagcactacgccggcctgaaggacgtggccgaggagagaaagagaaagctggagaacatgtaccacctgttccagctgaagagagagaccgacgacctggagcagtggatcagcgagaaggagctggtggccagcagccccgagatgggccaggacttcgaccacgtgaccctgctgagagacaagttcagagacttcgccagagagaccggcgccatcggccaggagagagtggacaacgtgaacgccttcatcgagagactgatcgacgccggccacagcgaggccgccaccatcgccgagtggaaggacggcctgaacgagatgtgggccgacctgctggagctgatcgacaccagaatgcagctgctggccgccagctacgacctgcacagatacttctacaccggcgccgagatcctgggcctgatcgacgagaagcacagagagctgcccgaggacgtgggcctggacgccagcaccgccgagagcttccacagagtgcacaccgccttcgagagagagctgcacctgctgggcgtgcaggtgcagcagttccaggacgtggccaccagactgcagaccgcctacgccggcgagaaggccgaggccatccagaacaaggagcaggaggtgagcgccgcctggcaggccctgctggacgcctgcgccggcagaagaacccagctggtggacaccgccgacaagttcagattcttcagcatggccagagacctgctgagctggatggagagcatcatcagacagatcgagacccaggagagacccagagacgtgagcagcgtggagctgctgatgaagtaccaccagggcatcaacgccgagatcgagaccagaagcaagaacttcagcgcctgcctggagctgggcgagagcctgctgcagagacagcaccaggccagcgaggagatcagagagaagctgcagcaggtgatgagcagaagaaaggagatgaacgagaagtgggaggccagatgggagagactgagaatgctgctggaggtgtgccagttcagcagagacgccagcgtggccgaggcctggctgatcgcccaggagccctacctggccagcggcgacttcggccacaccgtggacagcgtggagaagctgatcaagagacacgaggccttcgagaagagcaccgccagctgggccgagagattcgccgccctggagaagcccaccaccctggagctgaaggagagacagatcgccgagagacccgccgaggagaccggcccccaggaggaggagggcgagaccgccggcgaggcccccgtgagccaccacgccgccaccgagagaaccagccccggcgaggaggagggcacctggccccagaacctgcagcagccccccccccccggccagcacaaggacggccagaagagcaccggcgacgagagacccaccaccgagcccctgttcaaggtgctggacacccccctgagcgagggcgacgagcccgccaccctgcccgcccccagagaccacggccagagcgtgcagatggagggctacctgggcagaaagcacgacctggagggccccaacaagaaggccagcaacagcaagggcgaggagggcgaggagagaagagagaccgaggaggaggacgaggaggaggaggagaccgagagcgtggccgtggagatgcagcagcacgccagccacgtgagctggaacaacctgtactgcgtgctgagaaacagcgagctgaccttctacaaggacgccaagaacctggccctgggcatgccctaccacggcgaggagcccctggccctgagacacgccatctgcgagatcgccgccaactacaagaagaagaagcacgtgttcaagctgagactgagcaacggcagcgagtggctgttccacggcaaggacgaggaggagatgctgagctggctgcagggcgtgagcaccgccatcaacgagagccagagcatcagagtgaaggcccagagcctgcccctgcccagcctgagcggccccgacgccagcctgggcaagaaggacaaggagaagagattcagcttcttccccaagaagaagtag

SEQ ID NO: 100499 - DNA, 6321 bp, synthetic construct
  misc_feature 1..6321: note = Description of Artificial Sequence: Synthetic coding sequence
  source 1..6321: mol_type = other DNA
atgaccagcgccaccgagttcgagaacgtgggcaaccagcccccctacagcagaatcaacgccagatgggacgcccccgacgacgagctggacaacgacaacagcagcgccagactgttcgagagaagcagaatcaaggccctggccgacgagagagaggtggtgcagaagaagaccttcaccaagtgggtgaacagccacctggccagagtgagctgcagaatcaccgacctgtacaaggacctgagagacggcagaatgctgatcaagctgctggaggtgctgagcggcgagatgctgcccaagcccaccaagggcaagatgagaatccactgcctggagaacgtggacaaggccctgcagttcctgaaggagcagagagtgcacctggagaacatgggcagccacgacatcgtggacggcaaccacagactggtgctgggcctgatctggaccatcatcctgagattccagatccaggacatcgtggtgcagacccaggagggcagagagaccagaagcgccaaggacgccctgctgctgtggtgccagatgaagaccgccggctacccccacgtgaacgtgaccaacttcaccagcagctggaaggacggcctggccttcaacgccctgatccacaagcacagacccgacctgatcgacttcgacaagctgaaggacagcaacgccagacacaacctggagcacgccttcaacgtggccgagagacagctgggcatcatccccctgctggaccccgaggacgtgttcaccgagaaccccgacgagaagagcatcatcacctacgtggtggccttctaccactacttcagcaagatgaaggtgctggccgtggagggcaagagagtgggcaaggtgatcgaccacgccatcgagaccgagaagatgatcgagaagtacagcggcctggccagcgacctgctgacctggatcgagcagaccatcaccgtgctgaacagcagaaagttcgccaacagcctgaccggcgtgcagcagcagctgcaggccttcagcacctacagaaccgtggagaagccccccaagttccaggagaagggcaacctggaggtgctgctgttcaccatccagagcagaatgagagccaacaaccagaaggtgtacaccccccacgacggcaagctggtgagcgacatcaacagagcctgggagagcctggaggaggccgagtacagaagagagctggccctgagaaacgagctgatcagacaggagaagctggagcagctggccagaagattcgacagaaaggccgccatgagagagacctggctgagcgagaaccagagactggtggcccaggacaacttcggctacgacctggccgccgtggaggccgccaagaagaagcacgaggccatcgagaccgacaccgccgcctacgaggagagagtgagagccctggaggacctggcccaggagctggagaaggagaactaccacgaccagaagagaatcaccgccagaaaggacaacatcctgagactgtggagctacctgcaggagctgctgcagagcagaagacagagactggagaccaccctggccctgcagaagctgttccaggacatgctgcacagcatcgactggatggacgagatcaaggcccacctgctgagcgccgagttcggcaagcacctgctggaggtggaggacctgctgcagaagcacaagctgatggaggccgacatcgccatccagggcgacaaggtgaaggccatcaccgccgccaccctgaagttcaccgagggcaagggctaccagccctgcgacccccaggtgatccaggacagaatcagccacctggagcagtgcttcgaggagctgagcaacatggccgccggcagaaaggcccagctggagcagagcaagagactgtggaagttcttctgggagatggacgaggccgagagctggatcaaggagaaggagcagatctacagcagcctggactacggcaaggacctgaccagcgtgctgatcctgcagagaaagcacaaggccttcgaggacgagctgagaggcctggacgcccacctggagcagatcttccaggaggcccacggcatggtggccagaaagcagttcggccacccccagatcgaggccagaatcaaggaggtgagcgcccagtgggaccagctgaaggacctggccgccttctgcaagaagaacctgcaggacgccgagaacttcttccagttccagggcgacgccgacgacctgaaggcctggctgcaggacgcccacagactgctgagcggcgaggacgtgggccaggacgagggcgccaccagagccctgggcaagaagcacaaggacttcctggaggagctggaggagagcagaggcgtgatggagcacctggagcagcaggcccagggcttccccgaggagttcagagacagccccgacgtgacccacagactgcaggccctgagagagctgtaccagcaggtggtggcccaggccgacctgagacagcagagactgcaggaggccctggacctgtacaccgtgttcggcgagaccgacgcctgcgagctgtggatgggcgagaaggagaagtggctggccgagatggagatgcccgacaccctggaggacctggaggtggtgcagcacagattcgacatcctggaccaggagatgaagaccctgatgacccagatcgacggcgtgaacctggccgccaacagcctggtggagagcggccaccccagaagcagagaggtgaagcagtaccaggaccacctgaacaccagatggcaggccttccagaccctggtgagcgagagaagagaggccgtggacagcgccctgagagtgcacaactactgcgtggactgcgaggagaccagcaagtggatcaccgacaagaccaaggtggtggagagcaccaaggacctgggcagagacctggccggcatcatcgccatccagagaaagctgagcggcctggagagagacgtggccgccatccaggccagagtggacgccctggagagagagagccagcagctgatggacagccaccccgagcagaaggaggacatcggccagagacagaagcacctggaggagctgtggcagggcctgcagcagagcctgcagggccaggaggacctgctgggcgaggtgagccagctgcaggccttcctgcaggacctggacgacttccaggcctggctgagcatcacccagaaggccgtggccagcgaggacatgcccgagagcctgcccgaggccgagcagctgctgcagcagcacgccggcatcaaggacgagatcgacggccaccaggacagctaccagagagtgaaggagagcggcgagaaggtgatccagggccagaccgaccccgagtacctgctgctgggccagagactggagggcctggacaccggctggaacgccctgggcagaatgtgggagagcagaagccacaccctggcccagtgcctgggcttccaggagttccagaaggacgccaagcaggccgaggccatcctgagcaaccaggagtacaccctggcccacctggagccccccgacagcctggaggccgccgaggccggcatcagaaagttcgaggacttcctgggcagcatggagaacaacagagacaaggtgctgagccccgtggacagcggcaacaagctggtggccgagggcaacctgtacagcgacaagatcaaggagaaggtgcagctgatcgaggacagacacagaaagaacaacgagaaggcccaggaggccagcgtgctgctgagagacaacctggagctgcagaacttcctgcagaactgccaggagctgaccctgtggatcaacgacaagctgctgaccagccaggacgtgagctacgacgaggccagaaacctgcacaacaagtggctgaagcaccaggccttcgtggccgagctggccagccacgagggctggctggagaacatcgacgccgagggcaagcagctgatggacgagaagccccagttcaccgccctggtgagccagaagctggaggccctgcacagactgtgggacgagctgcaggccaccaccaaggagaagacccagcacctgagcgccgccagaagcagcgacctgagactgcagacccacgccgacctgaacaagtggatcagcgccatggaggaccagctgagaagcgacgaccccggcaaggacctgaccagcgtgaacagaatgctggccaagctgaagagagtggaggaccaggtgaacgtgagaaaggaggagctgggcgagctgttcgcccaggtgcccagcatgggcgaggagggcggcgacgccgacctgagcatcgagaagagattcctggacctgctggagcccctgggcagaagaaagaagcagctggagagcagcagagccaagctgcagatcagcagagacctggaggacgagaccctgtgggtggaggagagactgcccctggcccagagcgccgactacggcaccaacctgcagaccgtgcagctgttcatgaagaagaaccagaccctgcagaacgagatcctgggccacacccccagagtggaggacgtgctgcagagaggccagcagctggtggaggccgccgagatcgactgccaggacctggaggagagactgggccacctgcagagcagctgggacagactgagagaggccgccgccggcagactgcagagactgagagacgccaacgaggcccagcagtactacctggacgccgacgaggccgaggcctggatcggcgagcaggagctgtacgtgatcagcgacgagatccccaaggacgaggagggcgccatcgtgatgctgaagagacacctgagacagcagagagccgtggaggactacggcagaaacatcaagcagctggccagcagagcccagggcctgctgagcgccggccaccccgagggcgagcagatcatcagactgcagggccaggtggacaagcactacgccggcctgaaggacgtggccgaggagagaaagagaaagctggagaacatgtaccacctgttccagctgaagagagagaccgacgacctggagcagtggatcagcgagaaggagctggtggccagcagccccgagatgggccaggacttcgaccacgtgaccctgctgagagacaagttcagagacttcgccagagagaccggcgccatcggccaggagagagtggacaacgtgaacgccttcatcgagagactgatcgacgccggccacagcgaggccgccaccatcgccgagtggaaggacggcctgaacgagatgtgggccgacctgctggagctgatcgacaccagaatgcagctgctggccgccagctacgacctgcacagatacttctacaccggcgccgagatcctgggcctgatcgacgagaagcacagagagctgcccgaggacgtgggcctggacgccagcaccgccgagagcttccacagagtgcacaccgccttcgagagagagctgcacctgctgggcgtgcaggtgcagcagttccaggacgtggccaccagactgcagaccgcctacgccggcgagaaggccgaggccatccagaacaaggagcaggaggtgagcgccgcctggcaggccctgctggacgcctgcgccggcagaagaacccagctggtggacaccgccgacaagttcagattcttcagcatggccagagacctgctgagctggatggagagcatcatcagacagatcgagacccaggagagacccagagacgtgagcagcgtggagctgctgatgaagtaccaccagggcatcaacgccgagatcgagaccagaagcaagaacttcagcgcctgcctggagctgggcgagagcctgctgcagagacagcaccaggccagcgaggagatcagagagaagctgcagcaggtgatgagcagaagaaaggagatgaacgagaagtgggaggccagatgggagagactgagaatgctgctggaggtgtgccagttcagcagagacgccagcgtggccgaggcctggctgatcgcccaggagccctacctggccagcggcgacttcggccacaccgtggacagcgtggagaagctgatcaagagacacgaggccttcgagaagagcaccgccagctgggccgagagattcgccgccctggagaagcccaccaccgccagcagaggcggcagaagagacagcagaggcggcagcagcttccccccctgcggccacagagagaacgtgcccggccagagcctggtgagcttcgtgtag

SEQ ID NO: 100500 - DNA, 6414 bp, synthetic construct
  misc_feature 1..6414: note = Description of Artificial Sequence: Synthetic coding sequence
  source 1..6414: mol_type = other DNA
atgaccagcgccaccgagttcgagaacgtgggcaaccagcccccctacagcagaatcaacgccagatgggacgcccccgacgacgagctggacaacgacaacagcagcgccagactgttcgagagaagcagaatcaaggccctggccgacgagagagaggtggtgcagaagaagaccttcaccaagtgggtgaacagccacctggccagagtgagctgcagaatcaccgacctgtacaaggacctgagagacggcagaatgctgatcaagctgctggaggtgctgagcggcgagatgctgcccaagcccaccaagggcaagatgagaatccactgcctggagaacgtggacaaggccctgcagttcctgaaggagcagagagtgcacctggagaacatgggcagccacgacatcgtggacggcaaccacagactggtgctgggcctgatctggaccatcatcctgagattccagatccaggacatcgtggtgcagacccaggagggcagagagaccagaagcgccaaggacgccctgctgctgtggtgccagatgaagaccgccggctacccccacgtgaacgtgaccaacttcaccagcagctggaaggacggcctggccttcaacgccctgatccacaagcacagacccgacctgatcgacttcgacaagctgaaggacagcaacgccagacacaacctggagcacgccttcaacgtggccgagagacagctgggcatcatccccctgctggaccccgaggacgtgttcaccgagaaccccgacgagaagagcatcatcacctacgtggtggccttctaccactacttcagcaagatgaaggtgctggccgtggagggcaagagagtgggcaaggtgatcgaccacgccatcgagaccgagaagatgatcgagaagtacagcggcctggccagcgacctgctgacctggatcgagcagaccatcaccgtgctgaacagcagaaagttcgccaacagcctgaccggcgtgcagcagcagctgcaggccttcagcacctacagaaccgtggagaagccccccaagttccaggagaagggcaacctggaggtgctgctgttcaccatccagagcagaatgagagccaacaaccagaaggtgtacaccccccacgacggcaagctggtgagcgacatcaacagagcctgggagagcctggaggaggccgagtacagaagagagctggccctgagaaacgagctgatcagacaggagaagctggagcagctggccagaagattcgacagaaaggccgccatgagagagacctggctgagcgagaaccagagactggtggcccaggacaacttcggctacgacctggccgccgtggaggccgccaagaagaagcacgaggccatcgagaccgacaccgccgcctacgaggagagagtgagagccctggaggacctggcccaggagctggagaaggagaactaccacgaccagaagagaatcaccgccagaaaggacaacatcctgagactgtggagctacctgcaggagctgctgcagagcagaagacagagactggagaccaccctggccctgcagaagctgttccaggacatgctgcacagcatcgactggatggacgagatcaaggcccacctgctgagcgccgagttcggcaagcacctgctggaggtggaggacctgctgcagaagcacaagctgatggaggccgacatcgccatccagggcgacaaggtgaaggccatcaccgccgccaccctgaagttcaccgagggcaagggctaccagccctgcgacccccaggtgatccaggacagaatcagccacctggagcagtgcttcgaggagctgagcaacatggccgccggcagaaaggcccagctggagcagagcaagagactgtggaagttcttctgggagatggacgaggccgagagctggatcaaggagaaggagcagatctacagcagcctggactacggcaaggacctgaccagcgtgctgatcctgcagagaaagcacaaggccttcgaggacgagctgagaggcctggacgcccacctggagcagatcttccaggaggcccacggcatggtggccagaaagcagttcggccacccccagatcgaggccagaatcaaggaggtgagcgcccagtgggaccagctgaaggacctggccgccttctgcaagaagaacctgcaggacgccgagaacttcttccagttccagggcgacgccgacgacctgaaggcctggctgcaggacgcccacagactgctgagcggcgaggacgtgggccaggacgagggcgccaccagagccctgggcaagaagcacaaggacttcctggaggagctggaggagagcagaggcgtgatggagcacctggagcagcaggcccagggcttccccgaggagttcagagacagccccgacgtgacccacagactgcaggccctgagagagctgtaccagcaggtggtggcccaggccgacctgagacagcagagactgcaggaggccctggacctgtacaccgtgttcggcgagaccgacgcctgcgagctgtggatgggcgagaaggagaagtggctggccgagatggagatgcccgacaccctggaggacctggaggtggtgcagcacagattcgacatcctggaccaggagatgaagaccctgatgacccagatcgacggcgtgaacctggccgccaacagcctggtggagagcggccaccccagaagcagagaggtgaagcagtaccaggaccacctgaacaccagatggcaggccttccagaccctggtgagcgagagaagagaggccgtggacagcgccctgagagtgcacaactactgcgtggactgcgaggagaccagcaagtggatcaccgacaagaccaaggtggtggagagcaccaaggacctgggcagagacctggccggcatcatcgccatccagagaaagctgagcggcctggagagagacgtggccgccatccaggccagagtggacgccctggagagagagagccagcagctgatggacagccaccccgagcagaaggaggacatcggccagagacagaagcacctggaggagctgtggcagggcctgcagcagagcctgcagggccaggaggacctgctgggcgaggtgagccagctgcaggccttcctgcaggacctggacgacttccaggcctggctgagcatcacccagaaggccgtggccagcgaggacatgcccgagagcctgcccgaggccgagcagctgctgcagcagcacgccggcatcaaggacgagatcgacggccaccaggacagctaccagagagtgaaggagagcggcgagaaggtgatccagggccagaccgaccccgagtacctgctgctgggccagagactggagggcctggacaccggctggaacgccctgggcagaatgtgggagagcagaagccacaccctggcccagtgcctgggcttccaggagttccagaaggacgccaagcaggccgaggccatcctgagcaaccaggagtacaccctggcccacctggagccccccgacagcctggaggccgccgaggccggcatcagaaagttcgaggacttcctgggcagcatggagaacaacagagacaaggtgctgagccccgtggacagcggcaacaagctggtggccgagggcaacctgtacagcgacaagatcaaggagaaggtgcagctgatcgaggacagacacagaaagaacaacgagaaggcccaggaggccagcgtgctgctgagagacaacctggagctgcagaacttcctgcagaactgccaggagctgaccctgtggatcaacgacaagctgctgaccagccaggacgtgagctacgacgaggccagaaacctgcacaacaagtggctgaagcaccaggccttcgtggccgagctggccagccacgagggctggctggagaacatcgacgccgagggcaagcagctgatggacgagaagccccagttcaccgccctggtgagccagaagctggaggccctgcacagactgtgggacgagctgcaggccaccaccaaggagaagacccagcacctgagcgccgccagaagcagcgacctgagactgcagacccacgccgacctgaacaagtggatcagcgccatggaggaccagctgagaagcgacgaccccggcaaggacctgaccagcgtgaacagaatgctggccaagctgaagagagtggaggaccaggtgaacgtgagaaaggaggagctgggcgagctgttcgcccaggtgcccagcatgggcgaggagggcggcgacgccgacctgagcatcgagaagagattcctggacctgctggagcccctgggcagaagaaagaagcagctggagagcagcagagccaagctgcagatcagcagagacctggaggacgagaccctgtgggtggaggagagactgcccctggcccagagcgccgactacggcaccaacctgcagaccgtgcagctgttcatgaagaagaaccagaccctgcagaacgagatcctgggccacacccccagagtggaggacgtgctgcagagaggccagcagctggtggaggccgccgagatcgactgccaggacctggaggagagactgggccacctgcagagcagctgggacagactgagagaggccgccgccggcagactgcagagactgagagacgccaacgaggcccagcagtactacctggacgccgacgaggccgaggcctggatcggcgagcaggagctgtacgtgatcagcgacgagatccccaaggacgaggagggcgccatcgtgatgctgaagagacacctgagacagcagagagccgtggaggactacggcagaaacatcaagcagctggccagcagagcccagggcctgctgagcgccggccaccccgagggcgagcagatcatcagactgcagggccaggtggacaagcactacgccggcctgaaggacgtggccgaggagagaaagagaaagctggagaacatgtaccacctgttccagctgaagagagagaccgacgacctggagcagtggatcagcgagaaggagctggtggccagcagccccgagatgggccaggacttcgaccacgtgaccctgctgagagacaagttcagagacttcgccagagagaccggcgccatcggccaggagagagtggacaacgtgaacgccttcatcgagagactgatcgacgccggccacagcgaggccgccaccatcgccgagtggaaggacggcctgaacgagatgtgggccgacctgctggagctgatcgacaccagaatgcagctgctggccgccagctacgacctgcacagatacttctacaccggcgccgagatcctgggcctgatcgacgagaagcacagagagctgcccgaggacgtgggcctggacgccagcaccgccgagagcttccacagagtgcacaccgccttcgagagagagctgcacctgctgggcgtgcaggtgcagcagttccaggacgtggccaccagactgcagaccgcctacgccggcgagaaggccgaggccatccagaacaaggagcaggaggtgagcgccgcctggcaggccctgctggacgcctgcgccggcagaagaacccagctggtggacaccgccgacaagttcagattcttcagcatggccagagacctgctgagctggatggagagcatcatcagacagatcgagacccaggagagacccagagacgtgagcagcgtggagctgctgatgaagtaccaccagggcatcaacgccgagatcgagaccagaagcaagaacttcagcgcctgcctggagctgggcgagagcctgctgcagagacagcaccaggccagcgaggagatcagagagaagctgcagcaggtgatgagcagaagaaaggagatgaacgagaagtgggaggccagatgggagagactgagaatgctgctggaggtgtgccagttcagcagagacgccagcgtggccgaggcctggctgatcgcccaggagccctacctggccagcggcgacttcggccacaccgtggacagcgtggagaagctgatcaagagacacgaggccttcgagaagagcaccgccagctgggccgagagattcgccgccctggagaagcccaccaccctggagctgaaggagagacagatcgccgagagacccgccgaggagaccggcccccaggaggaggagggcgagaccgccggcgaggcccccgtgagccaccacgccgccaccgagagaaccagccccgtgagcctgtggagcagactgagcagcagctgggagagcctgcagcccgagcccagccacccctactag

SEQ ID NO: 100501 - DNA, 6987 bp, synthetic construct
  misc_feature 1..6987: note = Description of Artificial Sequence: Synthetic coding sequence
  source 1..6987: mol_type = other DNA
atgaccagcgccaccgagttcgagaacgtgggcaaccagcccccctacagcagaatcaacgccagatgggacgcccccgacgacgagctggacaacgacaacagcagcgccagactgttcgagagaagcagaatcaaggccctggccgacgagagagaggtggtgcagaagaagaccttcaccaagtgggtgaacagccacctggccagagtgagctgcagaatcaccgacctgtacaaggacctgagagacggcagaatgctgatcaagctgctggaggtgctgagcggcgagatgctgcccaagcccaccaagggcaagatgagaatccactgcctggagaacgtggacaaggccctgcagttcctgaaggagcagagagtgcacctggagaacatgggcagccacgacatcgtggacggcaaccacagactggtgctgggcctgatctggaccatcatcctgagattccagatccaggacatcgtggtgcagacccaggagggcagagagaccagaagcgccaaggacgccctgctgctgtggtgccagatgaagaccgccggctacccccacgtgaacgtgaccaacttcaccagcagctggaaggacggcctggccttcaacgccctgatccacaagcacagacccgacctgatcgacttcgacaagctgaaggacagcaacgccagacacaacctggagcacgccttcaacgtggccgagagacagctgggcatcatccccctgctggaccccgaggacgtgttcaccgagaaccccgacgagaagagcatcatcacctacgtggtggccttctaccactacttcagcaagatgaaggtgctggccgtggagggcaagagagtgggcaaggtgatcgaccacgccatcgagaccgagaagatgatcgagaagtacagcggcctggccagcgacctgctgacctggatcgagcagaccatcaccgtgctgaacagcagaaagttcgccaacagcctgaccggcgtgcagcagcagctgcaggccttcagcacctacagaaccgtggagaagccccccaagttccaggagaagggcaacctggaggtgctgctgttcaccatccagagcagaatgagagccaacaaccagaaggtgtacaccccccacgacggcaagctggtgagcgacatcaacagagcctgggagagcctggaggaggccgagtacagaagagagctggccctgagaaacgagctgatcagacaggagaagctggagcagctggccagaagattcgacagaaaggccgccatgagagagacctggctgagcgagaaccagagactggtggcccaggacaacttcggctacgacctggccgccgtggaggccgccaagaagaagcacgaggccatcgagaccgacaccgccgcctacgaggagagagtgagagccctggaggacctggcccaggagctggagaaggagaactaccacgaccagaagagaatcaccgccagaaaggacaacatcctgagactgtggagctacctgcaggagctgctgcagagcagaagacagagactggagaccaccctggccctgcagaagctgttccaggacatgctgcacagcatcgactggatggacgagatcaaggcccacctgctgagcgccgagttcggcaagcacctgctggaggtggaggacctgctgcagaagcacaagctgatggaggccgacatcgccatccagggcgacaaggtgaaggccatcaccgccgccaccctgaagttcaccgagggcaagggctaccagccctgcgacccccaggtgatccaggacagaatcagccacctggagcagtgcttcgaggagctgagcaacatggccgccggcagaaaggcccagctggagcagagcaagagactgtggaagttcttctgggagatggacgaggccgagagctggatcaaggagaaggagcagatctacagcagcctggactacggcaaggacctgaccagcgtgctgatcctgcagagaaagcacaaggccttcgaggacgagctgagaggcctggacgcccacctggagcagatcttccaggaggcccacggcatggtggccagaaagcagttcggccacccccagatcgaggccagaatcaaggaggtgagcgcccagtgggaccagctgaaggacctggccgccttctgcaagaagaacctgcaggacgccgagaacttcttccagttccagggcgacgccgacgacctgaaggcctggctgcaggacgcccacagactgctgagcggcgaggacgtgggccaggacgagggcgccaccagagccctgggcaagaagcacaaggacttcctggaggagctggaggagagcagaggcgtgatggagcacctggagcagcaggcccagggcttccccgaggagttcagagacagccccgacgtgacccacagactgcaggccctgagagagctgtaccagcaggtggtggcccaggccgacctgagacagcagagactgcaggaggccctggacctgtacaccgtgttcggcgagaccgacgcctgcgagctgtggatgggcgagaaggagaagtggctggccgagatggagatgcccgacaccctggaggacctggaggtggtgcagcacagattcgacatcctggaccaggagatgaagaccctgatgacccagatcgacggcgtgaacctggccgccaacagcctggtggagagcggccaccccagaagcagagaggtgaagcagtaccaggaccacctgaacaccagatggcaggccttccagaccctggtgagcgagagaagagaggccgtggacagcgccctgagagtgcacaactactgcgtggactgcgaggagaccagcaagtggatcaccgacaagaccaaggtggtggagagcaccaaggacctgggcagagacctggccggcatcatcgccatccagagaaagctgagcggcctggagagagacgtggccgccatccaggccagagtggacgccctggagagagagagccagcagctgatggacagccaccccgagcagaaggaggacatcggccagagacagaagcacctggaggagctgtggcagggcctgcagcagagcctgcagggccaggaggacctgctgggcgaggtgagccagctgcaggccttcctgcaggacctggacgacttccaggcctggctgagcatcacccagaaggccgtggccagcgaggacatgcccgagagcctgcccgaggccgagcagctgctgcagcagcacgccggcatcaaggacgagatcgacggccaccaggacagctaccagagagtgaaggagagcggcgagaaggtgatccagggccagaccgaccccgagtacctgctgctgggccagagactggagggcctggacaccggctggaacgccctgggcagaatgtgggagagcagaagccacaccctggcccagtgcctgggcttccaggagttccagaaggacgccaagcaggccgaggccatcctgagcaaccaggagtacaccctggcccacctggagccccccgacagcctggaggccgccgaggccggcatcagaaagttcgaggacttcctgggcagcatggagaacaacagagacaaggtgctgagccccgtggacagcggcaacaagctggtggccgagggcaacctgtacagcgacaagatcaaggagaaggtgcagctgatcgaggacagacacagaaagaacaacgagaaggcccaggaggccagcgtgctgctgagagacaacctggagctgcagaacttcctgcagaactgccaggagctgaccctgtggatcaacgacaagctgctgaccagccaggacgtgagctacgacgaggccagaaacctgcacaacaagtggctgaagcaccaggccttcgtggccgagctggccagccacgagggctggctggagaacatcgacgccgagggcaagcagctgatggacgagaagccccagttcaccgccctggtgagccagaagctggaggccctgcacagactgtgggacgagctgcaggccaccaccaaggagaagacccagcacctgagcgccgccagaagcagcgacctgagactgcagacccacgccgacctgaacaagtggatcagcgccatggaggaccagctgagaagcgacgaccccggcaaggacctgaccagcgtgaacagaatgctggccaagctgaagagagtggaggaccaggtgaacgtgagaaaggaggagctgggcgagctgttcgcccaggtgcccagcatgggcgaggagggcggcgacgccgacctgagcatcgagaagagattcctggacctgctggagcccctgggcagaagaaagaagcagctggagagcagcagagccaagctgcagatcagcagagacctggaggacgagaccctgtgggtggaggagagactgcccctggcccagagcgccgactacggcaccaacctgcagaccgtgcagctgttcatgaagaagaaccagaccctgcagaacgagatcctgggccacacccccagagtggaggacgtgctgcagagaggccagcagctggtggaggccgccgagatcgactgccaggacctggaggagagactgggccacctgcagagcagctgggacagactgagagaggccgccgccggcagactgcagagactgagagacgccaacgaggcccagcagtactacctggacgccgacgaggccgaggcctggatcggcgagcaggagctgtacgtgatcagcgacgagatccccaaggacgaggagggcgccatcgtgatgctgaagagacacctgagacagcagagagccgtggaggactacggcagaaacatcaagcagctggccagcagagcccagggcctgctgagcgccggccaccccgagggcgagcagatcatcagactgcagggccaggtggacaagcactacgccggcctgaaggacgtggccgaggagagaaagagaaagctggagaacatgtaccacctgttccagctgaagagagagaccgacgacctggagcagtggatcagcgagaaggagctggtggccagcagccccgagatgggccaggacttcgaccacgtgaccctgctgagagacaagttcagagacttcgccagagagaccggcgccatcggccaggagagagtggacaacgtgaacgccttcatcgagagactgatcgacgccggccacagcgaggccgccaccatcgccgagtggaaggacggcctgaacgagatgtgggccgacctgctggagctgatcgacaccagaatgcagctgctggccgccagctacgacctgcacagatacttctacaccggcgccgagatcctgggcctgatcgacgagaagcacagagagctgcccgaggacgtgggcctggacgccagcaccgccgagagcttccacagagtgcacaccgccttcgagagagagctgcacctgctgggcgtgcaggtgcagcagttccaggacgtggccaccagactgcagaccgcctacgccggcgagaaggccgaggccatccagaacaaggagcaggaggtgagcgccgcctggcaggccctgctggacgcctgcgccggcagaagaacccagctggtggacaccgccgacaagttcagattcttcagcatggccagagacctgctgagctggatggagagcatcatcagacagatcgagacccaggagagacccagagacgtgagcagcgtggagctgctgatgaagtaccaccagggcatcaacgccgagatcgagaccagaagcaagaacttcagcgcctgcctggagctgggcgagagcctgctgcagagacagcaccaggccagcgaggagatcagagagaagctgcagcaggtgatgagcagaagaaaggagatgaacgagaagtgggaggccagatgggagagactgagaatgctgctggaggtgtgccagttcagcagagacgccagcgtggccgaggcctggctgatcgcccaggagccctacctggccagcggcgacttcggccacaccgtggacagcgtggagaagctgatcaagagacacgaggccttcgagaagagcaccgccagctgggccgagagattcgccgccctggagaagcccaccaccctggagctgaaggagagacagatcgccgagagacccgccgaggagaccggcccccaggaggaggagggcgagaccgccggcgaggcccccgtgagccaccacgccgccaccgagagaaccagccccggcgaggaggagggcacctggccccagaacctgcagcagccccccccccccggccagcacaaggacggccagaagagcaccggcgacgagagacccaccaccgagcccctgttcaaggtgctggacacccccctgagcgagggcgacgagcccgccaccctgcccgcccccagagaccacggccagagcgtgcagatggagggctacctgggcagaaagcacgacctggagggccccaacaagaaggccagcaacagaagctggaacaacctgtactgcgtgctgagaaacagcgagctgaccttctacaaggacgccaagaacctggccctgggcatgccctaccacggcgaggagcccctggccctgagacacgccatctgcgagatcgccgccaactacaagaagaagaagcacgtgttcaagctgagactgagcaacggcagcgagtggctgttccacggcaaggacgaggaggagatgctgagctggctgcagggcgtgagcaccgccatcaacgagagccagagcatcagagtgaaggcccagagcctgcccctgcccagcctgagcggccccgacgccagcctgggcaagaaggacaaggagaagagattcagcttcttccccaagaagaagtag

SEQ ID NO: 100502 - DNA, 6999 bp, synthetic construct
  misc_feature 1..6999: note = Description of Artificial Sequence: Synthetic coding sequence
  source 1..6999: mol_type = other DNA
gagcccgccgacatgaccagcgccaccgagttcgagaacgtgggcaaccagcccccctacagcagaatcaacgccagatgggacgcccccgacgacgagctggacaacgacaacagcagcgccagactgttcgagagaagcagaatcaaggccctggccgacgagagagaggtggtgcagaagaagaccttcaccaagtgggtgaacagccacctggccagagtgagctgcagaatcaccgacctgtacaaggacctgagagacggcagaatgctgatcaagctgctggaggtgctgagcggcgagatgctgcccaagcccaccaagggcaagatgagaatccactgcctggagaacgtggacaaggccctgcagttcctgaaggagcagagagtgcacctggagaacatgggcagccacgacatcgtggacggcaaccacagactggtgctgggcctgatctggaccatcatcctgagattccagatccaggacatcgtggtgcagacccaggagggcagagagaccagaagcgccaaggacgccctgctgctgtggtgccagatgaagaccgccggctacccccacgtgaacgtgaccaacttcaccagcagctggaaggacggcctggccttcaacgccctgatccacaagcacagacccgacctgatcgacttcgacaagctgaaggacagcaacgccagacacaacctggagcacgccttcaacgtggccgagagacagctgggcatcatccccctgctggaccccgaggacgtgttcaccgagaaccccgacgagaagagcatcatcacctacgtggtggccttctaccactacttcagcaagatgaaggtgctggccgtggagggcaagagagtgggcaaggtgatcgaccacgccatcgagaccgagaagatgatcgagaagtacagcggcctggccagcgacctgctgacctggatcgagcagaccatcaccgtgctgaacagcagaaagttcgccaacagcctgaccggcgtgcagcagcagctgcaggccttcagcacctacagaaccgtggagaagccccccaagttccaggagaagggcaacctggaggtgctgctgttcaccatccagagcagaatgagagccaacaaccagaaggtgtacaccccccacgacggcaagctggtgagcgacatcaacagagcctgggagagcctggaggaggccgagtacagaagagagctggccctgagaaacgagctgatcagacaggagaagctggagcagctggccagaagattcgacagaaaggccgccatgagagagacctggctgagcgagaaccagagactggtggcccaggacaacttcggctacgacctggccgccgtggaggccgccaagaagaagcacgaggccatcgagaccgacaccgccgcctacgaggagagagtgagagccctggaggacctggcccaggagctggagaaggagaactaccacgaccagaagagaatcaccgccagaaaggacaacatcctgagactgtggagctacctgcaggagctgctgcagagcagaagacagagactggagaccaccctggccctgcagaagctgttccaggacatgctgcacagcatcgactggatggacgagatcaaggcccacctgctgagcgccgagttcggcaagcacctgctggaggtggaggacctgctgcagaagcacaagctgatggaggccgacatcgccatccagggcgacaaggtgaaggccatcaccgccgccaccctgaagttcaccgagggcaagggctaccagccctgcgacccccaggtgatccaggacagaatcagccacctggagcagtgcttcgaggagctgagcaacatggccgccggcagaaaggcccagctggagcagagcaagagactgtggaagttcttctgggagatggacgaggccgagagctggatcaaggagaaggagcagatctacagcagcctggactacggcaaggacctgaccagcgtgctgatcctgcagagaaagcacaaggccttcgaggacgagctgagaggcctggacgcccacctggagcagatcttccaggaggcccacggcatggtggccagaaagcagttcggccacccccagatcgaggccagaatcaaggaggtgagcgcccagtgggaccagctgaaggacctggccgccttctgcaagaagaacctgcaggacgccgagaacttcttccagttccagggcgacgccgacgacctgaaggcctggctgcaggacgcccacagactgctgagcggcgaggacgtgggccaggacgagggcgccaccagagccctgggcaagaagcacaaggacttcctggaggagctggaggagagcagaggcgtgatggagcacctggagcagcaggcccagggcttccccgaggagttcagagacagccccgacgtgacccacagactgcaggccctgagagagctgtaccagcaggtggtggcccaggccgacctgagacagcagagactgcaggaggccctggacctgtacaccgtgttcggcgagaccgacgcctgcgagctgtggatgggcgagaaggagaagtggctggccgagatggagatgcccgacaccctggaggacctggaggtggtgcagcacagattcgacatcctggaccaggagatgaagaccctgatgacccagatcgacggcgtgaacctggccgccaacagcctggtggagagcggccaccccagaagcagagaggtgaagcagtaccaggaccacctgaacaccagatggcaggccttccagaccctggtgagcgagagaagagaggccgtggacagcgccctgagagtgcacaactactgcgtggactgcgaggagaccagcaagtggatcaccgacaagaccaaggtggtggagagcaccaaggacctgggcagagacctggccggcatcatcgccatccagagaaagctgagcggcctggagagagacgtggccgccatccaggccagagtggacgccctggagagagagagccagcagctgatggacagccaccccgagcagaaggaggacatcggccagagacagaagcacctggaggagctgtggcagggcctgcagcagagcctgcagggccaggaggacctgctgggcgaggtgagccagctgcaggccttcctgcaggacctggacgacttccaggcctggctgagcatcacccagaaggccgtggccagcgaggacatgcccgagagcctgcccgaggccgagcagctgctgcagcagcacgccggcatcaaggacgagatcgacggccaccaggacagctaccagagagtgaaggagagcggcgagaaggtgatccagggccagaccgaccccgagtacctgctgctgggccagagactggagggcctggacaccggctggaacgccctgggcagaatgtgggagagcagaagccacaccctggcccagtgcctgggcttccaggagttccagaaggacgccaagcaggccgaggccatcctgagcaaccaggagtacaccctggcccacctggagccccccgacagcctggaggccgccgaggccggcatcagaaagttcgaggacttcctgggcagcatggagaacaacagagacaaggtgctgagccccgtggacagcggcaacaagctggtggccgagggcaacctgtacagcgacaagatcaaggagaaggtgcagctgatcgaggacagacacagaaagaacaacgagaaggcccaggaggccagcgtgctgctgagagacaacctggagctgcagaacttcctgcagaactgccaggagctgaccctgtggatcaacgacaagctgctgaccagccaggacgtgagctacgacgaggccagaaacctgcacaacaagtggctgaagcaccaggccttcgtggccgagctggccagccacgagggctggctggagaacatcgacgccgagggcaagcagctgatggacgagaagccccagttcaccgccctggtgagccagaagctggaggccctgcacagactgtgggacgagctgcaggccaccaccaaggagaagacccagcacctgagcgccgccagaagcagcgacctgagactgcagacccacgccgacctgaacaagtggatcagcgccatggaggaccagctgagaagcgacgaccccggcaaggacctgaccagcgtgaacagaatgctggccaagctgaagagagtggaggaccaggtgaacgtgagaaaggaggagctgggcgagctgttcgcccaggtgcccagcatgggcgaggagggcggcgacgccgacctgagcatcgagaagagattcctggacctgctggagcccctgggcagaagaaagaagcagctggagagcagcagagccaagctgcagatcagcagagacctggaggacgagaccctgtgggtggaggagagactgcccctggcccagagcgccgactacggcaccaacctgcagaccgtgcagctgttcatgaagaagaaccagaccctgcagaacgagatcctgggccacacccccagagtggaggacgtgctgcagagaggccagcagctggtggaggccgccgagatcgactgccaggacctggaggagagactgggccacctgcagagcagctgggacagactgagagaggccgccgccggcagactgcagagactgagagacgccaacgaggcccagcagtactacctggacgccgacgaggccgaggcctggatcggcgagcaggagctgtacgtgatcagcgacgagatccccaaggacgaggagggcgccatcgtgatgctgaagagacacctgagacagcagagagccgtggaggactacggcagaaacatcaagcagctggccagcagagcccagggcctgctgagcgccggccaccccgagggcgagcagatcatcagactgcagggccaggtggacaagcactacgccggcctgaaggacgtggccgaggagagaaagagaaagctggagaacatgtaccacctgttccagctgaagagagagaccgacgacctggagcagtggatcagcgagaaggagctggtggccagcagccccgagatgggccaggacttcgaccacgtgaccctgctgagagacaagttcagagacttcgccagagagaccggcgccatcggccaggagagagtggacaacgtgaacgccttcatcgagagactgatcgacgccggccacagcgaggccgccaccatcgccgagtggaaggacggcctgaacgagatgtgggccgacctgctggagctgatcgacaccagaatgcagctgctggccgccagctacgacctgcacagatacttctacaccggcgccgagatcctgggcctgatcgacgagaagcacagagagctgcccgaggacgtgggcctggacgccagcaccgccgagagcttccacagagtgcacaccgccttcgagagagagctgcacctgctgggcgtgcaggtgcagcagttccaggacgtggccaccagactgcagaccgcctacgccggcgagaaggccgaggccatccagaacaaggagcaggaggtgagcgccgcctggcaggccctgctggacgcctgcgccggcagaagaacccagctggtggacaccgccgacaagttcagattcttcagcatggccagagacctgctgagctggatggagagcatcatcagacagatcgagacccaggagagacccagagacgtgagcagcgtggagctgctgatgaagtaccaccagggcatcaacgccgagatcgagaccagaagcaagaacttcagcgcctgcctggagctgggcgagagcctgctgcagagacagcaccaggccagcgaggagatcagagagaagctgcagcaggtgatgagcagaagaaaggagatgaacgagaagtgggaggccagatgggagagactgagaatgctgctggaggtgtgccagttcagcagagacgccagcgtggccgaggcctggctgatcgcccaggagccctacctggccagcggcgacttcggccacaccgtggacagcgtggagaagctgatcaagagacacgaggccttcgagaagagcaccgccagctgggccgagagattcgccgccctggagaagcccaccaccctggagctgaaggagagacagatcgccgagagacccgccgaggagaccggcccccaggaggaggagggcgagaccgccggcgaggcccccgtgagccaccacgccgccaccgagagaaccagccccggcgaggaggagggcacctggccccagaacctgcagcagccccccccccccggccagcacaaggacggccagaagagcaccggcgacgagagacccaccaccgagcccctgttcaaggtgctggacacccccctgagcgagggcgacgagcccgccaccctgcccgcccccagagaccacggccagagcgtgcagatggagggctacctgggcagaaagcacgacctggagggccccaacaagaaggccagcaacagaagctggaacaacctgtactgcgtgctgagaaacagcgagctgaccttctacaaggacgccaagaacctggccctgggcatgccctaccacggcgaggagcccctggccctgagacacgccatctgcgagatcgccgccaactacaagaagaagaagcacgtgttcaagctgagactgagcaacggcagcgagtggctgttccacggcaaggacgaggaggagatgctgagctggctgcagggcgtgagcaccgccatcaacgagagccagagcatcagagtgaaggcccagagcctgcccctgcccagcctgagcggccccgacgccagcctgggcaagaaggacaaggagaagagattcagcttcttccccaagaagaagtag

SEQ ID NO: 100503 - DNA, 6414 bp, synthetic construct; identical to SEQ ID NO: 100500
  misc_feature 1..6414: note = Description of Artificial Sequence: Synthetic coding sequence
  source 1..6414: mol_type = other DNA

SEQ ID NO: 100504 - DNA, 6987 bp, synthetic construct; identical to SEQ ID NO: 100501
  misc_feature 1..6987: note = Description of Artificial Sequence: Synthetic coding sequence
  source 1..6987: mol_type = other DNA

SEQ ID NO: 100505 - DNA, 6468 bp, synthetic construct
  misc_feature 1..6468: note = Description of Artificial Sequence: Synthetic coding sequence
  source 1..6468: mol_type = other DNA
atggagctgcagagaaccagcagcatcagcggccccctgagccccgcctacaccggccaggtgccctacaactacaaccagctggagggcagattcaagcagctgcaggacgagagagaggccgtgcagaagaagaccttcaccaagtgggtgaacagccacctggccagagtgagctgcagaatcaccgacctgtacaccgacctgagagacggcagaatgctgatcaagctgctggaggtgctgagcggcgagagactgcccaagcccaccaagggcagaatgagaatccactgcctggagaacgtggacaaggccctgcagttcctgaaggagcagagagtgcacctggagaacatgggcagccacgacatcgtggacggcaaccacagactgaccctgggcctgatctggaccatcatcctgagattccagatccaggacatcagcgtggagaccgaggacaacaaggagaagaagagcgccaaggacgccctgctgctgtggtgccagatgaagaccgccggctaccccaacgtgaacatccacaacttcaccaccagctggagagacggcatggccttcaacgccctgatccacaagcacagacccgacctgatcgacttcgacaagctgaagaagagcaacgcccactacaacctgcagaacgccttcaacctggccgagcagcacctgggcctgaccaagctgctggaccccgaggacatcagcgtggaccaccccgacgagaagagcatcatcacctacgtggtgacctactaccactacttcagcaagatgaaggccctggccgtggagggcaagagaatcggcaaggtgctggacaacgccatcgagaccgagaagatgatcgagaagtacgagagcctggccagcgacctgctggagtggatcgagcagaccatcatcatcctgaacaacagaaagttcgccaacagcctggtgggcgtgcagcagcagctgcaggccttcaacacctacagaaccgtggagaagccccccaagttcaccgagaagggcaacctggaggtgctgctgttcaccatccagagcaagatgagagccaacaaccagaaggtgtacatgcccagagagggcaagctgatcagcgacatcaacaaggcctgggagagactggagaaggccgagcacgagagagagctggccctgagaaacgagctgatcagacaggagaagctggagcagctggccagaagattcgacagaaaggccgccatgagagagacctggctgagcgagaaccagagactggtgagccaggacaacttcggcttcgacctgcccgccgtggaggccgccaccaagaagcacgaggccatcgagaccgacatcgccgcctacgaggagagagtgcaggccgtggtggccgtggccagagagctggaggccgagaactaccacgacatcaagagaatcaccgccagaaaggacaacgtgatcagactgtgggagtacctgctggagctgctgagagccagaagacagagactggagatgaacctgggcctgcagaagatcttccaggagatgctgtacatcatggactggatggacgagatgaaggtgctggtgctgagccaggactacggcaagcacctgctgggcgtggaggacctgctgcagaagcacaccctggtggaggccgacatcggcatccaggccgagagagtgagaggcgtgaacgccagcgcccagaagttcgccaccgacggcgagggctacaagccctgcgacccccaggtgatcagagacagagtggcccacatggagttctgctaccaggagctgtgccagctggccgccgagagaagagccagactggaggagagcagaagactgtggaagttcttctgggagatggccgaggaggagggctggatcagagagaaggagaagatcctgagcagcgacgactacggcaaggacctgaccagcgtgatgagactgctgagcaagcacagagccttcgaggacgagatgagcggcagaagcggccacttcgagcaggccatcaaggagggcgaggacatgatcgccgaggagcacttcggcagcgagaagatcagagagagaatcatctacatcagagagcagtgggccaacctggagcagctgagcgccatcagaaagaagagactggaggaggccagcctgctgcaccagttccaggccgacgccgacgacatcgacgcctggatgctggacatcctgaagatcgtgagcagcagcgacgtgggccacgacgagtacagcacccagagcctggtgaagaagcacaaggacgtggccgaggagatcgccaactacagacccaccctggacaccctgcacgagcaggccagcgccctgccccaggagcacgccgagagccccgacgtgagaggcagactgagcggcatcgaggagagatacaaggaggtggccgagctgaccagactgagaaagcaggccctgcaggacaccctggccctgtacaagatgttcagcgaggccgacgcctgcgagctgtggatcgacgagaaggagcagtggctgaacaacatgcagatccccgagaagctggaggacctggaggtgatccagcacagattcgagagcctggagcccgagatgaacaaccaggccagcagagtggccgtggtgaaccagatcgccagacagctgatgcacagcggccaccccagcgagaaggagatcaaggcccagcaggacaagctgaacaccagatggagccagttcagagagctggtggacagaaagaaggacgccctgctgagcgccctgagcatccagaactaccacctggagtgcaacgagaccaagagctggatcagagagaagaccaaggtgatcgagagcacccaggacctgggcaacgacctggccggcgtgatggccctgcagagaaagctgaccggcatggagagagacctggtggccatcgaggccaagctgagcgacctgcagaaggaggccgagaagctggagagcgagcaccccgaccaggcccaggccatcctgagcagactggccgagatcagcgacgtgtgggaggagatgaagaccaccctgaagaacagagaggccagcctgggcgaggccagcaagctgcagcagttcctgagagacctggacgacttccagagctggctgagcagaacccagaccgccatcgccagcgaggacatgcccaacaccctgaccgaggccgagaagctgctgacccagcacgagaacatcaagaacgagatcgacaactacgaggaggactaccagaagatgagagacatgggcgagatggtgacccagggccagaccgacgcccagtacatgttcctgagacagagactgcaggccctggacaccggctggaacgagctgcacaagatgtgggagaacagacagaacctgctgagccagagccacgcctaccagcagttcctgagagacaccaagcaggccgaggccttcctgaacaaccaggagtacgtgctggcccacaccgagatgcccaccaccctggagggcgccgaggccgccatcaagaagcaggaggacttcatgaccaccatggacgccaacgaggagaagatcaacgccgtggtggagaccggcagaagactggtgagcgacggcaacatcaacagcgacagaatccaggagaaggtggacagcatcgacgacagacacagaaagaacagagagaccgccagcgagctgctgatgagactgaaggacaacagagacctgcagaagttcctgcaggactgccaggagctgagcctgtggatcaacgagaagatgctgaccgcccaggacatgagctacgacgaggccagaaacctgcacagcaagtggctgaagcaccaggccttcatggccgagctggccagcaacaaggagtggctggacaagatcgagaaggagggcatgcagctgatcagcgagaagcccgagaccgaggccgtggtgaaggagaagctgaccggcctgcacaagatgtgggaggtgctggagagcaccacccagaccaaggcccagagactgttcgacgccaacaaggccgagctgttcacccagagctgcgccgacctggacaagtggctgcacggcctggagagccagatccagagcgacgactacggcaaggacctgaccagcgtgaacatcctgctgaagaagcagcagatgctggagaaccagatggaggtgagaaagaaggagatcgaggagctgcagagccaggcccaggccctgagccaggagggcaagagcaccgacgaggtggacagcaagagactgaccgtgcagaccaagttcatggagctgctggagcccctgaacgagagaaagcacaacctgctggccagcaaggagatccaccagttcaacagagacgtggaggacgagatcctgtgggtgggcgagagaatgcccctggccaccagcaccgaccacggccacaacctgcagaccgtgcagctgctgatcaagaagaaccagaccctgcagaaggagatccagggccaccagcccagaatcgacgacatcttcgagagaagccagaacatcgtgaccgacagcagcagcctgagcgccgaggccatcagacagagactggccgacctgaagcagctgtggggcctgctgatcgaggagaccgagaagagacacagaagactggaggaggcccacagagcccagcagtactacttcgacgccgccgaggccgaggcctggatgagcgagcaggagctgtacatgatgagcgaggagaaggccaaggacgagcagagcgccgtgagcatgctgaagaagcaccagatcctggagcaggccgtggaggactacgccgagaccgtgcaccagctgagcaagaccagcagagccctggtggccgacagccaccccgagagcgagagaatcagcatgagacagagcaaggtggacaagctgtacgccggcctgaaggacctggccgaggagagaagaggcaagctggacgagagacacagactgttccagctgaacagagaggtggacgacctggagcagtggatcgccgagagagaggtggtggccggcagccacgagctgggccaggactacgagcacgtgaccatgctgcaggagagattcagagagttcgccagagacaccggcaacatcggccaggagagagtggacaccgtgaaccacctggccgacgagctgatcaacagcggccacagcgacgccgccaccatcgccgagtggaaggacggcctgaacgaggcctgggccgacctgctggagctgatcgacaccagaacccagatcctggccgccagctacgagctgcacaagttctaccacgacgccaaggagatcttcggcagaatccaggacaagcacaagaagctgcccgaggagctgggcagagaccagaacaccgtggagaccctgcagagaatgcacaccaccttcgagcacgacatccaggccctgggcacccaggtgagacagctgcaggaggacgccgccagactgcaggccgcctacgccggcgacaaggccgacgacatccagaagagagagaacgaggtgctggaggcctggaagagcctgctggacgcctgcgagagcagaagagtgagactggtggacaccggcgacaagttcagattcttcagcatggtgagagacctgatgctgtggatggaggacgtgatcagacagatcgaggcccaggagaagcccagagacgtgagcagcgtggagctgctgatgaacaaccaccagggcatcaaggccgagatcgacgccagaaacgacagcttcaccacctgcatcgagctgggcaagagcctgctggccagaaagcactacgccagcgaggagatcaaggagaagctgctgcagctgaccgagaagagaaaggagatgatcgacaagtgggaggacagatgggagtggctgagactgatcctggaggtgcaccagttcagcagagacgccagcgtggccgaggcctggctgctgggccaggagccctacctgagcagcagagagatcggccagagcgtggacgaggtggagaagctgatcaagagacacgaggccttcgagaagagcgccgccacctgggacgagagattcagcgccctggagagactgaccaccctggagctgctggaggtgagaagacagcaggaggaggaggagagaaagagaagaccccccagccccgagcccagcaccaaggtgagcgaggaggccgagagccagcagcagtgggacaccagcaagggcgagcaggtgagccagaacggcctgcccgccgagcagggcagccccagagtgagctacagaagccagacctaccagaactacaagaacttcaacagcagaagaaccgccagcgaccagccctggagcggcctgtag

SEQ ID NO: 100506 - DNA, 7095 bp, synthetic construct
  misc_feature 1..7095: note = Description of Artificial Sequence: Synthetic coding sequence
  source 1..7095: mol_type = other DNA
atgaccaccaccgtggccaccgactacgacaacatcgagatccagcagcagtacagcgacgtgaacaacagatgggacgtggacgactgggacaacgagaacagcagcgccagactgttcgagagaagcagaatcaaggccctggccgacgagagagaggccgtgcagaagaagaccttcaccaagtgggtgaacagccacctggccagagtgagctgcagaatcaccgacctgtacaccgacctgagagacggcagaatgctgatcaagctgctggaggtgctgagcggcgagagactgcccaagcccaccaagggcagaatgagaatccactgcctggagaacgtggacaaggccctgcagttcctgaaggagcagagagtgcacctggagaacatgggcagccacgacatcgtggacggcaaccacagactgaccctgggcctgatctggaccatcatcctgagattccagatccaggacatcagcgtggagaccgaggacaacaaggagaagaagagcgccaaggacgccctgctgctgtggtgccagatgaagaccgccggctaccccaacgtgaacatccacaacttcaccaccagctggagagacggcatggccttcaacgccctgatccacaagcacagacccgacctgatcgacttcgacaagctgaagaagagcaacgcccactacaacctgcagaacgccttcaacctggccgagcagcacctgggcctgaccaagctgctggaccccgaggacatcagcgtggaccaccccgacgagaagagcatcatcacctacgtggtgacctactaccactacttcagcaagatgaaggccctggccgtggagggcaagagaatcggcaaggtgctggacaacgccatcgagaccgagaagatgatcgagaagtacgagagcctggccagcgacctgctggagtggatcgagcagaccatcatcatcctgaacaacagaaagttcgccaacagcctggtgggcgtgcagcagcagctgcaggccttcaacacctacagaaccgtggagaagccccccaagttcaccgagaagggcaacctggaggtgctgctgttcaccatccagagcaagatgagagccaacaaccagaaggtgtacatgcccagagagggcaagctgatcagcgacatcaacaaggcctgggagagactggagaaggccgagcacgagagagagctggccctgagaaacgagctgatcagacaggagaagctggagcagctggccagaagattcgacagaaaggccgccatgagagagacctggctgagcgagaaccagagactggtgagccaggacaacttcggcttcgacctgcccgccgtggaggccgccaccaagaagcacgaggccatcgagaccgacatcgccgcctacgaggagagagtgcaggccgtggtggccgtggccagagagctggaggccgagaactaccacgacatcaagagaatcaccgccagaaaggacaacgtgatcagactgtgggagtacctgctggagctgctgagagccagaagacagagactggagatgaacctgggcctgcagaagatcttccaggagatgctgtacatcatggactggatggacgagatgaaggtgctggtgctgagccaggactacggcaagcacctgctgggcgtggaggacctgctgcagaagcacaccctggtggaggccgacatcggcatccaggccgagagagtgagaggcgtgaacgccagcgcccagaagttcgccaccgacggcgagggctacaagccctgcgacccccaggtgatcagagacagagtggcccacatggagttctgctaccaggagctgtgccagctggccgccgagagaagagccagactggaggagagcagaagactgtggaagttcttctgggagatggccgaggaggagggctggatcagagagaaggagaagatcctgagcagcgacgactacggcaaggacctgaccagcgtgatgagactgctgagcaagcacagagccttcgaggacgagatgagcggcagaagcggccacttcgagcaggccatcaaggagggcgaggacatgatcgccgaggagcacttcggcagcgagaagatcagagagagaatcatctacatcagagagcagtgggccaacctggagcagctgagcgccatcagaaagaagagactggaggaggccagcctgctgcaccagttccaggccgacgccgacgacatcgacgcctggatgctggacatcctgaagatcgtgagcagcagcgacgtgggccacgacgagtacagcacccagagcctggtgaagaagcacaaggacgtggccgaggagatcgccaactacagacccaccctggacaccctgcacgagcaggccagcgccctgccccaggagcacgccgagagccccgacgtgagaggcagactgagcggcatcgaggagagatacaaggaggtggccgagctgaccagactgagaaagcaggccctgcaggacaccctggccctgtacaagatgttcagcgaggccgacgcctgcgagctgtggatcgacgagaaggagcagtggctgaacaacatgcagatccccgagaagctggaggacctggaggtgatccagcacagattcgagagcctggagcccgagatgaacaaccaggccagcagagtggccgtggtgaaccagatcgccagacagctgatgcacagcggccaccccagcgagaaggagatcaaggcccagcaggacaagctgaacaccagatggagccagttcagagagctggtggacagaaagaaggacgccctgctgagcgccctgagcatccagaactaccacctggagtgcaacgagaccaagagctggatcagagagaagaccaaggtgatcgagagcacccaggacctgggcaacgacctggccggcgtgatggccctgcagagaaagctgaccggcatggagagagacctggtggccatcgaggccaagctgagcgacctgcagaaggaggccgagaagctggagagcgagcaccccgaccaggcccaggccatcctgagcagactggccgagatcagcgacgtgtgggaggagatgaagaccaccctgaagaacagagaggccagcctgggcgaggccagcaagctgcagcagttcctgagagacctggacgacttccagagctggctgagcagaacccagaccgccatcgccagcgaggacatgcccaacaccctgaccgaggccgagaagctgctgacccagcacgagaacatcaagaacgagatcgacaactacgaggaggactaccagaagatgagagacatgggcgagatggtgacccagggccagaccgacgcccagtacatgttcctgagacagagactgcaggccctggacaccggctggaacgagctgcacaagatgtgggagaacagacagaacctgctgagccagagccacgcctaccagcagttcctgagagacaccaagcaggccgaggccttcctgaacaaccaggagtacgtgctggcccacaccgagatgcccaccaccctggagggcgccgaggccgccatcaagaagcaggaggacttcatgaccaccatggacgccaacgaggagaagatcaacgccgtggtggagaccggcagaagactggtgagcgacggcaacatcaacagcgacagaatccaggagaaggtggacagcatcgacgacagacacagaaagaacagagagaccgccagcgagctgctgatgagactgaaggacaacagagacctgcagaagttcctgcaggactgccaggagctgagcctgtggatcaacgagaagatgctgaccgcccaggacatgagctacgacgaggccagaaacctgcacagcaagtggctgaagcaccaggccttcatggccgagctggccagcaacaaggagtggctggacaagatcgagaaggagggcatgcagctgatcagcgagaagcccgagaccgaggccgtggtgaaggagaagctgaccggcctgcacaagatgtgggaggtgctggagagcaccacccagaccaaggcccagagactgttcgacgccaacaaggccgagctgttcacccagagctgcgccgacctggacaagtggctgcacggcctggagagccagatccagagcgacgactacggcaaggacctgaccagcgtgaacatcctgctgaagaagcagcagatgctggagaaccagatggaggtgagaaagaaggagatcgaggagctgcagagccaggcccaggccctgagccaggagggcaagagcaccgacgaggtggacagcaagagactgaccgtgcagaccaagttcatggagctgctggagcccctgaacgagagaaagcacaacctgctggccagcaaggagatccaccagttcaacagagacgtggaggacgagatcctgtgggtgggcgagagaatgcccctggccaccagcaccgaccacggccacaacctgcagaccgtgcagctgctgatcaagaagaaccagaccctgcagaaggagatccagggccaccagcccagaatcgacgacatcttcgagagaagccagaacatcgtgaccgacagcagcagcctgagcgccgaggccatcagacagagactggccgacctgaagcagctgtggggcctgctgatcgaggagaccgagaagagacacagaagactggaggaggcccacagagcccagcagtactacttcgacgccgccgaggccgaggcctggatgagcgagcaggagctgtacatgatgagcgaggagaaggccaaggacgagcagagcgccgtgagcatgctgaagaagcaccagatcctggagcaggccgtggaggactacgccgagaccgtgcaccagctgagcaagaccagcagagccctggtggccgacagccaccccgagagcgagagaatcagcatgagacagagcaaggtggacaagctgtacgccggcctgaaggacctggccgaggagagaagaggcaagctggacgagagacacagactgttccagctgaacagagaggtggacgacctggagcagtggatcgccgagagagaggtggtggccggcagccacgagctgggccaggactacgagcacgtgaccatgctgcaggagagattcagagagttcgccagagacaccggcaacatcggccaggagagagtggacaccgtgaaccacctggccgacgagctgatcaacagcggccacagcgacgccgccaccatcgccgagtggaaggacggcctgaacgaggcctgggccgacctgctggagctgatcgacaccagaacccagatcctggccgccagctacgagctgcacaagttctaccacgacgccaaggagatcttcggcagaatccaggacaagcacaagaagctgcccgaggagctgggcagagaccagaacaccgtggagaccctgcagagaatgcacaccaccttcgagcacgacatccaggccctgggcacccaggtgagacagctgcaggaggacgccgccagactgcaggccgcctacgccggcgacaaggccgacgacatccagaagagagagaacgaggtgctggaggcctggaagagcctgctggacgcctgcgagagcagaagagtgagactggtggacaccggcgacaagttcagattcttcagcatggtgagagacctgatgctgtggatggaggacgtgatcagacagatcgaggcccaggagaagcccagagacgtgagcagcgtggagctgctgatgaacaaccaccagggcatcaaggccgagatcgacgccagaaacgacagcttcaccacctgcatcgagctgggcaagagcctgctggccagaaagcactacgccagcgaggagatcaaggagaagctgctgcagctgaccgagaagagaaaggagatgatcgacaagtgggaggacagatgggagtggctgagactgatcctggaggtgcaccagttcagcagagacgccagcgtggccgaggcctggctgctgggccaggagccctacctgagcagcagagagatcggccagagcgtggacgaggtggagaagctgatcaagagacacgaggccttcgagaagagcgccgccacctgggacgagagattcagcgccctggagagactgaccaccctggagctgctggaggtgagaagacagcaggaggaggaggagagaaagagaagaccccccagccccgagcccagcaccaaggtgagcgaggaggccgagagccagcagcagtgggacaccagcaagggcgagcaggtgagccagaacggcctgcccgccgagcagggcagccccagaatggccgagaccgtggacaccagcgagatggtgaacggcgccaccgagcagagaaccagcagcaaggagagcagccccatccccagccccaccagcgacagaaaggccaagaccgccctgcccgcccagagcgccgccaccctgcccgccagaacccaggagacccccagcgcccagatggagggcttcctgaacagaaagcacgagtgggaggcccacaacaagaaggccagcagcagaagctggcacaacgtgtactgcgtgatcaacaaccaggagatgggcttctacaaggacgccaagaccgccgccagcggcatcccctaccacagcgaggtgcccgtgagcctgaaggaggccgtgtgcgaggtggccctggactacaagaagaagaagcacgtgttcaagctgagactgaacgacggcaacgagtacctgttccaggccaaggacgacgaggagatgaacacctggatccaggccatcagcagcgccatcagcagcgacaagcacgaggtgagcgccagcacccagagcacccccgccagcagcagagcccagaccctgcccaccagcgtggtgaccatcaccagcgagagcagccccggcaagagagagaaggacaaggagaaggacaaggagaagagattcagcctgttcggcaagaagaagtag

SEQ ID NO: 100507 - DNA, 2073 bp, synthetic construct
  misc_feature 1..2073: note = Description of Artificial Sequence: Synthetic coding sequence
  source 1..2073: mol_type = other DNA
atgaccaccaccgtggccaccgactacgacaacatcgagatccagcagcagtacagcgacgtgaacaacagatgggacgtggacgactgggacaacgagaacagcagcgccagactgttcgagagaagcagaatcaaggccctggccgacgagagagaggccgtgcagaagaagaccttcaccaagtgggtgaacagccacctggccagagtgagctgcagaatcaccgacctgtacaccgacctgagagacggcagaatgctgatcaagctgctggaggtgctgagcggcgagagactgcccaagcccaccaagggcagaatgagaatccactgcctggagaacgtggacaaggccctgcagttcctgaaggagcagagagtgcacctggagaacatgggcagccacgacatcgtggacggcaaccacagactgaccctgggcctgatctggaccatcatcctgagattccagatccaggacatcagcgtggagaccgaggacaacaaggagaagaagagcgccaaggacgccctgctgctgtggtgccagatgaagaccgccggctaccccaacgtgaacatccacaacttcaccaccagctggagagacggcatggccttcaacgccctgatccacaagcacagacccgacctgatcgacttcgacaagctgaagaagagcaacgcccactacaacctgcagaacgccttcaacctggccgagcagcacctgggcctgaccaagctgctggaccccgaggacatcagcgtggaccaccccgacgagaagagcatcatcacctacgtggtgacctactaccactacttcagcaagatgaaggccctggccgtggagggcaagagaatcggcaaggtgctggacaacgccatcgagaccgagaagatgatcgagaagtacgagagcctggccagcgacctgctggagtggatcgagcagaccatcatcatcctgaacaacagaaagttcgccaacagcctggtgggcgtgcagcagcagctgcaggccttcaacacctacagaaccgtggagaagccccccaagttcaccgagaagggcaacctggaggtgctgctgttcaccatccagagcaagatgagagccaacaaccagaaggtgtacatgcccagagagggcaagctgatcagcgacatcaacaaggcctgggagagactggagaaggccgagcacgagagagagctggccctgagaaacgagctgatcagacaggagaagctggagcagctggccagaagattcgacagaaaggccgccatgagagagacctggctgagcgagaaccagagactggtgagccaggacaacttcggcttcgacctgcccgccgtggaggccgccaccaagaagcacgaggccatcgagaccgacatcgccgcctacgaggagagagtgcaggccgtggtggccgtggccagagagctggaggccgagaactaccacgacatcaagagaatcaccgccagaaaggacaacgtgatcagactgtgggagtacctgctggagctgctgagagccagaagacagagactggagatgaacctgggcctgcagaagatcttccaggagatgctgtacatcatggactggatggacgagatgaaggtgctggtgctgagccaggactacggcaagcacctgctgggcgtggaggacctgctgcagaagcacaccctggtggaggccgacatcggcatccaggccgagagagtgagaggcgtgaacgccagcgcccagaagttcgccaccgacggcgagggctacaagccctgcgacccccaggtgatcagagacagagtggcccacatggagttctgctaccaggagctgtgccagctggccgccgagagaagagccagactggaggagagcagaagactgtggaagttcttctgggagatggccgaggaggagggctggatcagagagaaggagaagatcctgagcagcgacgactacggcaaggacctgaccagcgtgatgagactgctgagcaagcacagagccttcgaggacgagatgagcggcagatag

SEQ ID NO: 100508 - DNA, 7173 bp, synthetic construct
  misc_feature 1..7173: note = Description of Artificial Sequence: Synthetic coding sequence
  source 1..7173: mol_type = other DNA
atgagcagcaccctgagccccaccgacttcgacagcctggagatccagggccagtacagcgacatcaacaacagatgggacctgcccgacagcgactgggacaacgacagcagcagcgccagactgttcgagagaagcagaatcaaggccctggccgacgagagagaggccgtgcagaagaagaccttcaccaagtgggtgaacagccacctggccagagtgacctgcagagtgggcgacctgtacagcgacctgagagacggcagaaacctgctgagactgctggaggtgctgagcggcgagatcctgcccaagcccaccaagggcagaatgagaatccactgcctggagaacgtggacaaggccctgcagttcctgaaggagcagaaggtgcacctggagaacatgggcagccacgacatcgtggacggcaaccacagactgaccctgggcctggtgtggaccatcatcctgagattccagatccaggacatcagcgtggagaccgaggacaacaaggagaagaagagcgccaaggacgccctgctgctgtggtgccagatgaagaccgccggctaccccaacgtgaacgtgcacaacttcaccaccagctggagagacggcctggccttcaacgccatcgtgcacaagcacagacccgacctgctggacttcgagagcctgaagaagtgcaacgcccactacaacctgcagaacgccttcaacctggccgagaaggagctgggcctgaccaagctgctggaccccgaggacgtgaacgtggaccagcccgacgagaagagcatcatcacctacgtggccacctactaccactacttcagcaagatgaaggccctggccgtggagggcaagagaatcggcaaggtgctggaccacgccatggaggccgagagactggtggagaagtacgagagcctggccagcgagctgctgcagtggatcgagcagaccatcgtgaccctgaacgacagacagctggccaacagcctgagcggcgtgcagaaccagctgcagagcttcaacagctacagaaccgtggagaagccccccaagttcaccgagaagggcaacctggaggtgctgctgttcaccatccagagcaagctgagagccaacaaccagaaggtgtacacccccagagagggcagactgatcagcgacatcaacaaggcctgggagagactggagaaggccgagcacgagagagagctggccctgagaaccgagctgatcagacaggagaagctggagcagctggccgccagattcgacagaaaggccgccatgagagagacctggctgagcgagaaccagagactggtgagccaggacaacttcggcctggagctggccgccgtggaggccgccgtgagaaagcacgaggccatcgagaccgacatcgtggcctacagcggcagagtgcaggccgtggacgccgtggccgccgagctggccgccgagagataccacgacatcaagagaatcgccgccagacagcacaacgtggccagactgtgggacttcctgagacagatggtggccgccagaagagagagactgctgctgaacctggagctgcagaaggtgttccaggacctgctgtacctgatggactggatggaggagatgaagggcagactgcagagccaggacctgggcagacacctggccggcgtggaggacctgctgcagctgcacgagctggtggaggccgacatcgccgtgcaggccgagagagtgagagccgtgagcgccagcgccctgagattctgcaaccccggcaaggagtacagaccctgcgacccccagctggtgagcgagagagtggccaagctggagcagagctacgaggccctgtgcgagctggccgccgccagaagagccagactggaggagagcagaagactgtggagattcctgtgggaggtgggcgaggccgaggcctgggtgagagagcagcagcacctgctggccagcgccgacaccggcagagacctgaccggcgccctgagactgctgaacaagcacaccgccctgagaggcgagatgagcggcagactgggccccctgaagctgaccctggagcagggccagcagctggtggccgagggccaccccggcgccagccaggccagcgccagagccgccgagctgcaggcccagtgggagagactggaggccctggccgaggagagagcccagagactggcccaggccgccagcctgtaccagttccaggccgacgccaacgacatggaggcctggctggtggacgccctgagactggtgagcagccccgagctgggccacgacgagttcagcacccaggccctggccagacagcacagagccctggaggaggagatcagaagccacagacccaccctggacgccctgagagagcaggccgccgccctgccccccaccctgagcagaacccccgaggtgcagagcagagtgcccaccctggagagacactacgaggagctgcaggccagagccggcgagagagccagagccctggaggccgccctggccctgtacaccatgctgagcgaggccggcgcctgcggcctgtgggtggaggagaaggagcagtggctgaacggcctggccctgcccgagagactggaggacctggaggtggtgcagcagagattcgagaccctggagcccgagatgaacaccctggccgcccagatcaccgccgtgaacgacatcgccgagcagctgctgaaggccaacccccccggcaaggacagaatcgtgaacacccaggagcagctgaaccacagatggcagcagttcagaagactggccgacggcaagaaggccgccctgaccagcgccctgagcatccagaactaccacctggagtgcaccgagacccaggcctggatgagagagaagaccaaggtgatcgagagcacccagggcctgggcaacgacctggccggcgtgctggccctgcagagaaagctggccggcaccgagagagacctggaggccatcgccgccagagtgggcgagctgaccagagaggccaacgccctggccgccggccaccccgcccaggccgtggccatcaacgccagactgagagaggtgcagaccggctgggaggacctgagagccaccatgagaagaagagaggagagcctgggcgaggccagaagactgcaggacttcctgagaagcctggacgacttccaggcctggctgggcagaacccagaccgccgtggccagcgaggagggccccgccaccctgcccgaggccgaggccctgctggcccagcacgccgccctgagaggcgaggtggagagagcccagagcgagtacagcagactgagagccctgggcgaggaggtgaccagagaccaggccgacccccagtgcctgttcctgagacagagactggaggccctgggcaccggctgggaggagctgggcagaatgtgggagagcagacagggcagactggcccaggcccacggcttccagggcttcctgagagacgccagacaggccgagggcgtgctgagcagccaggagtacgtgctgagccacaccgagatgcccggcaccctgcaggccgccgacgccgccatcaagaagctggaggacttcatgagcaccatggacgccaacggcgagagaatccacggcctgctggaggccggcagacagctggtgagcgagggcaacatccacgccgacaagatcagagagaaggccgacagcatcgagagaagacacaagaagaaccaggacgccgcccagcagttcctgggcagactgagagacaacagagagcagcagcacttcctgcaggactgccacgagctgaagctgtggatcgacgagaagatgctgaccgcccaggacgtgagctacgacgaggccagaaacctgcacaccaagtggcagaagcaccaggccttcatggccgagctggccgccaacaaggactggctggacaaggtggacaaggagggcagagagctgaccctggagaagcccgagctgaaggccctggtgagcgagaagctgagagacctgcacagaagatgggacgagctggagaccaccacccaggccaaggccagaagcctgttcgacgccaacagagccgagctgttcgcccagagctgctgcgccctggagagctggctggagagcctgcaggcccagctgcacagcgacgactacggcaaggacctgaccagcgtgaacatcctgctgaagaagcagcagatgctggagtgggagatggccgtgagagagaaggaggtggaggccatccaggcccaggccaaggccctggcccaggaggaccagggcgccggcgaggtggagagaaccagcagagccgtggaggagaagttcagagccctgtgccagcccatgagagagagatgcagaagactgcaggccagcagagagcagcaccagttccacagagacgtggaggacgagatcctgtgggtgaccgagagactgcccatggccagcagcatggagcacggcaaggacctgcccagcgtgcagctgctgatgaagaagaaccagaccctgcagaaggagatccagggccacgagcccagaatcgccgacctgagagagagacagagagccctgggcgccgccgccgccggccccgagctggccgagctgcaggagatgtggaagagactgggccacgagctggagctgagaggcaagagactggaggacgccctgagagcccagcagttctacagagacgccgccgaggccgaggcctggatgggcgagcaggagctgcacatgatgggccaggagaaggccaaggacgagctgagcgcccaggccgaggtgaagaagcaccaggtgctggagcaggccctggccgactacgcccagaccatccaccagctggccgccagcagccaggacatgatcgaccacgagcaccccgagagcaccagaatcagcatcagacaggcccaggtggacaagctgtacgccggcctgaaggagctggccggcgagagaagagagagactgcaggagcacctgagactgtgccagctgagaagagagctggacgacctggagcagtggatccaggagagagaggtggtggccgccagccacgagctgggccaggactacgagcacgtgaccatgctgagagacaagttcagagagttcagcagagacaccagcaccatcggccaggagagagtggacagcgccaacgccctggccaacggcctgatcgccggcggccacgccgccagagccaccgtggccgagtggaaggacagcctgaacgaggcctgggccgacctgctggagctgctggacaccagaggccaggtgctggccgccgcctacgagctgcagagattcctgcacggcgccagacaggccctggccagagtgcagcacaagcagcagcagctgcccgacggcaccggcagagacctgaacgccgccgaggccctgcagagaagacactgcgcctacgagcacgacatccaggccctgagcccccaggtgcagcaggtgcaggacgacggccacagactgcagaaggcctacgccggcgacaaggccgaggagatcggcagacacatgcaggccgtggccgaggcctgggcccagctgcagggcagcagcgccgccagaagacagctgctgctggacaccaccgacaagttcagattcttcaaggccgtgagagagctgatgctgtggatggacgaggtgaacctgcagatggacgcccaggagagacccagagacgtgagcagcgccgacctggtgatcaagaaccagcagggcatcaaggccgagatcgaggccagagccgacagattcagcagctgcatcgacatgggcaaggagctgctggccagaagccactacgccgccgaggagatcagcgagaagctgagccagctgcaggccagaagacaggagaccgccgagaagtggcaggagaagatggactggctgcagctggtgctggaggtgctggtgttcggcagagacgccggcatggccgaggcctggctgtgcagccaggagcccctggtgagaagcgccgagctgggctgcaccgtggacgaggtggagagcctgatcaagagacacgaggccttccagaagagcgccgtggcctgggaggagagattctgcgccctggagaagctgaccgccctggaggagagagagaaggagagaaagagaaagagagaggaggaggagagaagaaagcagccccccgcccccgagcccaccgccagcgtgccccccggcgacctggtgggcggccagaccgccagcgacaccacctgggacggcacccagcccagacccccccccagcacccaggcccccagcgtgaacggcgtgtgcaccgacggcgagcccagccagcccctgctgggccagcagagactggagcacagcagcttccccgagggccccggccccggcagcggcgacgaggccaacggccccagaggcgagagacagaccagaaccagaggccccgcccccagcgccatgccccagagcagaagcaccgagagcgcccacgccgccaccctgccccccagaggccccgagcccagcgcccaggagcagatggagggcatgctgtgcagaaagcaggagatggaggccttcggcaagaaggccgccaacagaagctggcagaacgtgtactgcgtgctgagaagaggcagcctgggcttctacaaggacgccaaggccgccagcgccggcgtgccctaccacggcgaggtgcccgtgagcctggccagagcccagggcagcgtggccttcgactacagaaagagaaagcacgtgttcaagctgggcctgcaggacggcaaggagtacctgttccaggccaaggacgaggccgagatgagcagctggctgagagtggtgaacgccgccatcgccaccgccagcagcgccagcggcgagcccgaggagcccgtggtgcccagcaccaccagaggcatgaccagagccatgaccatgccccccgtgagccccgtgggcgccgagggccccgtggtgctgagaagcaaggacggcagagagagagagagagagaagagattcagcttcttcaagaagaacaagtag

SEQ ID NO: 100509 - DNA, 2805 bp, synthetic construct
  misc_feature 1..2805: note = Description of Artificial Sequence: Synthetic coding sequence
  source 1..2805: mol_type = other DNA
atgagcagcaccctgagccccaccgacttcgacagcctggagatccagggccagtacagcgacatcaacaacagatgggacctgcccgacagcgactgggacaacgacagcagcagcgccagactgttcgagagaagcagaatcaaggccctggccgacgagagagaggccgtgcagaagaagaccttcaccaagtgggtgaacagccacctggccagagtgacctgcagagtgggcgacctgtacagcgacctgagagacggcagaaacctgctgagactgctggaggtgctgagcggcgagatcctgcccaagcccaccaagggcagaatgagaatccactgcctggagaacgtggacaaggccctgcagttcctgaaggagcagaaggtgcacctggagaacatgggcagccacgacatcgtggacggcaaccacagactgaccctgggcctggtgtggaccatcatcctgagattccagatccaggacatcagcgtggagaccgaggacaacaaggagaagaagagcgccaaggacgccctgctgctgtggtgccagatgaagaccgccggctaccccaacgtgaacgtgcacaacttcaccaccagctggagagacggcctggccttcaacgccatcgtgcacaagcacagacccgacctgctggacttcgagagcctgaagaagtgcaacgcccactacaacctgcagaacgccttcaacctggccgagaaggagctgggcctgaccaagctgctggaccccgaggacgtgaacgtggaccagcccgacgagaagagcatcatcacctacgtggccacctactaccactacttcagcaagatgaaggccctggccgtggagggcaagagaatcggcaaggtgctggaccacgccatggaggccgagagactggtggagaagtacgagagcctggccagcgagctgctgcagtggatcgagcagaccatcgtgaccctgaacgacagacagctggccaacagcctgagcggcgtgcagaaccagctgcagagcttcaacagctacagaaccgtggagaagccccccaagttcaccgagaagggcaacctggaggtgctgctgttcaccatccagagcaagctgagagccaacaaccagaaggtgtacacccccagagagggcagactgatcagcgacatcaacaaggcctgggagagactggagaaggccgagcacgagagagagctggccctgagaaccgagctgatcagacaggagaagctggagcagctggccgccagattcgacagaaaggccgccatgagagagacctggctgagcgagaaccagagactggtgagccaggacaacttcggcctggagctggccgccgtggaggccgccgtgagaaagcacgaggccatcgagaccgacatcgtggcctacagcggcagagtgcaggccgtggacgccgtggccgccgagctggccgccgagagataccacgacatcaagagaatcgccgccagacagcacaacgtggccagactgtgggacttcctgagacagatggtggccgccagaagagagagactgctgctgaacctggagctgcagaaggtgttccaggacctgctgtacctgatggactggatggaggagatgaagggcagactgcagagccaggacctgggcagacacctggccggcgtggaggacctgctgcagctgcacgagctggtggaggccgacatcgccgtgcaggccgagagagtgagagccgtgagcgccagcgccctgagattctgcaaccccggcaaggagtacagaccctgcgacccccagctggtgagcgagagagtggccaagctgaccgccctggaggagagagagaaggagagaaagagaaagagagaggaggaggagagaagaaagcagccccccgcccccgagcccaccgccagcgtgccccccggcgacctggtgggcggccagaccgccagcgacaccacctgggacggcacccagcccagacccccccccagcacccaggcccccagcgtgaacggcgtgtgcaccgacggcgagcccagccagcccctgctgggccagcagagactggagcacagcagcttccccgagggccccggccccggcagcggcgacgaggccaacggccccagaggcgagagacagaccagaaccagaggccccgcccccagcgccatgccccagagcagaagcaccgagagcgcccacgccgccaccctgccccccagaggccccgagcccagcgcccaggagcagatggagggcatgctgtgcagaaagcaggagatggaggccttcggcaagaaggccgccaacagaagctggcagaacgtgtactgcgtgctgagaagaggcagcctgggcttctacaaggacgccaaggccgccagcgccggcgtgccctaccacggcgaggtgcccgtgagcctggccagagcccagggcagcgtggccttcgactacagaaagagaaagcacgtgttcaagctgggcctgcaggacggcaaggagtacctgttccaggccaaggacgaggccgagatgagcagctggctgagagtggtgaacgccgccatcgccaccgccagcagcgccagcggcgagcccgaggagcccgtggtgcccagcaccaccagaggcatgaccagagccatgaccatgccccccgtgagccccgtgggcgccgagggccccgtggtgctgagaagcaaggacggcagagagagagagagagagaagagattcagcttcttcaagaagaacaagtag

SEQ ID NO: 100510 - DNA, 354 bp, synthetic construct
  misc_feature 1..354: note = Description of Artificial Sequence: Synthetic coding sequence
  source 1..354: mol_type = other DNA
atgagcagcaccctgagccccaccgacttcgacagcctggagatccagggccagtacagcgacatcaacaacagatgggacctgcccgacagcgactgggacaacgacagcagcagcgccagactgttcgagagaagcagaatcaaggccctggccgacgagagagaggccgtgcagaagaagaccttcaccaagtgggtgaacagccacctggccagagtgacctgcagagtgggcgacctgtacagcgacctgagagacggcagaaacctgctgagactgctggaggtgctgagcggcgagatcctgcccaagcccaccaagggcagaatgagaatccactgcctggagtag

SEQ ID NO: 100511 - DNA, 7098 bp, synthetic construct
  misc_feature 1..7098: note = Description of Artificial Sequence: Synthetic coding sequence
  source 1..7098: mol_type = other DNA
atgagcagcaccctgagccccaccgacttcgacagcctggagatccagggccagtacagcgacatcaacaacagatgggacctgcccgacagcgactgggacaacgacagcagcagcgccagactgttcgagagaagcagaatcaaggccctggccgacgagagagaggccgtgcagaagaagaccttcaccaagtgggtgaacagccacctggccagagtgacctgcagagtgggcgacctgtacagcgacctgagagacggcagaaacctgctgagactgctggaggtgctgagcggcgagatcctgcccaagcccaccaagggcagaatgagaatccactgcctggagaacgtggacaaggccctgcagttcctgaaggagcagaaggtgcacctggagaacatgggcagccacgacatcgtggacggcaaccacagactgaccctgggcctggtgtggaccatcatcctgagattccagatccaggacatcagcgtggagaccgaggacaacaaggagaagaagagcgccaaggacgccctgctgctgtggtgccagatgaagaccgccggctaccccaacgtgaacgtgcacaacttcaccaccagctggagagacggcctggccttcaacgccatcgtgcacaagcacagacccgacctgctggacttcgagagcctgaagaagtgcaacgcccactacaacctgcagaacgccttcaacctggccgagaaggagctgggcctgaccaagctgctggaccccgaggacgtgaacgtggaccagcccgacgagaagagcatcatcacctacgtggccacctactaccactacttcagcaagatgaaggccctggccgtggagggcaagagaatcggcaaggtgctggaccacgccatggaggccgagagactggtggagaagtacgagagcctggccagcgagctgctgcagtggatcgagcagaccatcgtgaccctgaacgacagacagctggccaacagcctgagcggcgtgcagaaccagctgcagagcttcaacagctacagaaccgtggagaagccccccaagttcaccgagaagggcaacctggaggtgctgctgttcaccatccagagcaagctgagagccaacaaccagaaggtgtacacccccagagagggcagactgatcagcgacatcaacaaggcctgggagagactggagaaggccgagcacgagagagagctggccctgagaaccgagctgatcagacaggagaagctggagcagctggccgccagattcgacagaaaggccgccatgagagagacctggctgagcgagaaccagagactggtgagccaggacaacttcggcctggagctggccgccgtggaggccgccgtgagaaagcacgaggccatcgagaccgacatcgtggcctacagcggcagagtgcaggccgtggacgccgtggccgccgagctggccgccgagagataccacgacatcaagagaatcgccgccagacagcacaacgtggccagactgtgggacttcctgagacagatggtggccgccagaagagagagactgctgctgaacctggagctgcagaaggtgttccaggacctgctgtacctgatggactggatggaggagatgaagggcagactgcagagccaggacctgggcagacacctggccggcgtggaggacctgctgcagctgcacgagctggtggaggccgacatcgccgtgcaggccgagagagtgagagccgtgagcgccagcgccctgagattctgcaaccccggcaaggagtacagaccctgcgacccccagctggtgagcgagagagtggccaagctggagcagagctacgaggccctgtgcgagctggccgccgccagaagagccagactggaggagagcagaagactgtggagattcctgtgggaggtgggcgaggccgaggcctgggtgagagagcagcagcacctgctggccagcgccgacaccggcagagacctgaccggcgccctgagactgctgaacaagcacaccgccctgagaggcgagatgagcggcagactgggccccctgaagctgaccctggagcagggccagcagctggtggccgagggccaccccggcgccagccaggccagcgccagagccgccgagctgcaggcccagtgggagagactggaggccctggccgaggagagagcccagagactggcccaggccgccagcctgtaccagttccaggccgacgccaacgacatggaggcctggctggtggacgccctgagactggtgagcagccccgagctgggccacgacgagttcagcacccaggccctggccagacagcacagagccctggaggaggagatcagaagccacagacccaccctggacgccctgagagagcaggccgccgccctgccccccaccctgagcagaacccccgaggtgcagagcagagtgcccaccctggagagacactacgaggagctgcaggccagagccggcgagagagccagagccctggaggccgccctggccctgtacaccatgctgagcgaggccggcgcctgcggcctgtgggtggaggagaaggagcagtggctgaacggcctggccctgcccgagagactggaggacctggaggtggtgcagcagagattcgagaccctggagcccgagatgaacaccctggccgcccagatcaccgccgtgaacgacatcgccgagcagctgctgaaggccaacccccccggcaaggacagaatcgtgaacacccaggagcagctgaaccacagatggcagcagttcagaagactggccgacggcaagaaggccgccctgaccagcgccctgagcatccagaactaccacctggagtgcaccgagacccaggcctggatgagagagaagaccaaggtgatcgagagcacccagggcctgggcaacgacctggccggcgtgctggccctgcagagaaagctggccggcaccgagagagacctggaggccatcgccgccagagtgggcgagctgaccagagaggccaacgccctggccgccggccaccccgcccaggccgtggccatcaacgccagactgagagaggtgcagaccggctgggaggacctgagagccaccatgagaagaagagaggagagcctgggcgaggccagaagactgcaggacttcctgagaagcctggacgacttccaggcctggctgggcagaacccagaccgccgtggccagcgaggagggccccgccaccctgcccgaggccgaggccctgctggcccagcacgccgccctgagaggcgaggtggagagagcccagagcgagtacagcagactgagagccctgggcgaggaggtgaccagagaccaggccgacccccagtgcctgttcctgagacagagactggaggccctgggcaccggctgggaggagctgggcagaatgtgggagagcagacagggcagactggcccaggcccacggcttccagggcttcctgagagacgccagacaggccgagggcgtgctgagcagccaggagtacgtgctgagccacaccgagatgcccggcaccctgcaggccgccgacgccgccatcaagaagctggaggacttcatgagcaccatggacgccaacggcgagagaatccacggcctgctggaggccggcagacagctggtgagcgagggcaacatccacgccgacaagatcagagagaaggccgacagcatcgagagaagacacaagaagaaccaggacgccgcccagcagttcctgggcagactgagagacaacagagagcagcagcacttcctgcaggactgccacgagctgaagctgtggatcgacgagaagatgctgaccgcccaggacgtgagctacgacgaggccagaaacctgcacaccaagtggcagaagcaccaggccttcatggccgagctggccgccaacaaggactggctggacaaggtggacaaggagggcagagagctgaccctggagaagcccgagctgaaggccctggtgagcgagaagctgagagacctgcacagaagatgggacgagctggagaccaccacccaggccaaggccagaagcctgttcgacgccaacagagccgagctgttcgcccagagctgctgcgccctggagagctggctggagagcctgcaggcccagctgcacagcgacgactacggcaaggacctgaccagcgtgaacatcctgctgaagaagcagcagatgctggagtgggagatggccgtgagagagaaggaggtggaggccatccaggcccaggccaaggccctggcccaggaggaccagggcgccggcgaggtggagagaaccagcagagccgtggaggagaagttcagagccctgtgccagcccatgagagagagatgcagaagactgcaggccagcagagagcagcaccagttccacagagacgtggaggacgagatcctgtgggtgaccgagagactgcccatggccagcagcatggagcacggcaaggacctgcccagcgtgcagctgctgatgaagaagaaccagaccctgcagaaggagatccagggccacgagcccagaatcgccgacctgagagagagacagagagccctgggcgccgccgccgccggccccgagctggccgagctgcaggagatgtggaagagactgggccacgagctggagctgagaggcaagagactggaggacgccctgagagcccagcagttctacagagacgccgccgaggccgaggcctggatgggcgagcaggagctgcacatgatgggccaggagaaggccaaggacgagctgagcgcccaggccgaggtgaagaagcaccaggtgctggagcaggccctggccgactacgcccagaccatccaccagctggccgccagcagccaggacatgatcgaccacgagcaccccgagagcaccagaatcagcatcagacaggcccaggtggacaagctgtacgccggcctgaaggagctggccggcgagagaagagagagactgcaggagcacctgagactgtgccagctgagaagagagctggacgacctggagcagtggatccaggagagagaggtggtggccgccagccacgagctgggccaggactacgagcacgtgaccatgctgagagacaagttcagagagttcagcagagacaccagcaccatcggccaggagagagtggacagcgccaacgccctggccaacggcctgatcgccggcggccacgccgccagagccaccgtggccgagtggaaggacagcctgaacgaggcctgggccgacctgctggagctgctggacaccagaggccaggtgctggccgccgcctacgagctgcagagattcctgcacggcgccagacaggccctggccagagtgcagcacaagcagcagcagctgcccgacggcaccggcagagacctgaacgccgccgaggccctgcagagaagacactgcgcctacgagcacgacatccaggccctgagcccccaggtgcagcaggtgcaggacgacggccacagactgcagaaggcctacgccggcgacaaggccgaggagatcggcagacacatgcaggccgtggccgaggcctgggcccagctgcagggcagcagcgccgccagaagacagctgctgctggacaccaccgacaagttcagattcttcaaggccgtgagagagctgatgctgtggatggacgaggtgaacctgcagatggacgcccaggagagacccagagacgtgagcagcgccgacctggtgatcaagaaccagcagggcatcaaggccgagatcgaggccagagccgacagattcagcagctgcatcgacatgggcaaggagctgctggccagaagccactacgccgccgaggagatcagcgagaagctgagccagctgcaggccagaagacaggagaccgccgagaagtggcaggagaagatggactggctgcagctggtgctggaggtgctggtgttcggcagagacgccggcatggccgaggcctggctgtgcagccaggagcccctggtgagaagcgccgagctgggctgcaccgtggacgaggtggagagcctgatcaagagacacgaggccttccagaagagcgccgtggcctgggaggagagattctgcgccctggagaagctgaccgccctggaggagagagagaaggagagaaagagaaagagagaggaggaggagagaagaaagcagccccccgcccccgagcccaccgccagcgtgccccccggcgacctggtgggcggccagaccgccagcgacaccacctgggacggcacccagcccagacccccccccagcacccaggcccccagcgtgaacggcgtgtgcaccgacggcgagcccagccagcccctgctgggccagcagagactggagcacagcagcttccccgagggccccggccccggcagcggcgacgaggccaacggccccagaggcgagagacagaccagaaccagaggccccgcccccagcgccatgccccagagcagaagcaccgagagcgcccacgccgccaccctgccccccagaggccccgagcccagcgcccaggagcagatggagggcatgctgtgcagaaagcaggagatggaggccttcggcaagaaggccgccaacagaagctggcagaacgtgtactgcgtgctgagaagaggcagcctgggcttctacaaggacgccaaggccgccagcgccggcgtgccctaccacggcgaggtgcccgtgagcctggccagagcccagggcagcgtggccttcgactacagaaagagaaagcacgtgttcaagctgggcctgcaggacggcaaggagtacctgttccaggccaaggacgaggtgagctgccccagctgcagcagcctgagcgtgcccttccagaagctgcccgccgccgacagccccagcttccccgtgctgcccctgttccccggcctggtgctgtgcggcaagaccggctgcgtgagaagaccccaccaggccgccctgcccgtgtag

SEQ ID NO: 100512 - DNA, 7173 bp, synthetic construct; identical to SEQ ID NO: 100508
  misc_feature 1..7173: note = Description of Artificial Sequence: Synthetic coding sequence
  source 1..7173: mol_type = other DNA

SEQ ID NO: 100513 - DNA, 6465 bp, synthetic construct
  misc_feature 1..6465: note = Description of Artificial Sequence: Synthetic coding sequence
  source 1..6465: mol_type = other DNA
atggcccaggtgcccggcgaggtggacaacatggagggcctgcccgcccccaacaacaaccccgccgccagatgggagagccccgacagaggctgggagagagagcagcccgccgccagcaccgccgccgccagcctgttcgagtgcagcagaatcaaggccctggccgacgagagagaggccgtgcagaagaagaccttcaccaagtgggtgaacagccacctggccagagtgggctgccacatcggcgacctgtacgtggacctgagagacggcttcgtgctgaccagactgctggaggtgctgagcggcgagcagctgcccagacccaccagaggcagaatgagaatccacagcctggagaacgtggacaaggccctgcagttcctgaaggagcagagagtgcacctggagaacgtgggcagccacgacatcgtggacggcaaccacagactgaccctgggcctggtgtggaccatcatcctgagattccagatccaggtgatcaagatcgagaccgaggacaacagagagaccagaagcgccaaggacgccctgctgctgtggtgccagatgaagaccgccggctaccccgaggtgaacatccagaacttcaccaccagctggagagacggcctggccttcaacgccctgatccacagacacagacccgacctggtggacttcagcaagctgaccaagagcaacgccaactacaacctgcagagagccttcagaaccgccgagcagcacctgggcctggccagactgctggaccccgaggacgtgaacatggaggcccccgacgagaagagcatcatcacctacgtggtgagcttctaccactacttcagcaagatgaaggccctggccgtggagggcaagagaatcggcaaggtgctggaccaggtgctggaggtgggcaagatcatcgagagatacgaggagctggccgccgagctgctggcctggatccacagaaccgtgggcctgatcagcaaccagaagttcgccaacagcctgagcggcgtgcagcagcagctgcaggccttcaccgcctactgcaccctggagaagcccgtgaagttccaggagaagggcaacctggaggtgctgctgttcagcatccagagcaagctgagagcctgcaacagaagactgttcgtgcccagagagggctgcggcatctgggacatcgacaaggcctggggcgagctggagaaggccgagcacgagagagaggccgccctgagagccgagctgatcagacaggagaagctggagctgctggcccagagattcgaccacaaggtggccatgagagagagctggctgaacgagaaccagagactggtgagccaggacaacttcggctacgagctgcccgccgtggaggccgccatgaagaagcacgaggccatcgaggccgacatcgccgcctacgaggagagagtgcagggcgtggccgagctggcccaggccctggccgccgagggctactacgacatcagaagagtggccgcccagagagacagcgtgctgagacagtgggccctgctgaccggcctggtgggcgccagaagaaccagactggagcagaacctggccctgcagaaggtgttccaggagatggtgtacatggtggactggatggaggagatgcaggcccagctgctgagcagagagtgcggccagcacctggtggaggccgacgacctgctgcagaagcacggcctgctggagggcgacatcgccgcccagagcgagagagtggaggccctgaacgccgccgccctgagattcagccagctgcagggctaccagccctgcgacccccaggtgatctgcaacagagtgaaccacgtgcacggctgcctggccgagctgcaggagcaggccgccagaagaagagccgagctggaggccagcagaagcctgtgggccctgctgcaggagctggaggaggccgagagctgggccagagacaaggagagactgctggaggccgccggcggcggcggcgccgccggcgccgccggcgccgccggcaccgccggcggcgcccacgacctgagcagcaccgccagactgctggcccagcacaagatcctgcagggcgagctgggcggcagaagagccctgctgcagcaggccctgagatgcggcgaggagctggtggccgccggcggcgccgtgggccccggcgccgacaccgtgcacctggtgggcctggccgagagagccgccagcgccagaagaagatggcagagactggaggaggccgccgccagaagagagagaagactgcaggaggccagagccctgcaccagttcggcgccgacctggacggcctgctggactggctgagagacgcctacagactggccgccgccggcgacttcggccacgacgaggccagcagcagaagactggccagacagcacagagccctgaccggcgaggtggaggcccacagaggccccgtgagcggcctgagaagacagctggccaccctgggcggcgccagcggcgccggccccctggtggtggccctgcaggtgagagtggtggaggccgagcagctgttcgccgaggtgaccgaggtggccgccctgagaagacagtggctgagagacgccctggccgtgtacagaatgttcggcgaggtgcacgcctgcgagctgtggatcggcgagaaggagcagtggctgctgagcatgagagtgcccgacagcctggacgacgtggaggtggtgcagcacagattcgagagcctggaccaggagatgaacagcctgatgggcagagtgctggacgtgaaccacaccgtgcaggagctggtggagggcggccaccccagcagcgacgaggtgagaagctgccaggaccacctgaacagcagatggaacagaatcgtggagctggtggagcagagaaaggaggagatgagcgccgtgctgctggtggagaaccacgtgctggaggtggccgaggtgagagcccaggtgagagagaagagaagagccgtggagagcgcccccagagccggcggcgccctgcagtggagactgagcggcctggaggccgccctgcaggccctggagcccagacaggccgccctgctggaggaggccgccctgctggccgagagattccccgcccaggccgccagactgcaccagggcgccgaggagctgggcgccgagtggggcgccctggccagcgccgcccaggcctgcggcgaggccgtggccgccgccggcagactgcagagattcctgcacgacctggacgccttcctggactggctggtgagagcccaggaggccgccggcggcagcgagggccccctgcccaacagcctggaggaggccgacgccctgctggccagacacgccgccctgaaggaggaggtggaccagagagaggaggactacgccagaatcgtggccgccagcgaggccctgctggccgccgacggcgccgagctgggccccggcctggccctggacgagtggctgccccacctggagctgggctggcacaagctgctgggcctgtgggaggccagaagagaggccctggtgcaggcccacatctaccagctgttcctgagagacctgagacaggccctggtggtgctgagaaaccaggagatggccctgagcggcgccgagctgcccggcaccgtggagagcgtggaggaggccctgaagcagcacagagacttcctgaccaccatggagctgagccagcagaagatgcaggtggccgtgcaggccgccgagggcctgctgagacagggcaacatctacggcgagcaggcccaggaggccgtgaccagactgctggagaagaaccaggagaaccagctgagagcccagcagtggatgcagaagctgcacgaccagctggagctgcagcacttcctgagagactgccacgagctggacggctggatccacgagaagatgctgatggccagagacggcaccagagaggacaaccacaagctgcacaagagatggctgagacaccaggccttcatggccgagctggcccagaacaaggagtggctggagaagatcgagagagagggccagcagctgatgcaggagaagcccgagctggccgccagcgtgagaaagaagctgggcgagatcagacagtgctgggccgagctggagagcaccacccaggccaaggccagacagctgttcgaggccagcaaggccgaccagctggtgcagagcttcgccgagctggacaagaagctgctgcacatggagagccagctgcaggacgtggaccccggcggcgacctggccaccgtgaacagccagctgaagaagctgcagagcatggagagccaggtggaggagtggtacagagaggtgggcgagctgcaggcccagaccgccgccctgcccctggagcccgccagcaaggagctggtgggcgagagacagaacgccgtgggcgagagactggtgagactgctggagcccctgcaggagagaagaagactgctgctggccagcaaggagctgcaccaggtggcccacgacctggacgacgagctggcctgggtgcaggagagactgcccctggccatgcagaccgagagaggcaacggcctgcaggccgtgcagcagcacatcaagaagaaccagggcctgagaagagagatccaggcccacggccccagactggaggaggtgctggagagagccggcgccctggccagcctgagaagccccgaggccgaggccgtgagaagaggcctggagcagctgcagagcgcctgggccggcctgagagaggccgccgagagaagacagcaggtgctggacgccgccttccaggtggagcagtactacttcgacgtggccgaggtggaggcctggctgggcgagcaggagctgctgatgatgagcgaggacaagggcaaggacgagcagagcaccctgcagctgctgaagaagcacctgcagctggagcagggcgtggagaactacgaggagagcatcgcccagctgagcagacagtgcagagccctgctggagatgggccaccccgacagcgagcagatcagcagaagacagagccaggtggacagactgtacgtggccctgaaggagctgggcgaggagagaagagtggccctggagcagcagtactggctgtaccagctgagcagacaggtgagcgagctggagcactggatcgccgagaaggaggtggtggccggcagccccgagctgggccaggacttcgagcacgtgagcgtgctgcaggagaagttcagcgagttcgccagcgagaccggcatggccggcagagagagactggccgccgtgaaccagatggtggacgagctgatcgagtgcggccacaccgccgccgccaccatggccgagtggaaggacggcctgaacgaggcctgggccgagctgctggagctgatgggcaccagagcccagctgctggccgccagcagagagctgcacaagttcttcagcgacgccagagagctgcagggccagatcgaggagaagagaagaagactgcccagactgaccaccccccccgagcccagacccagcgccagcagcatgcagagaaccctgagagccttcgagcacgacctgcagctgctggtgagccaggtgagacagctgcaggagggcgccgcccagctgagaaccgtgtacgccggcgagcacgccgaggccatcgccagcagagagcaggaggtgctgcagggctggaaggagctgctgagcgcctgcgaggacgccagactgcacgtgagcagcaccgccgacgccctgagattccacagccaggtgagagacctgctgagctggatggacggcatcgccagccagatcggcgccgccgacaagcccagagacgtgagcagcgtggaggtgctgatgaactaccaccagggcctgaagaccgagctggaggccagagtgcccgagctgaccacctgccaggagctgggcagaagcctgctgctgaacaagagcgccatggccgacgagatccaggcccagctggacaagctgggcaccagaaaggaggaggtgagcgagaagtgggacagacactgggagtggctgcagcagatgctggaggtgcaccagttcgcccaggaggccgtggtggccgacgcctggctgaccgcccaggagcccctgctgcagagcagagagctgggcagcagcgtggacgaggtggagcagctgatcagaagacacgaggccttcagaaaggccgccgccgcctgggaggagagattcagcagcctgagaagactgaccacccccagaagagaggaccacctgaaccccggcgtgcaggaccagccctggcagcacaccgagaagcccagcctgcccaagcccaaggccaacaaggagaagaccgccagaagagacggcacctgcctgtag

SEQ ID NO: 100514 - DNA, 3930 bp, synthetic construct
  misc_feature 1..3930: note = Description of Artificial Sequence: Synthetic coding sequence
  source 1..3930: mol_type = other DNA
atggcccaggtgcccggcgaggtggacaacatggagggcctgcccgcccccaacaacaaccccgccgccagatgggagagccccgacagaggctgggagagagagcagcccgccgccagcaccgccgccgccagcctgttcgagtgcagcagaatcaaggccctggccgacgagagagaggccgtgcagaagaagaccttcaccaagtgggtgaacagccacctggccagagtgggctgccacatcggcgacctgtacgtggacctgagagacggcttcgtgctgaccagactgctggaggtgctgagcggcgagcagctgcccagacccaccagaggcagaatgagaatccacagcctggagaacgtggacaaggccctgcagttcctgaaggagcagagagtgcacctggagaacgtgggcagccacgacatcgtggacggcaaccacagactgaccctgggcctggtgtggaccatcatcctgagattccagatccaggtgatcaagatcgagaccgaggacaacagagagaccagaagcgccaaggacgccctgctgctgtggtgccagatgaagaccgccggctaccccgaggtgaacatccagaacttcaccaccagctggagagacggcctggccttcaacgccctgatccacagacacagacccgacctggtggacttcagcaagctgaccaagagcaacgccaactacaacctgcagagagccttcagaaccgccgagcagcacctgggcctggccagactgctggaccccgaggacgtgaacatggaggcccccgacgagaagagcatcatcacctacgtggtgagcttctaccactacttcagcaagatgaaggccctggccgtggagggcaagagaatcggcaaggtgctggaccaggtgctggaggtgggcaagatcatcgagagatacgaggagctggccgccgagctgctggcctggatccacagaaccgtgggcctgatcagcaaccagaagttcgccaacagcctgagcggcgtgcagcagcagctgcaggccttcaccgcctactgcaccctggagaagcccgtgaagttccaggagaagggcaacctggaggtgctgctgttcagcatccagagcaagctgagagcctgcaacagaagactgttcgtgcccagagagggctgcggcatctgggacatcgacaaggcctggggcgagctggagaaggccgagcacgagagagaggccgccctgagagccgagctgatcagacaggagaagctggagctgctggcccagagattcgaccacaaggtggccatgagagagagctggctgaacgagaaccagagactggtgagccaggacaacttcggctacgagctgcccgccgtggaggccgccatgaagaagcacgaggccatcgaggccgacatcgccgcctacgaggagagagtgcagggcgtggccgagctggcccaggccctggccgccgagggctactacgacatcagaagagtggccgcccagagagacagcgtgctgagacagtgggccctgctgaccggcctggtgggcgccagaagaaccagactggagcagaacctggccctgcagaaggtgttccaggagatggtgtacatggtggactggatggaggagatgcaggcccagctgctgagcagagagtgcggccagcacctggtggaggccgacgacctgctgcagaagcacggcctgctggagggcgacatcgccgcccagagcgagagagtggaggccctgaacgccgccgccctgagattcagccagctgcagggctaccagccctgcgacccccaggtgatctgcaacagagtgaaccacgtgcacggctgcctggccgagctgcaggagcaggccgccagaagaagagccgagctggaggccagcagaagcctgtgggccctgctgcaggagctggaggaggccgagagctgggccagagacaaggagagactgctggaggccgccggcggcggcggcgccgccggcgccgccggcgccgccggcaccgccggcggcgcccacgacctgagcagcaccgccagactgctggcccagcacaagatcctgcagggcgagctgggcggcagaagagccctgctgcagcaggccctgagatgcggcgaggagctggtggccgccggcggcgccgtgggccccggcgccgacaccgtgcacctggtgggcctggccgagagagccgccagcgccagaagaagatggcagagactggaggaggccgccgccagaagagagagaagactgcaggaggccagagccctgcaccagttcggcgccgacctggacggcctgctggactggctgagagacgcctacagactggccgccgccggcgacttcggccacgacgaggccagcagcagaagactggccagacagcacagagccctgaccggcgaggtggaggcccacagaggccccgtgagcggcctgagaagacagctggccaccctgggcggcgccagcggcgccggccccctggtggtggccctgcaggtgagagtggtggaggccgagcagctgttcgccgaggtgaccgaggtggccgccctgagaagacagtggctgagagacgccctggccgtgtacagaatgttcggcgaggtgcacgcctgcgagctgtggatcggcgagaaggagcagtggctgctgagcatgagagtgcccgacagcctggacgacgtggaggtggtgcagcacagattcgagagcctggaccaggagatgaacagcctgatgggcagagtgctggacgtgaaccacaccgtgcaggagctggtggagggcggccaccccagcagcgacgaggtgagaagctgccaggaccacctgaacagcagatggaacagaatcgtggagctggtggagcagagaaaggaggagatgagcgccgtgctgctggtggagaaccacgtgctggaggtggccgaggtgagagcccaggtgagagagaagagaagagccgtggagagcgcccccagagccggcggcgccctgcagtggagactgagcggcctggaggccgccctgcaggccctggagcccagacaggccgccctgctggaggaggccgccctgctggccgagagattccccgcccaggccgccagactgcaccagggcgccgaggagctgggcgccgagtggggcgccctggccagcgccgcccaggcctgcggcgaggccgtggccgccgccggcagactgcagagattcctgcacgacctggacgccttcctggactggctggtgagagcccaggaggccgccggcggcagcgagggccccctgcccaacagcctggaggaggccgacgccctgctggccagacacgccgccctgaaggaggaggtggaccagagagaggaggactacgccagaatcgtggccgccagcgaggccctgctggccgccgacggcgccgagctgggccccggcctggccctggacgagtggctgccccacctggagctgggctggcacaagctgctgggcctgtgggaggccagaagagaggccctggtgcaggcccacatctaccagctgttcctgagagacctgagacaggccctggtggtgctgagaaaccaggagatggccctgagcggcgccgagctgcccggcaccgtggagagcgtggaggaggccctgaagcagcacagagacttcctgaccaccatggagctgagccagcagaagatgcaggtggccgtgcaggccgccgagggcctgctgagacagggcaacatctacggcgagcaggcccaggaggccgtgaccagactgctggagaagtgcctgatcatccaccccgccctgctgcaccccccctgggagccccccgacctgcccagaagcagcagctag

SEQ ID NO: 100515 - DNA, 7695 bp, synthetic construct
  misc_feature 1..7695: note = Description of Artificial Sequence: Synthetic coding sequence
  source 1..7695: mol_type = other DNA
atggcccaggtgcccggcgaggtggacaacatggagggcctgcccgcccccaacaacaaccccgccgccagatgggagagccccgacagaggctgggagagagagcagcccgccgccagcaccgccgccgccagcctgttcgagtgcagcagaatcaaggccctggccgacgagagagaggccgtgcagaagaagaccttcaccaagtgggtgaacagccacctggccagagtgggctgccacatcggcgacctgtacgtggacctgagagacggcttcgtgctgaccagactgctggaggtgctgagcggcgagcagctgcccagacccaccagaggcagaatgagaatccacagcctggagaacgtggacaaggccctgcagttcctgaaggagcagagagtgcacctggagaacgtgggcagccacgacatcgtggacggcaaccacagactgaccctgggcctggtgtggaccatcatcctgagattccagatccaggtgatcaagatcgagaccgaggacaacagagagaccagaagcgccaaggacgccctgctgctgtggtgccagatgaagaccgccggctaccccgaggtgaacatccagaacttcaccaccagctggagagacggcctggccttcaacgccctgatccacagacacagacccgacctggtggacttcagcaagctgaccaagagcaacgccaactacaacctgcagagagccttcagaaccgccgagcagcacctgggcctggccagactgctggaccccgaggacgtgaacatggaggcccccgacgagaagagcatcatcacctacgtggtgagcttctaccactacttcagcaagatgaaggccctggccgtggagggcaagagaatcggcaaggtgctggaccaggtgctggaggtgggcaagatcatcgagagatacgaggagctggccgccgagctgctggcctggatccacagaaccgtgggcctgatcagcaaccagaagttcgccaacagcctgagcggcgtgcagcagcagctgcaggccttcaccgcctactgcaccctggagaagcccgtgaagttccaggagaagggcaacctggaggtgctgctgttcagcatccagagcaagctgagagcctgcaacagaagactgttcgtgcccagagagggctgcggcatctgggacatcgacaaggcctggggcgagctggagaaggccgagcacgagagagaggccgccctgagagccgagctgatcagacaggagaagctggagctgctggcccagagattcgaccacaaggtggccatgagagagagctggctgaacgagaaccagagactggtgagccaggacaacttcggctacgagctgcccgccgtggaggccgccatgaagaagcacgaggccatcgaggccgacatcgccgcctacgaggagagagtgcagggcgtggccgagctggcccaggccctggccgccgagggctactacgacatcagaagagtggccgcccagagagacagcgtgctgagacagtgggccctgctgaccggcctggtgggcgccagaagaaccagactggagcagaacctggccctgcagaaggtgttccaggagatggtgtacatggtggactggatggaggagatgcaggcccagctgctgagcagagagtgcggccagcacctggtggaggccgacgacctgctgcagaagcacggcctgctggagggcgacatcgccgcccagagcgagagagtggaggccctgaacgccgccgccctgagattcagccagctgcagggctaccagccctgcgacccccaggtgatctgcaacagagtgaaccacgtgcacggctgcctggccgagctgcaggagcaggccgccagaagaagagccgagctggaggccagcagaagcctgtgggccctgctgcaggagctggaggaggccgagagctgggccagagacaaggagagactgctggaggccgccggcggcggcggcgccgccggcgccgccggcgccgccggcaccgccggcggcgcccacgacctgagcagcaccgccagactgctggcccagcacaagatcctgcagggcgagctgggcggcagaagagccctgctgcagcaggccctgagatgcggcgaggagctggtggccgccggcggcgccgtgggccccggcgccgacaccgtgcacctggtgggcctggccgagagagccgccagcgccagaagaagatggcagagactggaggaggccgccgccagaagagagagaagactgcaggaggccagagccctgcaccagttcggcgccgacctggacggcctgctggactggctgagagacgcctacagactggccgccgccggcgacttcggccacgacgaggccagcagcagaagactggccagacagcacagagccctgaccggcgaggtggaggcccacagaggccccgtgagcggcctgagaagacagctggccaccctgggcggcgccagcggcgccggccccctggtggtggccctgcaggtgagagtggtggaggccgagcagctgttcgccgaggtgaccgaggtggccgccctgagaagacagtggctgagagacgccctggccgtgtacagaatgttcggcgaggtgcacgcctgcgagctgtggatcggcgagaaggagcagtggctgctgagcatgagagtgcccgacagcctggacgacgtggaggtggtgcagcacagattcgagagcctggaccaggagatgaacagcctgatgggcagagtgctggacgtgaaccacaccgtgcaggagctggtggagggcggccaccccagcagcgacgaggtgagaagctgccaggaccacctgaacagcagatggaacagaatcgtggagctggtggagcagagaaaggaggagatgagcgccgtgctgctggtggagaaccacgtgctggaggtggccgaggtgagagcccaggtgagagagaagagaagagccgtggagagcgcccccagagccggcggcgccctgcagtggagactgagcggcctggaggccgccctgcaggccctggagcccagacaggccgccctgctggaggaggccgccctgctggccgagagattccccgcccaggccgccagactgcaccagggcgccgaggagctgggcgccgagtggggcgccctggccagcgccgcccaggcctgcggcgaggccgtggccgccgccggcagactgcagagattcctgcacgacctggacgccttcctggactggctggtgagagcccaggaggccgccggcggcagcgagggccccctgcccaacagcctggaggaggccgacgccctgctggccagacacgccgccctgaaggaggaggtggaccagagagaggaggactacgccagaatcgtggccgccagcgaggccctgctggccgccgacggcgccgagctgggccccggcctggccctggacgagtggctgccccacctggagctgggctggcacaagctgctgggcctgtgggaggccagaagagaggccctggtgcaggcccacatctaccagctgttcctgagagacctgagacaggccctggtggtgctgagaaaccaggagatggccctgagcggcgccgagctgcccggcaccgtggagagcgtggaggaggccctgaagcagcacagagacttcctgaccaccatggagctgagccagcagaagatgcaggtggccgtgcaggccgccgagggcctgctgagacagggcaacatctacggcgagcaggcccaggaggccgtgaccagactgctggagaagaaccaggagaaccagctgagagcccagcagtggatgcagaagctgcacgaccagctggagctgcagcacttcctgagagactgccacgagctggacggctggatccacgagaagatgctgatggccagagacggcaccagagaggacaaccacaagctgcacaagagatggctgagacaccaggccttcatggccgagctggcccagaacaaggagtggctggagaagatcgagagagagggccagcagctgatgcaggagaagcccgagctggccgccagcgtgagaaagaagctgggcgagatcagacagtgctgggccgagctggagagcaccacccaggccaaggccagacagctgttcgaggccagcaaggccgaccagctggtgcagagcttcgccgagctggacaagaagctgctgcacatggagagccagctgcaggacgtggaccccggcggcgacctggccaccgtgaacagccagctgaagaagctgcagagcatggagagccaggtggaggagtggtacagagaggtgggcgagctgcaggcccagaccgccgccctgcccctggagcccgccagcaaggagctggtgggcgagagacagaacgccgtgggcgagagactggtgagactgctggagcccctgcaggagagaagaagactgctgctggccagcaaggagctgcaccaggtggcccacgacctggacgacgagctggcctgggtgcaggagagactgcccctggccatgcagaccgagagaggcaacggcctgcaggccgtgcagcagcacatcaagaagaaccagggcctgagaagagagatccaggcccacggccccagactggaggaggtgctggagagagccggcgccctggccagcctgagaagccccgaggccgaggccgtgagaagaggcctggagcagctgcagagcgcctgggccggcctgagagaggccgccgagagaagacagcaggtgctggacgccgccttccaggtggagcagtactacttcgacgtggccgaggtggaggcctggctgggcgagcaggagctgctgatgatgagcgaggacaagggcaaggacgagcagagcaccctgcagctgctgaagaagcacctgcagctggagcagggcgtggagaactacgaggagagcatcgcccagctgagcagacagtgcagagccctgctggagatgggccaccccgacagcgagcagatcagcagaagacagagccaggtggacagactgtacgtggccctgaaggagctgggcgaggagagaagagtggccctggagcagcagtactggctgtaccagctgagcagacaggtgagcgagctggagcactggatcgccgagaaggaggtggtggccggcagccccgagctgggccaggacttcgagcacgtgagcgtgctgcaggagaagttcagcgagttcgccagcgagaccggcatggccggcagagagagactggccgccgtgaaccagatggtggacgagctgatcgagtgcggccacaccgccgccgccaccatggccgagtggaaggacggcctgaacgaggcctgggccgagctgctggagctgatgggcaccagagcccagctgctggccgccagcagagagctgcacaagttcttcagcgacgccagagagctgcagggccagatcgaggagaagagaagaagactgcccagactgaccaccccccccgagcccagacccagcgccagcagcatgcagagaaccctgagagccttcgagcacgacctgcagctgctggtgagccaggtgagacagctgcaggagggcgccgcccagctgagaaccgtgtacgccggcgagcacgccgaggccatcgccagcagagagcaggaggtgctgcagggctggaaggagctgctgagcgcctgcgaggacgccagactgcacgtgagcagcaccgccgacgccctgagattccacagccaggtgagagacctgctgagctggatggacggcatcgccagccagatcggcgccgccgacaagcccagagacgtgagcagcgtggaggtgctgatgaactaccaccagggcctgaagaccgagctggaggccagagtgcccgagctgaccacctgccaggagctgggcagaagcctgctgctgaacaagagcgccatggccgacgagatccaggcccagctggacaagctgggcaccagaaaggaggaggtgagcgagaagtgggacagacactgggagtggctgcagcagatgctggaggtgcaccagttcgcccaggaggccgtggtggccgacgcctggctgaccgcccaggagcccctgctgcagagcagagagctgggcagcagcgtggacgaggtggagcagctgatcagaagacacgaggccttcagaaaggccgccgccgcctgggaggagagattcagcagcctgagaagactgaccaccatcgagaagatcaaggccgagcagagcaagcagccccccacccccctgctgggcagaaagttcttcggcgaccccaccgagctggccgccaaggccgcccccctgctgagacccggcggctacgagagaggcctggagcccctggccagaagagccagcgacaccctgagcgccgaggtgagaaccagagtgggctacgtgagacaggagctgaagcccgagagactgcagcccagaatcgacagactgcccgagatccccggcagagtggagcccgccgccctgcccgccgcccccgaggacgccgccgagacccccgccacccccgccgccgccgagcaggtgagacccagacccgagagacaggagagcgccgacagagccgaggagctgcccagaagaagaagacccgagagacaggagagcgtggaccagagcgaggaggccgccagaagaagaagacccgagagacaggagagcgccgagcacgaggccgcccacagcctgaccctgggcagatacgagcagatggagagaagaagagagagaagagagagaagactggagagacaggagagcagcgagcaggagatgcccatcagaggcgacctggtgaagggcaaggccaccctggccgacatcgtggagcagctgcaggagaaggaggccggccccggcctgcccgccggccccagcctgccccagcccagagagctgccccccggcagactgcccaacggcctggagctgcccgagagaacccccagacccgacagacccagagccagagacagacccaagcccagaagaagacccagacccagagagggcggcgagggcggcggcagcagaagaagcagaagcgcccccgcccagggcggcagcgcccccgcccccccccccccccccacccacaccgtgcagcacgagggcttcctgctgagaaagagagagctggacgccaacagaaagagcagcaacagaagctgggtgagcctgtactgcgtgctgagcaagggcgagctgggcttctacaaggacagcaagggccccgccagcggcagcacccacggcggcgagcccctgctgagcctgcacaaggccaccagcgaggtggccagcgactacaagaagaagaagcacgtgttcaagctgcagacccaggacggcagcgagttcctgctgcaggccaaggacgaggaggagatgaacggctggctggaggccgtggccagcagcgtggccgagcacgccgagatcgccagatggggccagaccctgcccaccaccagcagcaccgacgagggcaaccccaagagagagggcggcgacagaagagccagcggcagaagaaagtag

SEQ ID NO: 100516 - DNA, 2037 bp, synthetic construct
  misc_feature 1..2037: note = Description of Artificial Sequence: Synthetic coding sequence
  source 1..2037: mol_type = other DNA
atgctgatggccagagacggcaccagagaggacaaccacaagctgcacaagagatggctgagacaccaggccttcatggccgagctggcccagaacaaggagtggctggagaagatcgagagagagggccagcagctgatgcaggagaagcccgagctggccgccagcgtgagaaagaagctgggcgagatcagacagtgctgggccgagctggagagcaccacccaggccaaggccagacagctgttcgaggccagcaaggccgaccagctggtgcagagcttcgccgagctggacaagaagctgctgcacatggagagccagctgcaggacgtggaccccggcggcgacctggccaccgtgaacagccagctgaagaagctgcagagcatggagagccaggtggaggagtggtacagagaggtgggcgagctgcaggcccagaccgccgccctgcccctggagcccgccagcaaggagctggtgggcgagagacagaacgccgtgggcgagagactggtgagactgctggagcccctgcaggagagaagaagactgctgctggccagcaaggagctgcaccaggtggcccacgacctggacgacgagctggcctgggtgcaggagagactgcccctggccatgcagaccgagagaggcaacggcctgcaggccgtgcagcagcacatcaagaagaaccagggcctgagaagagagatccaggcccacggccccagactggaggaggtgctggagagagccggcgccctggccagcctgagaagccccgaggccgaggccgtgagaagaggcctggagcagctgcagagcgcctgggccggcctgagagaggccgccgagagaagacagcaggtgctggacgccgccttccaggtggagcagtactacttcgacgtggccgaggtggaggcctggctgggcgagcaggagctgctgatgatgagcgaggacaagggcaaggacgagcagagcaccctgcagctgctgaagaagcacctgcagctggagcagggcgtggagaactacgaggagagcatcgcccagctgagcagacagtgcagagccctgctggagatgggccaccccgacagcgagcagatcagcagaagacagagccaggtggacagactgtacgtggccctgaaggagctgggcgaggagagaagagtggccctggagcagcagtactggctgtaccagctgagcagacaggtgagcgagctggagcactggatcgccgagaaggaggtggtggccggcagccccgagctgggccaggacttcgagcacgtgagcgtgctgcaggagaagttcagcgagttcgccagcgagaccggcatggccggcagagagagactggccgccgtgaaccagatggtggacgagctgatcgagtgcggccacaccgccgccgccaccatggccgagtggaaggacggcctgaacgaggcctgggccgagctgctggagctgatgggcaccagagcccagctgctggccgccagcagagagctgcacaagttcttcagcgacgccagagagctgcagggccagatcgaggagaagagaagaagactgcccagactgaccaccccccccgagcccagacccagcgccagcagcatgcagagaaccctgagagccttcgagcacgacctgcagctgctggtgagccaggtgagacagctgcaggagggcgccgcccagctgagaaccgtgtacgccggcgagcacgccgaggccatcgccagcagagagcaggaggtgctgcagggctggaaggagctgctgagcgcctgcgaggacgccagactgcacgtgagcagcaccgccgacgccctgagattccacagccaggtgagagacctgctgagctggatggacggcatcgccagccagatcggcgccgccgacaagcccagatgccccagcagcctgctgggcctgcccgccagcccctggtggcccacccccgccacccccagccccctgaccgcccccttcagcatggagtag

SEQ ID NO: 100517 - DNA, 3924 bp, synthetic construct
  misc_feature 1..3924: note = Description of Artificial Sequence: Synthetic coding sequence
  source 1..3924: mol_type = other DNA
atgccccactaccccagctgcagcagcgcccccagcctgggcacccccagacccccccagatccagcagctggaggccagacacagaaaccaggagaaccagctgagagcccagcagtggatgcagaagctgcacgaccagctggagctgcagcacttcctgagagactgccacgagctggacggctggatccacgagaagatgctgatggccagagacggcaccagagaggacaaccacaagctgcacaagagatggctgagacaccaggccttcatggccgagctggcccagaacaaggagtggctggagaagatcgagagagagggccagcagctgatgcaggagaagcccgagctggccgccagcgtgagaaagaagctgggcgagatcagacagtgctgggccgagctggagagcaccacccaggccaaggccagacagctgttcgaggccagcaaggccgaccagctggtgcagagcttcgccgagctggacaagaagctgctgcacatggagagccagctgcaggacgtggaccccggcggcgacctggccaccgtgaacagccagctgaagaagctgcagagcatggagagccaggtggaggagtggtacagagaggtgggcgagctgcaggcccagaccgccgccctgcccctggagcccgccagcaaggagctggtgggcgagagacagaacgccgtgggcgagagactggtgagactgctggagcccctgcaggagagaagaagactgctgctggccagcaaggagctgcaccaggtggcccacgacctggacgacgagctggcctgggtgcaggagagactgcccctggccatgcagaccgagagaggcaacggcctgcaggccgtgcagcagcacatcaagaagaaccagggcctgagaagagagatccaggcccacggccccagactggaggaggtgctggagagagccggcgccctggccagcctgagaagccccgaggccgaggccgtgagaagaggcctggagcagctgcagagcgcctgggccggcctgagagaggccgccgagagaagacagcaggtgctggacgccgccttccaggtggagcagtactacttcgacgtggccgaggtggaggcctggctgggcgagcaggagctgctgatgatgagcgaggacaagggcaaggacgagcagagcaccctgcagctgctgaagaagcacctgcagctggagcagggcgtggagaactacgaggagagcatcgcccagctgagcagacagtgcagagccctgctggagatgggccaccccgacagcgagcagatcagcagaagacagagccaggtggacagactgtacgtggccctgaaggagctgggcgaggagagaagagtggccctggagcagcagtactggctgtaccagctgagcagacaggtgagcgagctggagcactggatcgccgagaaggaggtggtggccggcagccccgagctgggccaggacttcgagcacgtgagcgtgctgcaggagaagttcagcgagttcgccagcgagaccggcatggccggcagagagagactggccgccgtgaaccagatggtggacgagctgatcgagtgcggccacaccgccgccgccaccatggccgagtggaaggacggcctgaacgaggcctgggccgagctgctggagctgatgggcaccagagcccagctgctggccgccagcagagagctgcacaagttcttcagcgacgccagagagctgcagggccagatcgaggagaagagaagaagactgcccagactgaccaccccccccgagcccagacccagcgccagcagcatgcagagaaccctgagagccttcgagcacgacctgcagctgctggtgagccaggtgagacagctgcaggagggcgccgcccagctgagaaccgtgtacgccggcgagcacgccgaggccatcgccagcagagagcaggaggtgctgcagggctggaaggagctgctgagcgcctgcgaggacgccagactgcacgtgagcagcaccgccgacgccctgagattccacagccaggtgagagacctgctgagctggatggacggcatcgccagccagatcggcgccgccgacaagcccagagacgtgagcagcgtggaggtgctgatgaactaccaccagggcctgaagaccgagctggaggccagagtgcccgagctgaccacctgccaggagctgggcagaagcctgctgctgaacaagagcgccatggccgacgagatccaggcccagctggacaagctgggcaccagaaaggaggaggtgagcgagaagtgggacagacactgggagtggctgcagcagatgctggaggtgcaccagttcgcccaggaggccgtggtggccgacgcctggctgaccgcccaggagcccctgctgcagagcagagagctgggcagcagcgtggacgaggtggagcagctgatcagaagacacgaggccttcagaaaggccgccgccgcctgggaggagagattcagcagcctgagaagactgaccaccatcgagaagatcaaggccgagcagagcaagcagccccccacccccctgctgggcagaaagttcttcggcgaccccaccgagctggccgccaaggccgcccccctgctgagacccggcggctacgagagaggcctggagcccctggccagaagagccagcgacaccctgagcgccgaggtgagaaccagagtgggctacgtgagacaggagctgaagcccgagagactgcagcccagaatcgacagactgcccgagatccccggcagagtggagcccgccgccctgcccgccgcccccgaggacgccgccgagacccccgccacccccgccgccgccgagcaggtgagacccagacccgagagacaggagagcgccgacagagccgaggagctgcccagaagaagaagacccgagagacaggagagcgtggaccagagcgaggaggccgccagaagaagaagacccgagagacaggagagcgccgagcacgaggccgcccacagcctgaccctgggcagatacgagcagatggagagaagaagagagagaagagagagaagactggagagacaggagagcagcgagcaggagatgcccatcagaggcgacctggtgaagggcaaggccaccctggccgacatcgtggagcagctgcaggagaaggaggccggccccggcctgcccgccggccccagcctgccccagcccagagagctgccccccggcagactgcccaacggcctggagctgcccgagagaacccccagacccgacagacccagagccagagacagacccaagcccagaagaagacccagacccagagagggcggcgagggcggcggcagcagaagaagcagaagcgcccccgcccagggcggcagcgcccccgcccccccccccccccccacccacaccgtgcagcacgagggcttcctgctgagaaagagagagctggacgccaacagaaagagcagcaacagaagctgggtgagcctgtactgcgtgctgagcaagggcgagctgggcttctacaaggacagcaagggccccgccagcggcagcacccacggcggcgagcccctgctgagcctgcacaaggccaccagcgaggtggccagcgactacaagaagaagaagcacgtgttcaagctgcagacccaggacggcagcgagttcctgctgcaggccaaggacgaggaggagatgaacggctggctggaggccgtggccagcagcgtggccgagcacgccgagatcgccagatggggccagaccctgcccaccaccagcagcaccgacgagggcaaccccaagagagagggcggcgacagaagagccagcggcagaagaaagtag

SEQ ID NO: 100518 - DNA, 7695 bp, synthetic construct
  misc_feature 1..7695: note = Description of Artificial Sequence: Synthetic coding sequence
  source 1..7695: mol_type = other DNA
atggcccaggtgcccggcgaggtggacaacatggagggcctgcccgcccccaacaacaaccccgccgccagatgggagagccccgacagaggctgggagagagagcagcccgccgccagcaccgccgccgccagcctgttcgagtgcagcagaatcaaggccctggccgacgagagagaggccgtgcagaagaagaccttcaccaagtgggtgaacagccacctggccagagtgggctgccacatcggcgacctgtacgtggacctgagagacggcttcgtgctgaccagactgctggaggtgctgagcggcgagcagctgcccagacccaccagaggcagaatgagaatccacagcctggagaacgtggacaaggccctgcagttcctgaaggagcagagagtgcacctggagaacgtgggcagccacgacatcgtggacggcaaccacagactgaccctgggcctggtgtggaccatcatcctgagattccagatccaggtgatcaagatcgagaccgaggacaacagagagaccagaagcgccaaggacgccctgctgctgtggtgccagatgaagaccgccggctaccccgaggtgaacatccagaacttcaccaccagctggagagacggcctggccttcaacgccctgatccacagacacagacccgacctggtggacttcagcaagctgaccaagagcaacgccaactacaacctgcagagagccttcagaaccgccgagcagcacctgggcctggccagactgctggaccccgaggacgtgaacatggaggcccccgacgagaagagcatcatcacctacgtggtgagcttctaccactacttcagcaagatgaaggccctggccgtggagggcaagagaatcggcaaggtgctggaccaggtgctggaggtgggcaagatcatcgagagatacgaggagctggccgccgagctgctggcctggatccacagaaccgtgggcctgatcagcaaccagaagttcgccaacagcctgagcggcgtgcagcagcagctgcaggccttcaccgcctactgcaccctggagaagcccgtgaagttccaggagaagggcaacctggaggtgctgctgttcagcatccagagcaagctgagagcctgcaacagaagactgttcgtgcccagagagggctgcggcatctgggacatcgacaaggcctggggcgagctggagaaggccgagcacgagagagaggccgccctgagagccgagctgatcagacaggagaagctggagctgctggcccagagattcgaccacaaggtggccatgagagagagctggctgaacgagaaccagagactggtgagccaggacaacttcggctacgagctgcccgccgtggaggccgccatgaagaagcacgaggccatcgaggccgacatcgccgcctacgaggagagagtgcagggcgtggccgagctggcccaggccctggccgccgagggctactacgacatcagaagagtggccgcccagagagacagcgtgctgagacagtgggccctgctgaccggcctggtgggcgccagaagaaccagactggagcagaacctggccctgcagaaggtgttccaggagatggtgtacatggtggactggatggaggagatgcaggcccagctgctgagcagagagtgcggccagcacctggtggaggccgacgacctgctgcagaagcacggcctgctggagggcgacatcgccgcccagagcgagagagtggaggccctgaacgccgccgccctgagattcagccagctgcagggctaccagccctgcgacccccaggtgatctgcaacagagtgaaccacgtgcacggctgcctggccgagctgcaggagcaggccgccagaagaagagccgagctggaggccagcagaagcctgtgggccctgctgcaggagctggaggaggccgagagctgggccagagacaaggagagactgctggaggccgccggcggcggcggcgccgccggcgccgccggcgccgccggcaccgccggcggcgcccacgacctgagcagcaccgccagactgctggcccagcacaagatcctgcagggcgagctgggcggcagaagagccctgctgcagcaggccctgagatgcggcgaggagctggtggccgccggcggcgccgtgggccccggcgccgacaccgtgcacctggtgggcctggccgagagagccgccagcgccagaagaagatggcagagactggaggaggccgccgccagaagagagagaagactgcaggaggccagagccctgcaccagttcggcgccgacctggacggcctgctggactggctgagagacgcctacagactggccgccgccggcgacttcggccacgacgaggccagcagcagaagactggccagacagcacagagccctgaccggcgaggtggaggcccacagaggccccgtgagcggcctgagaagacagctggccaccctgggcggcgccagcggcgccggccccctggtggtggccctgcaggtgagagtggtggaggccgagcagctgttcgccgaggtgaccgaggtggccgccctgagaagacagtggctgagagacgccctggccgtgtacagaatgttcggcgaggtgcacgcctgcgagctgtggatcggcgagaaggagcagtggctgctgagcatgagagtgcccgacagcctggacgacgtggaggtggtgcagcacagattcgagagcctggaccaggagatgaacagcctgatgggcagagtgctggacgtgaaccacaccgtgcaggagctggtggagggcggccaccccagcagcgacgaggtgagaagctgccaggaccacctgaacagcagatggaacagaatcgtggagctggtggagcagagaaaggaggagatgagcgccgtgctgctggtggagaaccacgtgctggaggtggccgaggtgagagcccaggtgagagagaagagaagagccgtggagagcgcccccagagccggcggcgccctgcagtggagactgagcggcctggaggccgccctgcaggccctggagcccagacaggccgccctgctggaggaggccgccctgctggccgagagattccccgcccaggccgccagactgcaccagggcgccgaggagctgggcgccgagtggggcgccctggccagcgccgcccaggcctgcggcgaggccgtggccgccgccggcagactgcagagattcctgcacgacctggacgccttcctggactggctggtgagagcccaggaggccgccggcggcagcgagggccccctgcccaacagcctggaggaggccgacgccctgctggccagacacgccgccctgaaggaggaggtggaccagagagaggaggactacgccagaatcgtggccgccagcgaggccctgctggccgccgacggcgccgagctgggccccggcctggccctggacgagtggctgccccacctggagctgggctggcacaagctgctgggcctgtgggaggccagaagagaggccctggtgcaggcccacatctaccagctgttcctgagagacctgagacaggccctggtggtgctgagaaaccaggagatggccctgagcggcgccgagctgcccggcaccgtggagagcgtggaggaggccctgaagcagcacagagacttcctgaccaccatggagctgagccagcagaagatgcaggtggccgtgcaggccgccgagggcctgctgagacagggcaacatctacggcgagcaggcccaggaggccgtgaccagactgctggagaagaaccaggagaaccagctgagagcccagcagtggatgcagaagctgcacgaccagctggagctgcagcacttcctgagagactgccacgagctggacggctggatccacgagaagatgctgatggccagagacggcaccagagaggacaaccacaagctgcacaagagatggctgagacaccaggccttcatggccgagctggcccagaacaaggagtggctggagaagatcgagagagagggccagcagctgatgcaggagaagcccgagctggccgccagcgtgagaaagaagctgggcgagatcagacagtgctgggccgagctggagagcaccacccaggccaaggccagacagctgttcgaggccagcaaggccgaccagctggtgcagagcttcgccgagctggacaagaagctgctgcacatggagagccagctgcaggacgtggaccccggcggcgacctggccaccgtgaacagccagctgaagaagctgcagagcatggagagccaggtggaggagtggtacagagaggtgggcgagctgcaggcccagaccgccgccctgcccctggagcccgccagcaaggagctggtgggcgagagacagaacgccgtgggcgagagactggtgagactgctggagcccctgcaggagagaagaagactgctgctggccagcaaggagctgcaccaggtggcccacgactggaccaccagctgggcctgggtgcaggagagactgcccctggccatgcagaccgagagaggcaacggcctgcaggccgtgcagcagcacatcaagaagaaccagggcctgagaagagagatccaggcccacggccccagactggaggaggtgctggagagagccggcgccctggccagcctgagaagccccgaggccgaggccgtgagaagaggcctggagcagctgcagagcgcctgggccggcctgagagaggccgccgagagaagacagcaggtgctggacgccgccttccaggtggagcagtactacttcgacgtggccgaggtggaggcctggctgggcgagcaggagctgctgatgatgagcgaggacaagggcaaggacgagcagagcaccctgcagctgctgaagaagcacctgcagctggagcagggcgtggagaactacgaggagagcatcgcccagctgagcagacagtgcagagccctgctggagatgggccaccccgacagcgagcagatcagcagaagacagagccaggtggacagactgtacgtggccctgaaggagctgggcgaggagagaagagtggccctggagcagcagtactggctgtaccagctgagcagacaggtgagcgagctggagcactggatcgccgagaaggaggtggtggccggcagccccgagctgggccaggacttcgagcacgtgagcgtgctgcaggagaagttcagcgagttcgccagcgagaccggcatggccggcagagagagactggccgccgtgaaccagatggtggacgagctgatcgagtgcggccacaccgccgccgccaccatggccgagtggaaggacggcctgaacgaggcctgggccgagctgctggagctgatgggcaccagagcccagctgctggccgccagcagagagctgcacaagttcttcagcgacgccagagagctgcagggccagatcgaggagaagagaagaagactgcccagactgaccaccccccccgagcccagacccagcgccagcagcatgcagagaaccctgagagccttcgagcacgacctgcagctgctggtgagccaggtgagacagctgcaggagggcgccgcccagctgagaaccgtgtacgccggcgagcacgccgaggccatcgccagcagagagcaggaggtgctgcagggctggaaggagctgctgagcgcctgcgaggacgccagactgcacgtgagcagcaccgccgacgccctgagattccacagccaggtgagagacctgctgagctggatggacggcatcgccagccagatcggcgccgccgacaagcccagagacgtgagcagcgtggaggtgctgatgaactaccaccagggcctgaagaccgagctggaggccagagtgcccgagctgaccacctgccaggagctgggcagaagcctgctgctgaacaagagcgccatggccgacgagatccaggcccagctggacaagctgggcaccagaaaggaggaggtgagcgagaagtgggacagacactgggagtggctgcagcagatgctggaggtgcaccagttcgcccaggaggccgtggtggccgacgcctggctgaccgcccaggagcccctgctgcagagcagagagctgggcagcagcgtggacgaggtggagcagctgatcagaagacacgaggccttcagaaaggccgccgccgcctgggaggagagattcagcagcctgagaagactgaccaccatcgagaagatcaaggccgagcagagcaagcagccccccacccccctgctgggcagaaagttcttcggcgaccccaccgagctggccgccaaggccgcccccctgctgagacccggcggctacgagagaggcctggagcccctggccagaagagccagcgacaccctgagcgccgaggtgagaaccagagtgggctacgtgagacaggagctgaagcccgagagactgcagcccagaatcgacagactgcccgagatccccggcagagtggagcccgccgccctgcccgccgcccccgaggacgccgccgagacccccgccacccccgccgccgccgagcaggtgagacccagacccgagagacaggagagcgccgacagagccgaggagctgcccagaagaagaagacccgagagacaggagagcgtggaccagagcgaggaggccgccagaagaagaagacccgagagacaggagagcgccgagcacgaggccgcccacagcctgaccctgggcagatacgagcagatggagagaagaagagagagaagagagagaagactggagagacaggagagcagcgagcaggagatgcccatcagaggcgacctggtgaagggcaaggccaccctggccgacatcgtggagcagctgcaggagaaggaggccggccccggcctgcccgccggccccagcctgccccagcccagagagctgccccccggcagactgcccaacggcctggagctgcccgagagaacccccagacccgacagacccagagccagagacagacccaagcccagaagaagacccagacccagagagggcggcgagggcggcggcagcagaagaagcagaagcgcccccgcccagggcggcagcgcccccgcccccccccccccccccacccacaccgtgcagcacgagggcttcctgctgagaaagagagagctggacgccaacagaaagagcagcaacagaagctgggtgagcctgtactgcgtgctgagcaagggcgagctgggcttctacaaggacagcaagggccccgccagcggcagcacccacggcggcgagcccctgctgagcctgcacaaggccaccagcgaggtggccagcgactacaagaagaagaagcacgtgttcaagctgcagacccaggacggcagcgagttcctgctgcaggccaaggacgaggaggagatgaacggctggctggaggccgtggccagcagcgtggccgagcacgccgagatcgccagatggggccagaccctgcccaccaccagcagcaccgacgagggcaaccccaagagagagggcggcgacagaagagccagcggcagaagaaagtag

SEQ ID NO: 100519 - DNA, 11025 bp, synthetic construct
  misc_feature 1..11025: note = Description of Artificial Sequence: Synthetic coding sequence
  source 1..11025: mol_type = other DNA
atggccggccagccccacagccccagagagctgctgggcgccgccggccacagaagcagaagacccagcaccgagctgagagtgccccccagccccagcctgaccatggacagccagtacgagaccggccacatcagaaagctgcaggccagacacatgcagatgcaggagaagaccttcaccaagtggatcaacaacgtgttccagtgcggccaggccggcatcaagatcagaaacctgtacaccgagctggccgacggcatccacctgctgagactgctggagctgatcagcggcgaggccctgcccccccccagcagaggcagactgagagtgcacttcctggagaacagcagcagagccctggccttcctgagagccaaggtgcccgtgcccctgatcggccccgagaacatcgtggacggcgaccagaccctgatcctgggcctgatctgggtgatcatcctgagattccagatcagccacatcagcctggacaaggaggagttcggcgccagcgccgccctgctgagcaccaaggaggccctgctggtgtggtgccagagaaagaccgccagctacaccaacgtgaacatcaccgacttcagcagaagctggagcgacggcctgggcttcaacgccctgatccacgcccacagacccgacctgctggactacggcagcctgagacccgacagacccctgcacaacctggccttcgccttcctggtggccgagcaggagctgggcatcgcccagctgctggaccccgaggacgtggccgccgcccagcccgacgagagaagcatcatgacctacgtgagcctgtactaccactactgcagcagactgcaccagggccagaccgtgcagagaagactgaccaagatcctgctgcagctgcaggagaccgagctgctgcagacccagtacgagcagctggtggccgacctgctgagatggatcgccgagaagcagatgcagctggaggccagagacttccccgacagcctgcccgccatgagacagctgctggccgccttcaccatcttcagaacccaggagaagccccccagactgcagcagagaggcgccgccgaggccctgctgttcagactgcagaccgccctgcaggcccagaacagaagacccttcctgccccacgagggcctgggcctggccgagctgagccagtgctgggccggcctggagtgggccgaggccgccagaagccaggccctgcagcagagactgctgcagctgcagagactggagaccctggccagaagattccagcacaaggccgccctgagagagagcttcctgaaggacgccgagcaggtgctggaccaggccagagccccccccgccagcctggccaccgtggaggccgccgtgcagagactgggcatgctggaggccggcatcctgccccaggagggcagattccaggccctggccgagatcgccgacatcctgagacaggagcagtaccacagctgggccgacgtggccagaagacaggaggaggtgaccgtgagatggcagagactgctgcagcacctgcagggccagagaaagcaggtggccgacatgcaggccgtgctgagcctgctgcaggaggtggaggccgccagccaccagctggaggagctgcaggagcccgccagaagcaccgcctgcggccagcagctggccgaggtggtggagctgctgcagagacacgacctgctggaggcccaggtgagcgcccacggcgcccacgtgagccacctggcccagcagaccgccgagctggacagcagcctgggcaccagcgtggaggtgctgcaggccaaggccagaaccctggcccagctgcagcagagcctggtggccctggtgagagccagaagagccctgctggagcagaccctgcagagagccgagttcctgagaaactgcgaggaggaggaggcctggctgaaggagtgcggccagagagtgggcaacgccgccctgggcagagacctgagccagatcgccggcgccctgcagaagcacaaggccctggaggccgaggtgcacagacaccaggccgtgtgcgtggacctggtgagaagaggcagagacctgagcgccagaagaccccccacccagcccgaccccggcgagagagccgaggccgtgcagggcggctggcagctgctgcagaccagagtggtgggcagaggcgccagactgcagaccgccctgctggtgctgcagtacttcgccgacgccgccgaggccgccagctggctgagagagagaagaagcagcctggagagagccagctgcggccaggaccaggccgccgccgagaccctgctgagaagacacgtgagactggagagagtgctgagagccttcgccgccgagctgagaagactggaggagcagggcagagccgccagcgccagagccagcctgttcaccgtgaacagcgccctgagcccccccggcgagagcctgagaaaccccggcccctggagcgaggccagctgccaccccggccccggcgacgcctggaagatggccctgcccgccgagcccgaccccgacttcgaccccaacaccatcctgcagacccaggaccacctgagccaggactacgagagcctgagagccctggcccagctgagaagagccagactggaggaggccatggccctgttcggcttctgcagcagctgcggcgagctgcagctgtggctggagaagcagaccgtgctgctgcagagagtgcagccccaggccgacaccctggaggtgatgcagctgaagtacgagaacttcctgaccgccctggccgtgggcaagggcctgtgggccgaggtgagcagcagcgccgagcagctgagacagagataccccggcaacagcacccagatccagagacagcaggaggagctgagccagagatggggccagctggaggccctgaagagagagaaggccgtgcagctggcccacagcgtggaggtgtgcagcttcctgcaggagtgcggccccacccaggtgcagctgagagacgtgctgctgcagctggaggccctgcagcccggcagcagcgaggacacctgccacgccctgcagctggcccagaagaagaccctggtgctggagagaagagtgcacttcctgcagagcgtggtggtgaaggtggaggagcccggctacgccgagagccagcccctgcagggccaggtggagaccctgcagggcctgctgaagcaggtgcaggagcaggtggcccagagagccagaagacaggccgagacccaggccagacagagcttcctgcaggagagccagcagctgctgctgtgggccgagagcgtgcaggcccagctgagaagcaaggaggtgagcgtggacgtggccagcgcccagagactgctgagagagcaccaggacctgctggaggagatccacctgtggcaggagagactgcagcagctggacgcccagagccagcccatggccgccctggactgccccgacagccaggaggtgcccaacaccctgagagtgctgggccagcagggccaggagctgaaggtgctgtgggagcagagacagcagtggctgcaggagggcctggagctgcagaagttcggcagagaggtggacggcttcaccgccacctgcgccaaccaccaggcctggctgcacctggacaacctgggcgaggacgtgagagaggccctgagcctgctgcagcagcacagagagttcggcagactgctgagcaccctgggccccagagccgaggccctgagagcccacggcgagaagctggtgcagagccagcaccccgccgcccacaccgtgagagagcagctgcagagcatccaggcccagtggaccagactgcagggcagaagcgagcagagaagaagacagctgctggccagcctgcagctgcaggagtggaagcaggacgtggccgagctgatgcagtggatggaggagaagggcctgatggccgcccacgagcccagcggcgccagaagaaacatcctgcagaccctgaagagacacgaggccgccgagagcgagctgctggccaccagaagacacgtggaggccctgcagcaggtgggcagagagctgctgagcagaagaccctgcggccaggaggacatccagaccagactgcagggcctgagaagcaagtgggaggccctgaacagaaagatgaccgagagaggcgacgagctgcagcaggccggccagcaggagcagctgctgagacagctgcaggacgccaaggagcagctggagcagctggagggcgccctgcagagcagcgagaccggccaggacctgagaagcagccagagactgcagaagagacaccagcagctggagagcgagagcagaaccctggccgccaagatggccgccctggccagcatggcccacggcatggccgccagccccgccatcctggaggagacccagaagcacctgagaagactggagctgctgcagggccacctggccatcagaggcctgcagctgcaggccagcgtggagctgcaccagttctgccacctgagcaacatggagctgagctgggtggccgagcacatgccccacggcagccccaccagctacaccgagtgcctgaacggcgcccagagcctgcacagaaagcacaaggagctgcaggtggaggtgaaggcccaccagggccaggtgcagagagtgctgagcagcggcagaagcctggccgccagcggccacccccaggcccagcacatcgtggagcagtgccaggagctggagggccactgggccgagctggagagagcctgcgaggccagagcccagtgcctgcagcaggccgtgaccttccagcagtacttcctggacgtgagcgagctggagggctgggtggaggagaagagacccctggtgagcagcagagactacggcagagacgaggccgccaccctgagactgatcaacaagcaccaggccctgcaggaggagctggccatctactggagcagcatggaggagctggaccagaccgcccagaccctgaccggccccgaggtgcccgagcagcagagagtggtgcaggagagactgagagagcagctgagagccctgcaggagctggccgccaccagagacagagagctggagggcaccctgagactgcacgagttcctgagagaggccgaggacctgcagggctggctggccagccagaagcaggccgccaagggcggcgagagcctgggcgaggaccccgagcacgccctgcacctgtgcaccaagttcgccaagttccagcaccaggtggagatgggcagccagagagtggccgcctgcagactgctggccgagagcctgctggagagaggccacagcgccggccccatggtgagacagagacagcaggacctgcagaccgcctggagcgagctgtgggagctgacccaggccagaggccacgccctgagagacaccgagaccaccctgagagtgcacagagacctgctggaggtgctgacccaggtgcaggagaaggccaccagcctgcccaacaacgtggccagagacctgtgcggcctggaggcccagctgagaagccaccagggcctggagagagagctggtgggcaccgagagacagctgcaggagctgctggagaccgccggcagagtgcagaagctgtgccccggcccccaggcccacgccgtgcagcagagacagcaggccgtgacccaggcctgggccgtgctgcagagaagaatggagcagagaagagcccagctggagagagccagactgctggccagattcagaaccgccgtgagagactacgccagctgggccgccagagtgagacaggacctgcaggtggaggagagcagccaggagcccagcagcggccccctgaagctgagcgcccaccagtggctgagagccgagctggaggccagagagaagctgtggcagcaggccacccagctgggccagcaggccctgctggccgccggcacccccaccaaggaggtgcaggaggagctgagagccctgcaggaccagagagaccaggtgtaccagacctgggccagaaagcaggagagactgcaggccgagcagcaggagcagctgttcctgagagagtgcggcagactggaggagatcctggccgcccaggaggtgagcctgaagaccagcgccctgggcagcagcgtggaggaggtggagcagctgatcagaaagcacgaggtgttcctgaaggtgctgaccgcccaggacaagaaggaggccgccctgagagagagactgaagaccctgagaagacccagagtgagagacagactgcccatcctgctgcagagaagaatgagagtgaaggagctggccgagagcagaggccacgccctgcacgccagcctgctgatggccagcttcacccaggccgccacccaggccgaggactggatccaggcctgggcccagcagctgaaggagcccgtgccccccggcgacctgagagacaagctgaagcccctgctgaagcaccaggccttcgaggccgaggtgcaggcccacgaggaggtgatgaccagcgtggccaagaagggcgaggccctgctggcccagagccaccccagagccggcgaggtgagccagagactgcagggcctgagaaagcactgggaggacctgagacaggccatggccctgagaggccaggagctggaggacagaagaaacttcctggagttcctgcagagagtggacctggccgaggcctggatccaggagaaggaggtgaagatgaacgtgggcgacctgggccaggacctggagcactgcctgcagctgagaagaagactgagagagttcagaggcaacagcgccggcgacaccgtgggcgacgcctgcatcagaagcatcagcgacctgagcctgcagctgaagaacagagaccccgaggaggtgaagatcatctgccagagaagaagccagctgaacaacagatgggccagcttccacggcaacctgctgagataccagcagcagctggagggcgccctggagatccacgtgctgagcagagagctggacaacgtgaccaagagaatccaggagaaggaggccctgatccaggccctggactgcggcaaggacctggagagcgtgcagagactgctgagaaagcacgaggagctggagagagaggtgcaccccatccaggcccaggtggagagcctggagagagaggtgggcagactgtgccagagaagccccgaggccgcccacggcctgagacacagacagcaggaggtggccgagagctggtggcagctgagaagcagagcccagaagagaagagaggccctggacgccctgcaccaggcccagaagctgcaggccatgctgcaggagctgctggtgagcgcccagagactgagagcccagatggacaccagccccgcccccagaagccccgtggaggccagaagaatgctggaggagcaccaggagtgcaaggccgagctggacagctggaccgacagcatcagcctggccagaagcaccggccagcagctgctgaccgccggccaccccttcagcagcgacatcagacaggtgctggccggcctggagcaggagctgagcagcctggagggcgcctggcaggagcaccagctgcagctgcagcaggccctggagctgcagctgttcctgagcagcgtggagaagatggagagatggctgtgcagcaaggaggacagcctggccagcgagggcctgtgggaccccctggcccccatggagcccctgctgtggaagcacaagatgctggagtgggacctggaggtgcaggccggcaagatcagcgccctggaggccaccgccagaggcctgcaccagggcggccaccccgaggcccagagcgccctgggcagatgccaggccatgctgctgagaaaggaggccctgttcagacaggccggcaccagaagacacagactggaggagctgagacagctgcaggccttcctgcaggacagccaggaggtggccgcctggctgagagagaagaacctggtggccctggaggagggcctgctggacaccgccatgctgcccgcccagctgcagaagcagcagaacttccaggccgagctggacgccagcatgcaccagcagcaggagctgcagagagagggccagagactgctgcagggcggccaccccgccagcgaggccatccaggagagactggaggagctgggcgccctgtggggcgagctgcaggacaacagccagaagaaggtggccaagctgcagaaggcctgcgaggccctgagactgagaagaagcatggaggagctggagaactggctggagcccatcgaggtggagctgagagcccccaccgtgggccaggccctgcccggcgtgggcgagctgctgggcacccagagagagctggaggccgccgtggacaagaaggccagacaggccgaggccctgctgggccaggcccaggccttcgtgagagagggccactgcctggcccaggacgtggaggagcaggccagaagactgctgcagagattcaagagcctgagagagcccctgcaggagagaagaaccgccctggaggccagaagcctgctgctgaagttcttcagagacgccgacgaggagatggcctgggtgcaggagaagctgcccctggccgccgcccaggactacggccagagcctgagcgccgtgagacacctgcaggagcagcaccagaacctggagagcgagatgagcagccacgaggccctgaccagagtggtgctgggcaccggctacaagctggtgcaggccggccacttcgccgcccacgaggtggccgccagagtgcagcagctggagaaggccatggcccacctgagagccgaggccgccagaagaagactgctgctgcagcaggcccaggaggcccagcagttcctgaccgagctgctggaggccggcagctggctggccgagagaggccacgtgctggacagcgaggacatgggccacagcgccgaggccacccaggccctgctgagaagactggaggccaccaagagagacctggaggccttcagccccagaatcgagagactgcagcagaccgccgccctgctggagagcagaaagaaccccgagagccccaaggtgctggcccagctgcaggccgtgagagaggcccacgccgagctgctgagaagagccgaggccagaggccacggcctgcaggagcagctgcagctgcaccagctggagagagagaccctgctgctggacgcctggctgaccaccaaggccgccaccgccgagagccaggactacggccaggacctggagggcgtgaaggtgctggaggagaagttcgacgccttcagaaaggaggtgcagagcctgggccaggccaaggtgtacgccctgagaaagctggccggcaccctggagagaggcgcccccagaagatacccccacatccaggcccagagaagcagaatcgaggccgcctgggagagactggaccaggccatcaaggccagaaccgagaacctggccgccgcccacgaggtgcacagcttccagcaggccgccgccgagctgcagggcagaatgcaggagaagaccgccctgatgaagggcgaggacggcggccacagcctgagcagcgtgagaaccctgcagcagcagcacagaagactggagagagagctggaggccatggagaaggaggtggccagactgcagaccgaggcctgcagactgggccagctgcaccccgccgcccccggcggcctggccaaggtgcaggaggcctgggccaccctgcaggccaaggcccaggagagaggccagtggctggcccaggccgcccagggccacgccttcctgggcagatgccaggagctgctggcctgggcccaggagagacaggagctggccagcagcgaggagctggccgaggacgtggccggcgccgagcagctgctgggccagcacgaggagctgggccaggagatcagagagtgcagactgcaggcccaggacctgagacaggagggccagcagctggtggacaacagccacttcatgagcgccgaggtgaccgagtgcctgcaggagctggagggcagactgcaggagctggaggaggcctgggccctgagatggcagagatgcgccgagagctggggcctgcagaagctgagacagagactggagcaggccgaggcctggctggcctgctgggagggcctgctgctgaagcccgactacggccacagcgtgagcgacgtggagctgctgctgcacagacaccaggacctggagaagctgctggccgcccaggaggagaagttcgcccagatgcagaagaccgagatggagcaggagctgctgctgcagccccaggagctgaagcccggcagagccggcagcagcctgaccagcttccagtggagacccagcggccaccagggcctgggcgcccagctggccgagaccagagacccccaggacgccaagggcacccccaccatggagggcagcctggagttcaagcagcacctgctgcccggcggcagacagcccagcagcagcagctgggacagctgcagaggcaacctgcagggcagcagcctgagcctgttcctggacgagagaatggccgccgagaaggtggccagcatcgccctgctggacctgaccggcgccagatgcgagagactgagaggcagacacggcagaaagcacaccttcagcctgagactgaccagcggcgccgagatcctgttcgccgcccccagcgaggagcaggccgagagctggtggagagccctgggcagcaccgccgcccagagcctgagccccaagctgaaggccaagcccgtgagcagcctgaacgagtgcaccaccaaggacgccagacccggctgcctgctgagaagcgacccctag

SEQ ID NO: 100520 - DNA, 942 bp, synthetic construct
  misc_feature 1..942: note = Description of Artificial Sequence: Synthetic coding sequence
  source 1..942: mol_type = other DNA
atgagacacaaccagatgtgctgcgagaccccccccaccgtgaccgtgtacgtgaagagcggcagcaacagaagccaccagcccaagaagcccatcaccctgaagagacccatctgcaaggacaactggcaggccttcgagaagaacacccacaacaacaacaagagcaagagacccaagggcccctgcctggtgatccagagacaggacatgaccgccttcttcaagctgttcgacgacgacctgatccaggacttcctgtggatggactgctgctgcaagatcgccgacaagtacctgctggccatgaccttcgtgtacttcaagagagccaagttcaccatcagcgagcacaccagaatcaacttcttcatcgccctgtacctggccaacaccgtggaggaggacgaggaggagaccaagtacgagatcttcccctgggccctgggcaagaactggagaaagctgttccccaacttcctgaagctgagagaccagctgtgggacagaatcgactacagagccatcgtgagcagaagatgctgcgaggaggtgatggccatcgcccccacccactacatctggcagagagagagaagcgtgcaccacagcggcgccgtgagaaactacaacagagacgaggtgcagctgcccagaggccccagcgccacccccgtggactgcagcctgtgcggcaagaagagaagatacgtgagactgggcctgagcagcagcagcagcctgagcagccacaccgccggcgtgaccgagaagcacagccaggacagctacaacagcctgagcatggacatcatcggcgaccccagccaggcctacaccggcagcgaggtggtgaacgaccaccagagcaacaagggcaagaagaccaacttcctgaagaaggacaagagcatggagtggttcaccggcagcgaggagtag

SEQ ID NO: 100521 - DNA, 942 bp, synthetic construct; identical to SEQ ID NO: 100520
  misc_feature 1..942: note = Description of Artificial Sequence: Synthetic coding sequence
  source 1..942: mol_type = other DNA

SEQ ID NO: 100522 - DNA, 384 bp, synthetic construct
  misc_feature 1..384: note = Description of Artificial Sequence: Synthetic coding sequence
  source 1..384: mol_type = other DNA
atgagacacaaccagatgtgctgcgagaccccccccaccgtgaccgtgtacgtgaagagcggcagcaacagaagccaccagcccaagaagcccatcaccctgaagagacccatctgcaaggacaactggcaggccttcgagaagaacacccacaacaacaacaagagcaagagacccaagggcccctgcctggtgatccagagacaggacatgaccgccttcttcaagctgttcgacgacgacctgatccaggacttcctgtggatggactgctgctgcaagatcgccgacaagtacctgctggccatgaccttcgtgtacttcaagagagccaagttcaccatcagcgagcacaccagaatcaacttcttcatcgccctgtag

SEQ ID NO: 100523 - DNA, 882 bp, synthetic construct
  misc_feature 1..882: note = Description of Artificial Sequence: Synthetic coding sequence
  source 1..882: mol_type = other DNA
atgctgtgggccatccccgagctgggcagcccctgccccatcagcatcagctacgagatgagcgacagccaggaccccaccaccagccccgtggtgaccacccaggtggagctgggcggctgcagcagacagggcggcggcaacggcttcctgagattcagacagcaccaggaggtgcaggccttcctgagcctgctggaggacagcttcgtgcaggagttcctgagcaaggacccctgcttccagatcagcgacaagtacctgctggccatggtgctggtgtacttccagagagcccacctgaagctgagcgagtacacccacagcagcctgttcctggccctgtacctggccaacgacatggaggaggacctggagggccccaagtgcgagatcttcccctgggccctgggcaaggactggtgcctgagagtgggcaagttcctgcaccagagagacaagctgtgggccagaatgggcttcagagccgtggtgagcagacagtgctgcgaggaggtgatggccaaggagcccttccactgggcctggaccagagacagaagaccccaccacggcggcgtgcagagagtgtgcccccaggtgcccgtgagactgcccagaggccccggcctgagccccccccactgcagcccctgcggcctgccccagcactgcagcagccacctgctgaagcccgtgagcagcaagtgccccagcctgaccagcgagtgccacagaccccccagccagaactacctgagcagagtgaagaacgcctggggcggcgacttcctgatcgtgctgcccccccagatgcagctggagcccggcacctacagcctgagaatcttccccaagccccccgccagacccggccactag

SEQ ID NO: 100524 - DNA, 1122 bp, synthetic construct
  misc_feature 1..1122: note = Description of Artificial Sequence: Synthetic coding sequence
  source 1..1122: mol_type = other DNA
atgaacgtggacaagttcctgatcgtgtgctacctgaagaaggaggtgtggggcttcgagagctacagcctgagcggcaccacctgcttccagtggaactacttcgtgtggagcctgagattcttcttcagctgcggcagcagcaagtaccacctgacccccctgcccatcaagaaggtggactacccccacaagagaggccagaactggggcagctacgtgcacaacagcctgcccagattcaactgggactacagaagctgcttccacacctggaagagagccagcgacaacagagagagagcctacgagcacagcgcctacggccaccacgagagaggcaccggcggcttcgacagaaccagacactacgaccaggactactacagagaccccagagagagaaccctgcagcacggcctgtactacgccagcagaagcagaagccccaacagattcgacgcccacgaccccagatacgagcccagagccagagagcagttcaccctgcccagcgtggtgcacagagacatctacagagacgacatcaccagagaggtgagaggcagaagacccgagagaaactaccagcacagcagaagcagaagcccccacagcagccagagcagaaaccagagcccccagagactggccagccaggccagcagacccaccagaagccccagcggcagcggcagcagaagcagaagcagcagcagcgacagcatcagcagcagcagcagcaccagcagcgacagcagcgacagcagcagcagcagcagcgacgacagccccgccagaagcgtgcagagcgccgccgtgcccgcccccaccagccagctgctgagcagcctggagaaggacgagcccagaaagagcttcggcatcaaggtgcagaacctgcccgtgagaagcaccgacaccagcctgaaggacggcctgttccacgagttcaagaagttcggcaaggtgaccagcgtgcagatccacggcaccagcgaggagagatacggcctggtgttcttcagacagcaggaggaccaggagaaggccctgaccgccagcaagggcaagctgttcttcggcatgcagatcgaggtgaccgcctggatcggcccctag

SEQ ID NO: 100525 - DNA, 10995 bp, synthetic construct
  misc_feature 1..10995: note = Description of Artificial Sequence: Synthetic coding sequence
  source 1..10995: mol_type = other DNA
atggtgagagagaccagacacctgtgggtgggcaacctgcccgagaacgtgagagaggagaagatcatcgagcacttcaagagatacggcagagtggagagcgtgaagatcctgcccaagagaggcagcgagggcggcgtggccgccttcgtggacttcgtggacatcaagagcgcccagaaggcccacaacagcgtgaacaagatgggcgacagagacctgagaaccgactacaacgagcccggcaccatccccagcgccgccagaggcctggacgacaccgtgagcatcgccagcagaagcagagaggtgagcggcttcagaggcggcggcggcggccccgcctacggccccccccccagcctgcacgccagagagggcagatacgagagaagactggacggcgccagcgacaacagagagagagcctacgagcacagcgcctacggccaccacgagagaggcaccggcggcttcgacagaaccagacactacgaccaggactactacagagaccccagagagagaaccctgcagcacggcctgtactacgccagcagaagcagaagccccaacagattcgacgcccacgaccccagatacgagcccagagccagagagcagttcaccctgcccagcgtggtgcacagagacatctacagagacgacatcaccagagaggtgagaggcagaagacccgagagaaactaccagcacagcagaagcagaagcccccacagcagccagagcagaaaccagagcccccagagactggccagccaggccagcagacccaccagaagccccagcggcagcggcagcagaagcagaagcagcagcagcgacagcatcagcagcagcagcagcaccagcagcgacagcagcgacagcagcagcagcagcagcgacgacagccccgccagaagcgtgcagagcgccgccgtgcccgcccccaccagccagctgctgagcagcctggagaaggacgagcccagaaagagcttcggcatcaaggtgcagaacctgcccgtgagaagcaccgacaccagcctgaaggacggcctgttccacgagttcaagaagttcggcaaggtgaccagcgtgcagatccacggcaccagcgaggagagatacggcctggtgttcttcagacagcaggaggaccaggagaaggccctgaccgccagcaagggcaagctgttcttcggcatgcagatcgaggtgaccgcctggatcggccccgagaccgagagcgagaacgagttcagacccctggacgagagaatcgacgagttccaccccaaggccaccagaaccctgttcatcggcaacctggagaagaccaccacctaccacgacctgagaaacatcttccagagattcggcgagatcgtggacatcgacatcaagaaggtgaacggcgtgccccagtacgccttcctgcagtactgcgacatcgccagcgtgtgcaaggccatcaagaagatggacggcgagtacctgggcaacaacagactgaagctgggcttcggcaagagcatgcccaccaactgcgtgtggctggacggcctgagcagcaacgtgagcgaccagtacctgaccagacacttctgcagatacggccccgtggtgaaggtggtgttcgacagactgaagggcatggccctggtgctgtacaacgagatcgagtacgcccaggccgccgtgaaggagaccaagggcagaaagatcggcggcaacaagatcaaggtggacttcgccaacagagagagccagctggccttctaccactgcatggagaagagcggccaggacatcagagacttctacgagatgctggccgagagaagagaggagagaagagccagctacgactacaaccaggacagaacctactacgagagcgtgagaacccccggcacctaccccgaggacagcagaagagactaccccgccagaggcagagagttctacagcgagtgggagacctaccagggcgactactacgagagcagatactacgacgaccccagagagtacagagactacagaaacgacccctacgagcaggacatcagagagtacagctacagacagagagagagagagagagagagagagagattcgagagcgacagagacagagaccacgagagaagacccatcgagagaagccagagccccgtgcacctgagaagaccccagagccccggcgccagccccagccaggccgagagactgcccagcgacagcgagagaagactgtacagcagaagcagcgacagaagcggcagctgcagcagcctgagcccccccagatacgagaagctggacaagagcagactggagagatacaccaagaacgagaagaccgacaaggagagaaccttcgaccccgagagagtggagagagagagaagactgatcagaaaggagaaggtggagaaggacaagaccgacaagcagaagagaaagggcaaggtgcacagccccagcagccagagcagcgagaccgaccaggagaacgagagagagcagagccccgagaagcccagaagctgcaacaagctgagcagagagaaggccgacaaggagggcatcgccaagaacagactggagctgatgccctgcgtggtgctgaccagagtgaaggagaaggagggcaaggtgatcgaccacacccccgtggagaagctgaaggccaagctggacaacgacaccgtgaagagcagcgccctggaccagaagctgcaggtgagccagaccgagcccgccaagagcgacctgagcaagctggagagcgtgagaatgaaggtgcccaaggagaagggcctgagcagccacgtggaggtggtggagaaggagggcagactgaaggccagaaagcacctgaagcccgagcagcccgccgacggcgtgagcgccgtggacctggagaagctggaggccagaaagagaagattcgccgacagcaacctgaaggccgagaagcagaagcccgaggtgaagaagagcagccccgagatggaggacgccagagtgctgagcaagaagcagcccgacgtgagcagcagagaggtgatcctgctgagagagggcgaggccgagagaaagcccgtgagaaaggagatcctgaagagagagagcaagaagatcaagctggacagactgaacaccgtggccagccccaaggactgccaggagctggccagcatcagcgtgggcagcggcagcagacccagcagcgacctgcaggccagactgggcgagctggccggcgagagcgtggagaaccaggaggtgcagagcaagaagcccatccccagcaagccccagctgaagcagctgcaggtgctggacgaccagggccccgagagagaggacgtgagaaagaactactgcagcctgagagacgagacccccgagagaaagagcggccaggagaagagccacagcgtgaacaccgaggagaagatcggcatcgacatcgaccacacccagagctacagaaagcagatggagcagagcagaagaaagcagcagatggagatggagatcgccaagagcgagaagttcggcagccccaagaaggacgtggacgagtacgagagaagaagcctggtgcacgaggtgggcaagcccccccaggacgtgaccgacgacagcccccccagcaagaagaagagaatggaccacgtggacttcgacatctgcaccaagagagagagaaactacagaagcagcagacagatcagcgaggacagcgagagaaccggcggcagccccagcgtgagacacggcagcttccacgaggacgaggaccccatcggcagccccagactgctgagcgtgaagggcagccccaaggtggacgagaaggtgctgccctacagcaacatcaccgtgagagaggagagcctgaagttcaacccctacgacagcagcagaagagagcagatggccgacatggccaagatcaagctgagcgtgctgaacagcgaggacgagctgaacagatgggacagccagatgaagcaggacgccggcagattcgacgtgagcttccccaacagcatcatcaagagagacagcctgagaaagagaagcgtgagagacctggagcccggcgaggtgcccagcgacagcgacgaggacggcgagcacaagagccacagccccagagccagcgccctgtacgagagcagcagactgagcttcctgctgagagacagagaggacaagctgagagagagagacgagagactgagcagcagcctggagagaaacaagttctacagcttcgccctggacaagaccatcacccccgacaccaaggccctgctggagagagccaagagcctgagcagcagcagagaggagaactggagcttcctggactgggacagcagattcgccaacttcagaaacaacaaggacaaggagaaggtggacagcgcccccagacccatccccagctggtacatgaagaagaagaagatcagaaccgacagcgagggcaagatggacgacaagaaggaggaccacaaggaggaggagcaggagagacaggagctgttcgccagcagattcctgcacagcagcatcttcgagcaggacagcaagagactgcagcacctggagagaaaggaggaggacagcgacttcatcagcggcagaatctacggcaagcagaccagcgagggcgccaacagcaccaccgacagcatccaggagcccgtggtgctgttccacagcagattcatggagctgaccagaatgcagcagaaggagaaggagaaggaccagaagcccaaggaggtggagaagcaggaggacaccgagaaccaccccaagacccccgagagcgcccccgagaacaaggacagcgagctgaagaccccccccagcgtgggcccccccagcgtgaccgtggtgaccctggagagcgcccccagcgccctggagaagaccaccggcgacaagaccgtggaggcccccctggtgaccgaggagaagaccgtggagcccgccaccgtgagcgaggaggccaagcccgccagcgagcccgcccccgcccccgtggagcagctggagcaggtggacctgccccccggcgccgaccccgacaaggaggccgccatgatgcccgccggcgtggaggagggcagcagcggcgaccagcccccctacctggacgccaagccccccacccccggcgccagcttcagccaggccgagagcaacgtggaccccgagcccgacagcacccagcccctgagcaagcccgcccagaagagcgaggaggccaacgagcccaaggccgagaagcccgacgccaccgccgacgccgagcccgacgccaaccagaaggccgaggccgcccccgagagccagccccccgccagcgaggacctggaggtggacccccccgtggccgccaaggacaagaagcccaacaagagcaagagaagcaagacccccgtgcaggccgccgccgtgagcatcgtggagaagcccgtgaccagaaagagcgagagaatcgacagagagaagctgaagagaagcaacagccccagaggcgaggcccagaagctgctggagctgaagatggaggccgagaagatcaccagaaccgccagcaagaacagcgccgccgacctggagcaccccgagcccagcctgcccctgagcagaaccagaagaagaaacgtgagaagcgtgtacgccaccatgggcgaccacgagaacagaagccccgtgaaggagcccgtggagcagcccagagtgaccagaaagagactggagagagagctgcaggaggccgccgccgtgcccaccacccccagaagaggcagaccccccaagaccagaagaagagccgacgaggaggaggagaacgaggccaaggagcccgccgagaccctgaagccccccgagggctggagaagccccagaagccagaagaccgccgccggcggcggcccccagggcaagaagggcaagaacgagcccaaggtggacgccaccagacccgaggccaccaccgaggtgggcccccagatcggcgtgaaggagagcagcatggagcccaaggccgccgaggaggaggccggcagcgagcagaagagagacagaaaggacgccggcaccgacaagaacccccccgagaccgcccccgtggaggtggtggagaagaagcccgcccccgagaagaacagcaagagcaagagaggcagaagcagaaacagcagactggccgtggacaagagcgccagcctgaagaacgtggacgccgccgtgagccccagaggcgccgccgcccaggccggcgagagagagagcggcgtggtggccgtgagccccgagaagagcgagagcccccagaaggaggacggcctgagcagccagctgaagagcgaccccgtggaccccgacaaggagcccgagaaggaggacgtgagcgccagcggccccagccccgaggccacccagctggccaagcagatggagctggagcaggccgtggagcacatcgccaagctggccgaggccagcgccagcgccgcctacaaggccgacgcccccgagggcctggcccccgaggacagagacaagcccgcccaccaggccagcgagaccgagctggccgccgccatcggcagcatcatcaacgacatcagcggcgagcccgagaacttccccgccccccccccctaccccggcgagagccagaccgacctgcagccccccgccggcgcccaggccctgcagcccagcgaggagggcatggagaccgacgaggccgtgagcggcatcctggagaccgaggccgccaccgagagcagcagaccccccgtgaacgcccccgaccccagcgccggccccaccgacaccaaggaggccagaggcaacagcagcgagaccagccacagcgtgcccgaggccaagggcagcaaggaggtggaggtgaccctggtgagaaaggacaagggcagacagaagaccaccagaagcagaagaaagagaaacaccaacaagaaggtggtggcccccgtggagagccacgtgcccgagagcaaccaggcccagggcgagagccccgccgccaacgagggcaccaccgtgcagcaccccgaggccccccaggaggagaagcagagcgagaagccccacagcacccccccccagagctgcaccagcgacctgagcaagatccccagcaccgagaacagcagccaggagatcagcgtggaggagagaacccccaccaaggccagcgtgccccccgacctgcccccccccccccagcccgcccccgtggacgaggagccccaggccagattcagagtgcacagcatcatcgagagcgaccccgtgaccccccccagcgaccccagcatccccatccccaccctgcccagcgtgaccgccgccaagctgagcccccccgtggccagcggcggcatcccccaccagagcccccccaccaaggtgaccgagtggatcaccagacaggaggagcccagagcccagagcacccccagccccgccctgccccccgacaccaaggccagcgacgtggacaccagcagcagcaccctgagaaagatcctgatggaccccaagtacgtgagcgccaccagcgtgaccagcaccagcgtgaccaccgccatcgccgagcccgtgagcgccgccccctgcctgcacgaggccccccccccccccgtggacagcaagaagcccctggaggagaagaccgccccccccgtgaccaacaacagcgagatccaggccagcgaggtgctggtggccgccgacaaggagaaggtggcccccgtgatcgcccccaagatcaccagcgtgatcagcagaatgcccgtgagcatcgacctggagaacagccagaagatcaccctggccaagcccgccccccagaccctgaccggcctggtgagcgccctgaccggcctggtgaacgtgagcctggtgcccgtgaacgccctgaagggccccgtgaagggcagcgtgaccaccctgaagagcctggtgagcacccccgccggccccgtgaacgtgctgaagggccccgtgaacgtgctgaccggccccgtgaacgtgctgaccacccccgtgaacgccaccgtgggcaccgtgaacgccgcccccggcaccgtgaacgccgccgccagcgccgtgaacgccaccgccagcgccgtgaccgtgaccgccggcgccgtgaccgccgccagcggcggcgtgaccgccaccaccggcaccgtgaccatggccggcgccgtgatcgcccccagcaccaagtgcaagcagagagccagcgccaacgagaacagcagattccaccccggcagcatgcccgtgatcgacgacagacccgccgacgccggcagcggcgccggcctgagagtgaacaccagcgagggcgtggtgctgctgagctacagcggccagaagaccgagggcccccagagaatcagcgccaagatcagccagatcccccccgccagcgccatggacatcgagttccagcagagcgtgagcaagagccaggtgaagcccgacagcgtgaccgccagccagccccccagcaagggcccccaggcccccgccggctacgccaacgtggccacccacagcaccctggtgctgaccgcccagacctacaacgccagccccgtgatcagcagcgtgaaggccgacagacccagcctggagaagcccgagcccatccacctgagcgtgagcacccccgtgacccagggcggcaccgtgaaggtgctgacccagggcatcaacaccccccccgtgctggtgcacaaccagctggtgctgacccccagcatcgtgaccaccaacaagaagctggccgaccccgtgaccctgaagatcgagaccaaggtgctgcagcccgccaacctgggcagcaccctgaccccccaccacccccccgccctgcccagcaagctgcccaccgaggtgaaccacgtgcccagcggccccagcatccccgccgacagaaccgtgagccacctggccgccgccaagctggacgcccacagccccagacccagcggccccggccccagcagcttccccagagccagccaccccagcagcaccgccagcaccgccctgagcaccaacgccaccgtgatgctggccgccggcatccccgtgccccagttcatcagcagcatccaccccgagcagagcgtgatcatgcccccccacagcatcacccagaccgtgagcctgagccacctgagccagggcgaggtgagaatgaacacccccaccctgcccagcatcacctacagcatcagacccgaggccctgcacagccccagagcccccctgcagccccagcagatcgaggtgagagccccccagagagccagcaccccccagcccgcccccgccggcgtgcccgccctggccagccagcacccccccgaggaggaggtgcactaccacctgcccgtggccagagccaccgcccccgtgcagagcgaggtgctggtgatgcagagcgagtacagactgcacccctacaccgtgcccagagacgtgagaatcatggtgcacccccacgtgaccgccgtgagcgagcagcccagagccgccgacggcgtggtgaaggtgccccccgccagcaaggccccccagcagcccggcaaggaggccgccaagacccccgacgccaaggccgcccccacccccacccccgcccccgtgcccgtgcccgtgcccctgcccgcccccgcccccgccccccacggcgaggccagaatcctgaccgtgacccccagcaaccagctgcagggcctgcccctgaccccccccgtggtggtgacccacggcgtgcagatcgtgcacagcagcggcgagctgttccaggagtacagatacggcgacatcagaacctaccacccccccgcccagctgacccacacccagttccccgccgccagcagcgtgggcctgcccagcagaaccaagaccgccgcccagggccccccccccgagggcgagcccctgcagcccccccagcccgtgcagagcacccagcccgcccagcccgcccccccctgcccccccagccagctgggccagcccggccagccccccagcagcaagatgccccaggtgagccaggaggccaagggcacccagaccggcgtggagcagcccagactgcccgccggccccgccaacagaccccccgagccccacacccaggtgcagagagcccaggccgagaccggccccaccagcttccccagccccgtgagcgtgagcatgaagcccgacctgcccgtgagcctgcccacccagaccgcccccaagcagcccctgttcgtgcccaccaccagcggccccagcaccccccccggcctggtgctgccccacaccgagttccagcccgcccccaagcaggacagcagcccccacctgaccagccagagacccgtggacatggtgcagctgctgaagaagtaccccatcgtgtggcagggcctgctggccctgaagaacgacaccgccgccgtgcagctgcacttcgtgagcggcaacaacgtgctggcccacagaagcctgcccctgagcgagggcggcccccccctgagaatcgcccagagaatgagactggaggccacccagctggagggcgtggccagaagaatgaccgtggagaccgactactgcctgctgctggccctgccctgcggcagagaccaggaggacgtggtgagccagaccgagagcctgaaggccgccttcatcacctacctgcaggccaagcaggccgccggcatcatcaacgtgcccaaccccggcagcaaccagcccgcctacgtgctgcagatcttccccccctgcgagttcagcgagagccacctgagcagactggcccccgacctgctggccagcatcagcaacatcagcccccacctgatgatcgtgatcgccagcgtgtag

SEQ ID NO: 100526 - DNA, 1122 bp, synthetic construct; identical to SEQ ID NO: 100524
  misc_feature 1..1122: note = Description of Artificial Sequence: Synthetic coding sequence
  source 1..1122: mol_type = other DNA

SEQ ID NO: 100527 - DNA, 894 bp, synthetic construct
  misc_feature 1..894: note = Description of Artificial Sequence: Synthetic coding sequence
  source 1..894: mol_type = other DNA
tgacaggccagcagacccaccagaagccccagcggcagcggcagcagaagcagaagcagcagcagcgacagcatcagcagcagcagcagcaccagcagcgacagcgacagcagcagcagcagcagcgacgacagccccgccagaagcgtgcagagcgccgccgtgcccgcccccaccagccagctgctgagcagcctggagaaggacgagcccagaaagagcttcggcatcaaggtgcagaacctgcccgtgagaagcaccgacaccagcctgaaggacggcctgttccacgagttcaagaagttcggcaaggtgaccagcgtgcagatccacggcaccagcgaggagagatacggcctggtgttcttcagacagcaggaggaccaggagaaggccctgaccgccagcaagggcaagctgttcttcggcatgcagatcgaggtgaccgcctggatcggccccgagaccgagagcgagaacgagttcagacccctggacgagagaatcgacgagttccaccccaaggccaccagaaccctgttcatcggcaacctggagaagaccaccacctaccacgacctgagaaacatcttccagagattcggcgagatcgtggacatcgacatcaagaaggtgaacggcgtgccccagtacgccttcctgcagtactgcgacatcgccagcgtgtgcaaggccatcaagaagatggacggcgagtacctgggcaacaacagactgaagctgggcttcggcaagagcatgcccaccaactgcgtgtggctggacggcctgagcagcaacgtgagcgaccagtacctgaccagacacttctgcagatacggccccgtggtgaaggtggtgttcgacagactgaagggcatggccctggtgtag

SEQ ID NO: 100528 - DNA, 885 bp, synthetic construct
  misc_feature 1..885: note = Description of Artificial Sequence: Synthetic coding sequence
  source 1..885: mol_type = other DNA
atgagccccagaggcaccggctgcagcgccggcctgctgatgaccgtgggctggctgctgctggccggcctgcagagcgccagaggcaccaacgtgaccgccgccgtgcaggacgccggcctggcccacgagggcgagggcgaggaggagaccgagaacaacgacagcgagaccgccgagaactacgccccccccgagaccgaggacgtgagcaacagaaacgtggtgaaggaggtggagttcggcatgtgcaccgtgacctgcggcatcggcgtgagagaggtgatcctgaccaacggctgccccggcggcgagagcaagtgcgtggtgagagtggaggagtgcagaggccccaccgactgcggctggggcaagcccatcagcgagagcctggagagcgtgagactggcctgcatccacaccagccccctgaacagattcaagtacatgtggaagctgctgagacaggaccagcagagcatcatcctggtgaacgacagcgccatcctggaggtgagaaaggagagccaccccctggccttcgagtgcgacaccctggacaacaacgagatcgtggccaccatcaagttcaccgtgtacaccagcagcgagctgcagatgagaagaagcagcctgcccgccaccgacgccgccctgatcttcgtgctgaccatcggcgtgatcatctgcgtgttcatcatcttcctgctgatcttcatcatcatcaactgggccgccgtgaaggccttctggggcgccaaggccagcacccccgaggtgcagagcgagcagagcagcgtgagatacaaggacagcaccagcctggaccagctgcccaccgagatgcccggcgaggacgacgccctgagcgagtggaacgagtag

SEQ ID NO: 100529 - DNA, 648 bp, synthetic construct
  misc_feature 1..648: note = Description of Artificial Sequence: Synthetic coding sequence
  source 1..648: mol_type = other DNA
atggtgagcgccctgagaggcgcccccctgatcagagtgcacagcagccccgtgagcagccccagcgtgagcggccccagaagactggtgagctgcctgagcagccagagcagcgccctgagccagagcggcggcggcagcaccagcgccgccggcatcgaggccagaagcagagccctgagaagaagatggtgccccgccggcatcatgctgctggccctggtgtgcctgctgagctgcctgctgcccagcagcgaggccaagctgtacggcagatgcgagctggccagagtgctgcacgacttcggcctggacggctacagaggctacagcctggccgactgggtgtgcctggcctacttcaccagcggcttcaacgccgccgccctggactacgaggccgacggcagcaccaacaacggcatcttccagatcaacagcagaagatggtgcagcaacctgacccccaacgtgcccaacgtgtgcagaatgtactgcagcgacctgctgaaccccaacctgaaggacaccgtgatctgcgccatgaagatcacccaggagccccagggcctgggctactgggaggcctggagacaccactgccagggcaaggacctgaccgagtgggtggacggctgcgacttctag

SEQ ID NO: 100530 - DNA, 627 bp, synthetic construct
  misc_feature 1..627: note = Description of Artificial Sequence: Synthetic coding sequence
  source 1..627: mol_type = other DNA
atgatccaggaggaccacgagggcagccaggacggcggcgtgcacagcagccccgtgagcagccccagcgtgagcggccccagaagactggtgagctgcctgagcagccagagcagcgccctgagccagagcggcggcggcagcaccagcgccgccggcatcgaggccagaagcagagccctgagaagaagatggtgccccgccggcatcatgctgctggccctggtgtgcctgctgagctgcctgctgcccagcagcgaggccaagctgtacggcagatgcgagctggccagagtgctgcacgacttcggcctggacggctacagaggctacagcctggccgactgggtgtgcctggcctacttcaccagcggcttcaacgccgccgccctggactacgaggccgacggcagcaccaacaacggcatcttccagatcaacagcagaagatggtgcagcaacctgacccccaacgtgcccaacgtgtgcagaatgtactgcagcgacctgctgaaccccaacctgaaggacaccgtgatctgcgccatgaagatcacccaggagccccagggcctgggctactgggaggcctggagacaccactgccagggcaaggacctgacctag

SEQ ID NO: 100531 - DNA, 339 bp, synthetic construct
  misc_feature 1..339: note = Description of Artificial Sequence: Synthetic coding sequence
  source 1..339: mol_type = other DNA
atggtgagcgccctgagaggcgcccccctgatcagagtgtgcctggcctacttcaccagcggcttcaacgccgccgccctggactacgaggccgacggcagcaccaacaacggcatcttccagatcaacagcagaagatggtgcagcaacctgacccccaacgtgcccaacgtgtgcagaatgtactgcagcgacctgctgaaccccaacctgaaggacaccgtgatctgcgccatgaagatcacccaggagccccagggcctgggctactgggaggcctggagacaccactgccagggcaaggacctgaccgagtgggtggacggctgcgacttctag

SEQ ID NO: 100532 - DNA, 372 bp, synthetic construct
  misc_feature 1..372: note = Description of Artificial Sequence: Synthetic coding sequence
  source 1..372: mol_type = other DNA
atgaccagcggctggaccgacaccggcgacaccgcctggctgaccgcctacgccctgccctacgccggcgtgtgcctggcctacttcaccagcggcttcaacgccgccgccctggactacgaggccgacggcagcaccaacaacggcatcttccagatcaacagcagaagatggtgcagcaacctgacccccaacgtgcccaacgtgtgcagaatgtactgcagcgacctgctgaaccccaacctgaaggacaccgtgatctgcgccatgaagatcacccaggagccccagggcctgggctactgggaggcctggagacaccactgccagggcaaggacctgaccgagtgggtggacggctgcgacttctag

SEQ ID NO: 100533 - DNA, 375 bp, synthetic construct
  misc_feature 1..375: note = Description of Artificial Sequence: Synthetic coding sequence
  source 1..375: mol_type = other DNA
atggtgctgtgctggctgctgctgctggtgatggccctgccccccggcaccaccggcgtgaaggactgcgtgttctgcgagctgaccgacagcatgcagtgccccggcacctacatgcactgcggcgacgacgaggactgcttcaccggccacggcgtggcccccggcaccggccccgtgatcaacaagggctgcctgagagccaccagctgcggcctggaggagcccgtgagctacagaggcgtgacctacagcctgaccaccaactgctgcaccggcagactgtgcaacagagcccccagcagccagaccgtgggcgccaccaccagcctggccctgggcctgggcatgctgctgccccccagactgctgtag

SEQ ID NO: 100534 - DNA, 480 bp, synthetic construct
  misc_feature 1..480: note = Description of Artificial Sequence: Synthetic coding sequence
  source 1..480: mol_type = other DNA
atgaaggcctggggcaccgtggtggtgaccctggccaccctgatggtggtgaccgtggacgccaagatctacgagagatgcgagctggccgccagactggagagagccggcctgaacggctacaagggctacggcgtgggcgactggctgtgcatggcccactacgagagcggcttcgacaccgccttcgtggaccacaaccccgacggcagcagcgagtacggcatcttccagctgaacagcgcctggtggtgcgacaacggcatcacccccaccaagaacctgtgccacatggactgccacgacctgctgaacagacacatcctggacgacatcagatgcgccaagcagatcgtgagcagccagaacggcctgagcgcctggaccagctggagactgcactgcagcggccacgacctgagcgagtggctgaagggctgcgacatgcacgtgaagatcgaccccaagatccacccctag

SEQ ID NO: 100535 - DNA, 480 bp, synthetic construct; identical to SEQ ID NO: 100534
  misc_feature 1..480: note = Description of Artificial Sequence: Synthetic coding sequence
  source 1..480: mol_type = other DNA

SEQ ID NO: 100536 - DNA, 3207 bp, synthetic construct
  misc_feature 1..3207: note = Description of Artificial Sequence: Synthetic coding sequence
  source 1..3207: mol_type = other DNA
atgagaagcgccgccaagccctggaaccccgccatcagagccggcggccacggccccgacagagtgagacccctgcccgccgccagcagcggcatgaagagcagcaagagcagcaccagcctggccttcgagagcagactgagcagactgaagagagccagcagcgaggacaccctgaacaagcccggcagcaccgccgccagcggcgtggtgagactgaagaagaccgccaccgccggcgccatcagcgagctgaccgagagcagactgagaagcggcaccggcgccttcaccaccaccaagagaaccggcatccccgcccccagagagttcagcgtgaccgtgagcagagagagaagcgtgcccagaggccccagcaaccccagaaagagcgtgagcagccccaccagcagcaacacccccacccccaccaagcacctgagaacccccagcaccaagcccaagcaggagaacgagggcggcgagaaggccgccctggagagccaggtgagagagctgctggccgaggccaaggccaaggacagcgagatcaacagactgagaagcgagctgaagaagtacaaggagaagagaaccctgaacgccgagggcaccgacgccctgggccccaacgtggacggcaccagcgtgagccccggcgacaccgagcccatgatcagagccctggaggagaagaacaagaacttccagaaggagctgagcgacctggaggaggagaacagagtgctgaaggagaagctgatctacctggagcacagccccaacagcgagggcgccgccagccacaccggcgacagcagctgccccaccagcatcacccaggagagcagcttcggcagccccaccggcaaccagatgagcagcgacatcgacgagtacaagaagaacatccacggcaacgccctgagaaccagcggcagcagcagcagcgacgtgaccaaggccagcctgagccccgacgccagcgacttcgagcacatcaccgccgagacccccagcagacccctgagcagcaccagcaaccccttcaagagcagcaagtgcagcaccgccggcagcagccccaacagcgtgagcgagctgagcctggccagcctgaccgagaagatccagaagatggaggagaaccaccacagcaccgccgaggagctgcaggccaccctgcaggagctgagcgaccagcagcagatggtgcaggagctgaccgccgagaacgagaagctggtggacgagaagaccatcctggagaccagcttccaccagcacagagagagagccgagcagctgagccaggagaacgagaagctgatgaacctgctgcaggagagagtgaagaacgaggagcccaccacccaggagggcaagatcatcgagctggagcagaagtgcaccggcatcctggagcagggcagattcgagagagagaagctgctgaacatccagcagcagctgacctgcagcctgagaaaggtggaggaggagaaccagggcgccctggagatgatcaagagactgaaggaggagaacgagaagctgaacgagttcctggagctggagagacacaacaacaacatgatggccaagaccctggaggagtgcagagtgaccctggagggcctgaagatggagaacggcagcctgaagagccacctgcagggcgagaagcagaaggccaccgaggccagcgccgtggagcagaccgccgagagctgcgaggtgcaggagatgctgaaggtggccagagccgagaaggacctgctggagctgagctgcaacgagctgagacaggagctgctgaaggccaacggcgagatcaagcacgtgagcagcctgctggccaaggtggagaaggactacagctacctgaaggagatctgcgaccaccaggccgagcagctgagcagaaccagcctgaagctgcaggagaaggccagcgagagcgacgccgagatcaaggacatgaaggagaccatcttcgagctggaggaccaggtggagcagcacagagccgtgaagctgcacaacaaccagctgatcagcgagctggagagcagcgtgatcaagctggaggagcagaagagcgacctggagagacagctgaagaccctgaccaagcagatgaaggaggagaccgaggagtggagaagattccaggccgacctgcagaccgccgtggtggtggccaacgacatcaagtgcgaggcccagcaggagctgagaaccgtgaagagaaagctgctggaggaggaggagaagaacgccagactgcagaaggagctgggcgacgtgcagggccacggcagagtggtgaccagcagagccgcccccccccccgtggacgaggagcccgagagcagcgaggtggacgccgccggcagatggcccggcgtgtgcgtgagcagaaccagccccaccccccccgagagcgccaccaccgtgaagagcctgatcaagagcttcgacctgggcagacccggcggcgccggccagaacatcagcgtgcacaagacccccagaagccccctgagcggcatccccgtgagaaccgcccccgccgccgccgtgagccccatgcagagacacagcacctacagcagcgtgagacccgccagcagaggcgtgacccagagactggacctgcccgacctgcccctgagcgacatcctgaagggcagaaccgagaccctgaagcccgacccccacctgagaaagagccccagcctggagagcctgagcagaccccccagcctgggcttcggcgacaccagactgctgagcgccagcaccagagcctggaagccccagagcaagctgagcgtggagagaaaggaccccctggccgccctggccagagagtacggcggcagcaagagaaacgccctgctgaagtggtgccagaagaagacccagggctacgccaacatcgacatcaccaacttcagcagcagctggagcgacggcctggccttctgcgccctgctgcacacctacctgcccgcccacatcccctaccaggagctgaacagccaggagaagaagagaaacctgctgctggccttcgaggccgccgagagcgtgggcatcaagcccagcctggagctgagcgagatgctgtacaccgacagacccgactggcagagcgtgatgcagtacgtggcccagatctacaagtacttcgagacctag

SEQ ID NO: 100537 - DNA, 2112 bp, synthetic construct
  misc_feature 1..2112: note = Description of Artificial Sequence: Synthetic coding sequence
  source 1..2112: mol_type = other DNA
atgggcaaccacagcggcagacccgaggaccccgagcccggcgccttcaccaccaccaagagaaccggcatccccgcccccagagagttcagcgtgaccgtgagcagagagagaagcgtgcccagaggccccagcaaccccagaaagagcgtgagcagccccaccagcagcaacacccccacccccaccaagcacctgagaacccccagcaccaagcccaagcaggagaacgagggcggcgagaaggccgccctggagagccaggtgagagagctgctggccgaggccaaggccaaggacagcgagatcaacagactgagaagcgagctgaagaagtacaaggagaagagaaccctgaacgccgagggcaccgacgccctgggccccaacgtggacggcaccagcgtgagccccggcgacaccgagcccatgatcagagccctggaggagaagaacaagaacttccagaaggagctgagcgacctggaggaggagaacagagtgctgaaggagaagctgatctacctggagcacagccccaacagcgagggcgccgccagccacaccggcgacagcagctgccccaccagcatcacccaggagagcagcttcggcagccccaccggcaaccagatgagcagcgacatcgacgagtacaagaagaacatccacggcaacgccctgagaaccagcggcagcagcagcagcgacgtgaccaaggccagcctgagccccgacgccagcgacttcgagcacatcaccgccgagacccccagcagacccctgagcagcaccagcaaccccttcaagagcagcaagtgcagcaccgccggcagcagccccaacagcgtgagcgagctgagcctggccagcctgaccgagaagatccagaagatggaggagaaccaccacagcaccgccgaggagctgcaggccaccctgcaggagctgagcgaccagcagcagatggtgcaggagctgaccgccgagaacgagaagctggtggacgagaagaccatcctggagaccagcttccaccagcacagagagagagccgagcagctgagccaggagaacgagaagctgatgaacctgctgcaggagagagtgaagaacgaggagcccaccacccaggagggcaagatcatcgagctggagcagaagtgcaccggcatcctggagcagggcagattcgagagagagaagctgctgaacatccagcagcagctgacctgcagcctgagaaaggtggaggaggagaaccagggcgccctggagatgatcaagagactgaaggaggagaacgagaagctgaacgagttcctggagctggagagacacaacaacaacatgatggccaagaccctggaggagtgcagagtgaccctggagggcctgaagatggagaacggcagcctgaagagccacctgcagggcgagaagcagaaggccaccgaggccagcgccgtggagcagaccgccgagagctgcgaggtgcaggagatgctgaaggtggccagagccgagaaggacctgctggagctgagctgcaacgagctgagacaggagctgctgaaggccaacggcgagatcaagcacgtgagcagcctgctggccaaggtggagaaggactacagctacctgaaggagatctgcgaccaccaggccgagcagctgagcagaaccagcctgaagctgcaggagaaggccagcgagagcgacgccgagatcaaggacatgaaggagaccatcttcgagctggaggaccaggtggagcagcacagagccgtgaagctgcacaacaaccagctgatcagcgagctggagagcagcgtgatcaagctggaggagcagaagagcgacctggagagacagctgaagaccctgaccaagcagatgaaggaggagaccgaggagtggagaagattccaggccgacctgcagaccgccgtggtggtggccaacgacatcaagtgcgaggcccagcaggagctgagaaccgtgaagagaaagctgctggaggaggaggagaagaacgccagactgcagaaggagctgggcgacgtgcagggccacggcagagtggtgaccagcagagccgcccccccctag

SEQ ID NO: 100538 - DNA, 2130 bp, synthetic construct
  misc_feature 1..2130: note = Description of Artificial Sequence: Synthetic coding sequence
  source 1..2130: mol_type = other DNA
atgggcaaccacagcggcagacccgaggaccccgagcccggcgccttcaccaccaccaagagaaccggcatccccgcccccagagagttcagcgtgaccgtgagcagagagagaagcgtgcccagaggccccagcaaccccagaaagagcgtgagcagccccaccagcagcaacacccccacccccaccaagcacctgagaacccccagcaccaagcccaagcaggagaacgagggcggcgagaaggccgccctggagagccaggtgagagagctgctggccgaggccaaggccaaggacagcgagatcaacagactgagaagcgagctgaagaagtacaaggagaagagaaccctgaacgccgagggcaccgacgccctgggccccaacgtggacggcaccagcgtgagccccggcgacaccgagcccatgatcagagccctggaggagaagaacaagaacttccagaaggagctgagcgacctggaggaggagaacagagtgctgaaggagaagctgatctacctggagcacagccccaacagcgagggcgccgccagccacaccggcgacagcagctgccccaccagcatcacccaggagagcagcttcggcagccccaccggcaaccagatgagcagcgacatcgacgagtacaagaagaacatccacggcaacgccctgagaaccagcggcagcagcagcagcgacgtgaccaaggccagcctgagccccgacgccagcgacttcgagcacatcaccgccgagacccccagcagacccctgagcagcaccagcaaccccttcaagagcagcaagtgcagcaccgccggcagcagccccaacagcgtgagcgagctgagcctggccagcctgaccgagaagatccagaagatggaggagaaccaccacagcaccgccgaggagctgcaggccaccctgcaggagctgagcgaccagcagcagatggtgcaggagctgaccgccgagaacgagaagctggtggacgagaagaccatcctggagaccagcttccaccagcacagagagagagccgagcagctgagccaggagaacgagaagctgatgaacctgctgcaggagagagtgaagaacgaggagcccaccacccaggagggcaagatcatcgagctggagcagaagtgcaccggcatcctggagcagggcagattcgagagagagaagctgctgaacatccagcagcagctgacctgcagcctgagaaaggtggaggaggagaaccagggcgccctggagatgatcaagagactgaaggaggagaacgagaagctgaacgagttcctggagctggagagacacaacaacaacatgatggccaagaccctggaggagtgcagagtgaccctggagggcctgaagatggagaacggcagcctgaagagccacctgcagggcgagaagcagaaggccaccgaggccagcgccgtggagcagaccgccgagagctgcgaggtgcaggagatgctgaaggtggccagagccgagaaggacctgctggagctgagctgcaacgagctgagacaggagctgctgaaggccaacggcgagatcaagcacgtgagcagcctgctggccaaggtggagaaggactacagctacctgaaggagatctgcgaccaccaggccgagcagctgagcagaaccagcctgaagctgcaggagaaggccagcgagagcgacgccgagatcaaggacatgaaggagaccatcttcgagctggaggaccaggtggagcagcacagagccgtgaagctgcacaacaaccagctgatcagcgagctggagagcagcgtgatcaagctggaggagcagaagagcgacctggagagacagctgaagaccctgaccaagcagatgaaggaggagaccgaggagtggagaagattccaggccgacctgcagaccgccgtggtggtggccaacgacatcaagtgcgaggcccagcaggagctgagaaccgtgaagagaaagctgctggaggaggaggagaagaacgccagactgcagaaggagctgggcgacgtgcagggccacggcagagtggtgaccagcagagccgccccccccagcctgggcagcgtgagctag

SEQ ID NO: 100539 - DNA, 2964 bp, synthetic construct
  misc_feature 1..2964: note = Description of Artificial Sequence: Synthetic coding sequence
  source 1..2964: mol_type = other DNA
atgggcaaccacagcggcagacccgaggaccccgagcccggcgccttcaccaccaccaagagaaccggcatccccgcccccagagagttcagcgtgaccgtgagcagagagagaagcgtgcccagaggccccagcaaccccagaaagagcgtgagcagccccaccagcagcaacacccccacccccaccaagcacctgagaacccccagcaccaagcccaagcaggagaacgagggcggcgagaaggccgccctggagagccaggtgagagagctgctggccgaggccaaggccaaggacagcgagatcaacagactgagaagcgagctgaagaagtacaaggagaagagaaccctgaacgccgagggcaccgacgccctgggccccaacgtggacggcaccagcgtgagccccggcgacaccgagcccatgatcagagccctggaggagaagaacaagaacttccagaaggagctgagcgacctggaggaggagaacagagtgctgaaggagaagctgatctacctggagcacagccccaacagcgagggcgccgccagccacaccggcgacagcagctgccccaccagcatcacccaggagagcagcttcggcagccccaccggcaaccagatgagcagcgacatcgacgagtacaagaagaacatccacggcaacgccctgagaaccagcggcagcagcagcagcgacgtgaccaaggccagcctgagccccgacgccagcgacttcgagcacatcaccgccgagacccccagcagacccctgagcagcaccagcaaccccttcaagagcagcaagtgcagcaccgccggcagcagccccaacagcgtgagcgagctgagcctggccagcctgaccgagaagatccagaagatggaggagaaccaccacagcaccgccgaggagctgcaggccaccctgcaggagctgagcgaccagcagcagatggtgcaggagctgaccgccgagaacgagaagctggtggacgagaagaccatcctggagaccagcttccaccagcacagagagagagccgagcagctgagccaggagaacgagaagctgatgaacctgctgcaggagagagtgaagaacgaggagcccaccacccaggagggcaagatcatcgagctggagcagaagtgcaccggcatcctggagcagggcagattcgagagagagaagctgctgaacatccagcagcagctgacctgcagcctgagaaaggtggaggaggagaaccagggcgccctggagatgatcaagagactgaaggaggagaacgagaagctgaacgagttcctggagctggagagacacaacaacaacatgatggccaagaccctggaggagtgcagagtgaccctggagggcctgaagatggagaacggcagcctgaagagccacctgcagggcgagaagcagaaggccaccgaggccagcgccgtggagcagaccgccgagagctgcgaggtgcaggagatgctgaaggtggccagagccgagaaggacctgctggagctgagctgcaacgagctgagacaggagctgctgaaggccaacggcgagatcaagcacgtgagcagcctgctggccaaggtggagaaggactacagctacctgaaggagatctgcgaccaccaggccgagcagctgagcagaaccagcctgaagctgcaggagaaggccagcgagagcgacgccgagatcaaggacatgaaggagaccatcttcgagctggaggaccaggtggagcagcacagagccgtgaagctgcacaacaaccagctgatcagcgagctggagagcagcgtgatcaagctggaggagcagaagagcgacctggagagacagctgaagaccctgaccaagcagatgaaggaggagaccgaggagtggagaagattccaggccgacctgcagaccgccgtggtggtggccaacgacatcaagtgcgaggcccagcaggagctgagaaccgtgaagagaaagctgctggaggaggaggagaagaacgccagactgcagaaggagctgggcgacgtgcagggccacggcagagtggtgaccagcagagccgcccccccccccgtggacgaggagcccgagagcagcgaggtggacgccgccggcagatggcccggcgtgtgcgtgagcagaaccagccccaccccccccgagagcgccaccaccgtgaagagcctgatcaagagcttcgacctgggcagacccggcggcgccggccagaacatcagcgtgcacaagacccccagaagccccctgagcggcatccccgtgagaaccgcccccgccgccgccgtgagccccatgcagagacacagcacctacagcagcgtgagacccgccagcagaggcgtgacccagagactggacctgcccgacctgcccctgagcgacatcctgaagggcagaaccgagaccctgaagcccgacccccacctgagaaagagccccagcctggagagcctgagcagaccccccagcctgggcttcggcgacaccagactgctgagcgccagcaccagagcctggaagccccagagcaagctgagcgtggagagaaaggaccccctggccgccctggccagagagtacggcggcagcaagagaaacgccctgctgaagtggtgccagaagaagacccagggctacgccaacatcgacatcaccaacttcagcagcagctggagcgacggcctggccttctgcgccctgctgcacacctacctgcccgcccacatcccctaccaggagctgaacagccaggagaagaagagaaacctgctgctggccttcgaggccgccgagagcgtgggcatcaagcccagcctggagctgagcgagatgctgtacaccgacagacccgactggcagagcgtgatgcagtacgtggcccagatctacaagtacttcgagacctag

SEQ ID NO: 100540 - DNA, 2373 bp, synthetic construct
  misc_feature 1..2373: note = Description of Artificial Sequence: Synthetic coding sequence
  source 1..2373: mol_type = other DNA
atgagaagcgccgccaagccctggaaccccgccatcagagccggcggccacggccccgacagagtgagacccctgcccgccgccagcagcggcatgaagagcagcaagagcagcaccagcctggccttcgagagcagactgagcagactgaagagagccagcagcgaggacaccctgaacaagcccggcagcaccgccgccagcggcgtggtgagactgaagaagaccgccaccgccggcgccatcagcgagctgaccgagagcagactgagaagcggcaccggcgccttcaccaccaccaagagaaccggcatccccgcccccagagagttcagcgtgaccgtgagcagagagagaagcgtgcccagaggccccagcaaccccagaaagagcgtgagcagccccaccagcagcaacacccccacccccaccaagcacctgagaacccccagcaccaagcccaagcaggagaacgagggcggcgagaaggccgccctggagagccaggtgagagagctgctggccgaggccaaggccaaggacagcgagatcaacagactgagaagcgagctgaagaagtacaaggagaagagaaccctgaacgccgagggcaccgacgccctgggccccaacgtggacggcaccagcgtgagccccggcgacaccgagcccatgatcagagccctggaggagaagaacaagaacttccagaaggagctgagcgacctggaggaggagaacagagtgctgaaggagaagctgatctacctggagcacagccccaacagcgagggcgccgccagccacaccggcgacagcagctgccccaccagcatcacccaggagagcagcttcggcagccccaccggcaaccagatgagcagcgacatcgacgagtacaagaagaacatccacggcaacgccctgagaaccagcggcagcagcagcagcgacgtgaccaaggccagcctgagccccgacgccagcgacttcgagcacatcaccgccgagacccccagcagacccctgagcagcaccagcaaccccttcaagagcagcaagtgcagcaccgccggcagcagccccaacagcgtgagcgagctgagcctggccagcctgaccgagaagatccagaagatggaggagaaccaccacagcaccgccgaggagctgcaggccaccctgcaggagctgagcgaccagcagcagatggtgcaggagctgaccgccgagaacgagaagctggtggacgagaagaccatcctggagaccagcttccaccagcacagagagagagccgagcagctgagccaggagaacgagaagctgatgaacctgctgcaggagagagtgaagaacgaggagcccaccacccaggagggcaagatcatcgagctggagcagaagtgcaccggcatcctggagcagggcagattcgagagagagaagctgctgaacatccagcagcagctgacctgcagcctgagaaaggtggaggaggagaaccagggcgccctggagatgatcaagagactgaaggaggagaacgagaagctgaacgagttcctggagctggagagacacaacaacaacatgatggccaagaccctggaggagtgcagagtgaccctggagggcctgaagatggagaacggcagcctgaagagccacctgcagggcgagaagcagaaggccaccgaggccagcgccgtggagcagaccgccgagagctgcgaggtgcaggagatgctgaaggtggccagagccgagaaggacctgctggagctgagctgcaacgagctgagacaggagctgctgaaggccaacggcgagatcaagcacgtgagcagcctgctggccaaggtggagaaggactacagctacctgaaggagatctgcgaccaccaggccgagcagctgagcagaaccagcctgaagctgcaggagaaggccagcgagagcgacgccgagatcaaggacatgaaggagaccatcttcgagctggaggaccaggtggagcagcacagagccgtgaagctgcacaacaaccagctgatcagcgagctggagagcagcgtgatcaagctggaggagcagaagagcgacctggagagacagctgaagaccctgaccaagcagatgaaggaggagaccgaggagtggagaagattccaggccgacctgcagaccgccgtggtggtggccaacgacatcaagtgcgaggcccagcaggagctgagaaccgtgaagagaaagctgctggaggaggaggagaagaacgccagactgcagaaggagctgggcgacgtgcagggccacggcagagtggtgaccagcagagccgccccccccagcctgggcagcgtgagctag

SEQ ID NO: 100541 - DNA, 3090 bp, synthetic construct
  misc_feature 1..3090: note = Description of Artificial Sequence: Synthetic coding sequence
  source 1..3090: mol_type = other DNA
atgagaagcgccgccaagccctggaaccccgccatcagagccggcggccacggccccgacagagtgagacccctgcccgccgccagcagcggcatgaagagcagcaagagcagcaccagcctggccttcgagagcagactgagcagactgaagagagccagcagcgaggacaccctgaacaagcccggcagcaccgccgccagcggcgtggtgagactgaagaagaccgccaccgccggcgccatcagcgagctgaccgagagcagactgagaagcggcaccggcgccttcaccaccaccaagagaaccggcatccccgcccccagagagttcagcgtgaccgtgagcagagagagaagcgtgcccagaggccccagcaaccccagaaagagcgtgagcagccccaccagcagcaacacccccacccccaccaagcacctgagaacccccagcaccaagcccaagcaggagaacgagggcggcgagaaggccgccctggagagccaggtgagagagctgctggccgaggccaaggccaaggacagcgagatcaacagactgagaagcgagctgaagaagtacaaggagaagagaaccctgaacgccgagggcaccgacgccctgggccccaacgtggacggcaccagcgtgagccccggcgacaccgagcccatgatcagagccctggaggagaagaacaagaacttccagaaggagctgagcgacctggaggaggagaacagagtgctgaaggagaagctgatctacctggagcacagccccaacagcgagggcgccgccagccacaccggcgacagcagctgccccaccagcatcacccaggagagcagcttcggcagccccaccggcaaccagatgagcagcgacatcgacgagtacaagaagaacatccacggcaacgccctgagaaccagcggcagcagcagcagcgacgtgaccaaggccagcctgagccccgacgccagcgacttcgagcacatcaccgccgagacccccagcagacccctgagcagcaccagcaaccccttcaagagcagcaagtgcagcaccgccggcagcagccccaacagcgtgagcgagctgagcctggccagcctgaccgagaagatccagaagatggaggagaaccaccacagcaccgccgaggagctgcaggccaccctgcaggagctgagcgaccagcagcagatggtgcaggagctgaccgccgagaacgagaagctggtggacgagaagaccatcctggagaccagcttccaccagcacagagagagagccgagcagctgagccaggagaacgagaagctgatgaacctgctgcaggagagagtgaagaacgaggagcccaccacccaggagggcaagatcatcgagctggagcagaagtgcaccggcatcctggagcagggcagattcgagagagagaagctgctgaacatccagcagcagctgacctgcagcctgagaaaggtggaggaggagaaccagggcgccctggagatgatcaagagactgaaggaggagaacgagaagctgaacgagttcctggagctggagagacacaacaacaacatgatggccaagaccctggaggagtgcagagtgaccctggagggcctgaagatggagaacggcagcctgaagagccacctgcagggcgagaagcagaaggccaccgaggccagcgccgtggagcagaccgccgagagctgcgaggtgcaggagatgctgaaggtggccagagccgagaaggacctgctggagctgagctgcaacgagctgagacaggagctgctgaaggccaacggcgagatcaagcacgtgagcagcctgctggccaaggtggagaaggactacagctacctgaaggagatctgcgaccaccaggccgagcagctgagcagaaccagcctgaagctgcaggagaaggccagcgagagcgacgccgagatcaaggacatgaaggagaccatcttcgagctggaggaccaggtggagcagcacagagccgtgaagctgcacaacaaccagctgatcagcgagctggagagcagcgtgatcaagctggaggagcagaagagcgacctggagagacagctgaagaccctgaccaagcagatgaaggaggagaccgaggagtggagaagattccaggccgacctgcagaccgccgtggtggtggccaacgacatcaagtgcgaggcccagcaggagctgagaaccgtgaagagaaagctgctggaggaggaggagaagaacgccagactgcagaaggagctgggcgacgtgcagggccacggcagagtggtgaccagcagagccgcccccccccccgtggacgaggagcccgagagcagcgaggtggacgccgccggcagatggcccggcgtgtgcgtgagcagaaccagccccaccccccccgagagcgccaccaccgtgaagagcctgatcaagagcttcgacctgggcagacccggcggcgccggccagaacatcagcgtgcacaagacccccagaagccccctgagcggcatccccgtgagaaccgcccccgccgccgccgtgagccccatgcagagacacagcacctacagcagcgtgagacccgccagcagaggcgtgacccagagactggacctgcccgacctgcccctgagcgacatcctgaagggcagaaccgagaccctgaagcccgacccccacctgagaaagagccccagcctggagagcctgagcagaccccccagcctgggcttcggcgacaccagactgctgagcgccagcaccagagcctggaagccccagagcaagctgagcgtggagagaaaggaccccctggccgccctggccagagagtacggcggcagcaagagaaacgccctgctgaagtggtgccagaagaagacccagggctacgccaagagaaacctgctgctggccttcgaggccgccgagagcgtgggcatcaagcccagcctggagctgagcgagatgctgtacaccgacagacccgactggcagagcgtgatgcagtacgtggcccagatctacaagtacttcgagacctag

SEQ ID NO: 100542 - DNA, 237 bp, synthetic construct
  misc_feature 1..237: note = Description of Artificial Sequence: Synthetic coding sequence
  source 1..237: mol_type = other DNA
atgagaagcgccgccaagccctggaaccccgccatcagagccggcggccacggccccgacagagtgagacccctgcccgccgccagcagcggcatgaagagcagcaagagcagcaccagcctggccttcgagagcagactgagcagactgaagagagccagcagcgaggacaccctgaacaagcccggcagcaccgccgccagcggcgtggtgagactgaagaagaccgccacctag

SEQ ID NO: 100543 - DNA, 1227 bp, synthetic construct
  misc_feature 1..1227: note = Description of Artificial Sequence: Synthetic coding sequence
  source 1..1227: mol_type = other DNA
atgaaggagaccatcttcgagctggaggaccaggtggagcagcacagagccgtgaagctgcacaacaaccagctgatcagcgagctggagagcagcgtgatcaagctggaggagcagaagagcgacctggagagacagctgaagaccctgaccaagcagatgaaggaggagaccgaggagtggagaagattccaggccgacctgcagaccgccgtggtggtggccaacgacatcaagtgcgaggcccagcaggagctgagaaccgtgaagagaaagctgctggaggaggaggagaagaacgccagactgcagaaggagctgggcgacgtgcagggccacggcagagtggtgaccagcagagccgcccccccccccgtggacgaggagcccgagagcagcgaggtggacgccgccggcagatggcccggcgtgtgcgtgagcagaaccagccccaccccccccgagagcgccaccaccgtgaagagcctgatcaagagcttcgacctgggcagacccggcggcgccggccagaacatcagcgtgcacaagacccccagaagccccctgagcggcatccccgtgagaaccgcccccgccgccgccgtgagccccatgcagagacacagcacctacagcagcgtgagacccgccagcagaggcgtgacccagagactggacctgcccgacctgcccctgagcgacatcctgaagggcagaaccgagaccctgaagcccgacccccacctgagaaagagccccagcctggagagcctgagcagaccccccagcctgggcttcggcgacaccagactgctgagcgccagcaccagagcctggaagccccagagcaagctgagcgtggagagaaaggaccccctggccgccctggccagagagtacggcggcagcaagagaaacgccctgctgaagtggtgccagaagaagacccagggctacgccaacatcgacatcaccaacttcagcagcagctggagcgacggcctggccttctgcgccctgctgcacacctacctgcccgcccacatcccctaccaggagctgaacagccaggagaagaagagaaacctgctgctggccttcgaggccgccgagagcgtgggcatcaagcccagcctggagctgagcgagatgctgtacaccgacagacccgactggcagagcgtgatgcagtacgtggcccagatctacaagtacttcgagacctag

SEQ ID NO: 100544 - DNA, 3354 bp, synthetic construct
  misc_feature 1..3354: note = Description of Artificial Sequence: Synthetic coding sequence
  source 1..3354: mol_type = other DNA
atgaagaaggccagcagaagcgtgggcagcgtgcccaaggtgagcgccatcagcaagacccagaccgccgagaagatcaagcccgagaacagcagcagcgccagcaccggcggcaagctggtgaagcccggcaccgccgccagcctgagcaagaccaagagcagcgacgacctgctggccggcatggccggcggcgtgaccgtgaccaacggcgtgaagggcaagaagagcacctgccccagcgccgcccccagcgccagcgcccccgccatgaccaccgtggagaacaagagcaagatcagcaccggcaccgccagcagcaccaagagaagcaccagcaccggcaacaaggagagcagcagcaccagagagagactgagagagagaaccagactgaaccagagcaagaagctgcccagcgccggccagggcgccaacgacatggccctggccaagagaagcagaagcagaaccgccaccgagtgcgacgtgagaatgagcaagagcaagagcgacaaccagatcagcgacagagccgccctggaggccaaggtgaaggacctgctgaccctggccaagaccaaggacgtggagatcctgcacctgagaaacgagctgagagacatgagagcccagctgggcatcaacgaggaccacagcgagggcgacgagaagagcgagaaggagaccatcatggcccaccagcccaccgacgtggagagcaccctgctgcagctgcaggagcagaacaccgccatcagagaggagctgaaccagctgaagaacgagaacagaatgctgaaggacagactgaacgccctgggcttcagcctggagcagagactggacaacagcgagaagctgttcggctaccagagcctgagccccgagatcacccccgacaaccagagcgacggcggcggcaccctgaccagcagcgtggagggcagcgcccccggcagcgtggaggacctgctgagccaggacgagaacaccctgatggaccaccagcacagcaacagcatggacaacctggacagcgagtgcagcgaggtgtaccagcccctgaccagcagcgacgacgccctggacgcccccagcagcagcgagagcgagggcatccccagcatcgagagaagcagaaagggcagcagcggcaacgccagcgaggtgagcgtggcctgcctgaccgagagaatccaccagatggaggagaaccagcacagcaccagcgaggagctgcaggccaccctgcaggagctggccgacctgcagcagatcacccaggagctgaacagcgagaacgagagactgggcgaggagaaggtgatcctgatggagagcctgtgccagcagagcgacaagctggagcacttcagcagacagatcgagtacttcagaagcctgctggacgagcaccacatcagctacgtgatcgacgaggacgtgaagagcggcagatacatggagctggagcagagatacatggacctggccgagaacgccagattcgagagagagcagctgctgggcgtgcagcagcacctgagcaacaccctgaagatggccgagcaggacaacaaggaggcccaggagatgatcggcgccctgaaggagagaagccaccacatggagagaatcatcgagagcgagcagaagggcaaggccgccctggccgccaccctggaggagtacaaggccaccgtggccagcgaccagatcgagatgaacagactgaaggcccagctggagaacgagaagcagaaggtggccgagctgtacagcatccacaacagcggcgacaagagcgacatccaggacctgctggagagcgtgagactggacaaggagaaggccgagaccctggccagcagcctgcaggaggacctggcccacaccagaaacgacgccaacagactgcaggacgccatcgccaaggtggaggacgagtacagagccttccaggaggaggccaagaagcagatcgaggacctgaacatgaccctggagaagctgagaagcgacctggacgagaaggagaccgagagaagcgacatgaaggagaccatcttcgagctggaggacgaggtggagcagcacagagccgtgaagctgcacgacaacctgatcatcagcgacctggagaacaccgtgaagaagctgcaggaccagaagcacgacatggagagagagatcaagaccctgcacagaagactgagagaggagagcgccgagtggagacagttccaggccgacctgcagaccgccgtggtgatcgccaacgacatcaagagcgaggcccaggaggagatcggcgacctgaagagaagactgcacgaggcccaggagaagaacgagaagctgaccaaggagctggaggagatcaagagcagaaagcaggaggaggagagaggcagagtgtacaactacatgaacgccgtggagagagacctggccgccctgagacagggcatgggcctgagcagaagaagcagcaccagcagcgagcccacccccaccgtgaagaccctgatcaagagcttcgacagcgccagccaggtgcccaaccccgccgccgccgccatccccagaacccccctgagccccagccccatgaagaccccccccgccgccgccgtgagccccatgcagagacacagcatcagcggccccatcagcaccagcaagcccctgaccgccctgagcgacaagagacccaactacggcgagatccccgtgcaggagcacctgctgagaaccagcagcgccagcagacccgccagcctgcccagagtgcccgccatggagagcgccaagaccctgagcgtgagcagaagaagcagcgaggaggtgaagagagacatcagcgcccaggagggcgccagccccgccagcctgatggccatgggcaccaccagcccccagctgagcctgagcagcagccccaccgccagcgtgacccccaccaccagaagcagaatcagagaggagagaaaggaccccctgagcgccctggccagagagtacggcggcagcaagagaaacgccctgctgaagtggtgccagaagaagaccgagggctaccagaacatcgacatcaccaacttcagcagcagctggaacgacggcctggccttctgcgccctgctgcacacctacctgcccgcccacatcccctaccaggagctgaacagccaggacaagagaagaaacttcatgctggccttccaggccgccgagagcgtgggcatcaagagcaccctggacatcaacgagatggtgagaaccgagagacccgactggcagaacgtgatgctgtacgtgaccgccatctacaagtacttcgagacctag

SEQ ID NO: 100545 - DNA, 2820 bp, synthetic construct
  misc_feature 1..2820: note = Description of Artificial Sequence: Synthetic coding sequence
  source 1..2820: mol_type = other DNA
gtgcccgaggccgtgagatggggctacttcatccccgagcagagccagttcgcctgcaagtgcatcaccaagagacagcccagaatgaagaaggccagcagaagcgtgggcagcgtgcccaaggtgagcgccatcagcaagacccagaccgccgagaagatcaagcccgagaacagcagcagcgccagcaccggcggcaagctggtgaagcccggcaccgccgccagcctgagcaagaccaagagcagcgacgacctgctggccggcatggccggcggcgtgaccgtgaccaacggcgtgaagggcaagaagagcacctgccccagcgccgcccccagcgccagcgcccccgccatgaccaccgtggagaacaagagcaagatcagcaccggcaccgccagcagcaccaagagaagcaccagcaccggcaacaaggagagcagcagcaccagagagagactgagagagagaaccagactgaaccagagcaagaagctgcccagcgccggccagggcgccaacgacatggccctggccaagagaagcagaagcagaaccgccaccgagtgcgacgtgagaatgagcaagagcaagagcgacaaccagatcagcgacagagccgccctggaggccaaggtgaaggacctgctgaccctggccaagaccaaggacgtggagatcctgcacctgagaaacgagctgagagacatgagagcccagctgggcatcaacgaggaccacagcgagggcgacgagaagagcgagaaggagaccatcatggcccaccagcccaccgacgtggagagcaccctgctgcagctgcaggagcagaacaccgccatcagagaggagctgaaccagctgaagaacgagaacagaatgctgaaggacagactgaacgccctgggcttcagcctggagcagagactggacaacagcgagaagctgttcggctaccagagcctgagccccgagatcacccccgacaaccagagcgacggcggcggcaccctgaccagcagcgtggagggcagcgcccccggcagcgtggaggacctgctgagccaggacgagaacaccctgatggaccaccagcacagcaacagcatggacaacctggacagcgagtgcagcgaggtgtaccagcccctgaccagcagcgacgacgccctggacgcccccagcagcagcgagagcgagggcatccccagcatcgagagaagcagaaagggcagcagcggcaacgccagcgaggtgagcgtggcctgcctgaccgagagaatccaccagatggaggagaaccagcacagcaccagcgaggagctgcaggccaccctgcaggagctggccgacctgcagcagatcacccaggagctgaacagcgagaacgagagactgggcgaggagaaggtgatcctgatggagagcctgtgccagcagagcgacaagctggagcacttcagcagacagatcgagtacttcagaagcctgctggacgagcaccacatcagctacgtgatcgacgaggacgtgaagagcggcagatacatggagctggagcagagatacatggacctggccgagaacgccagattcgagagagagcagctgctgggcgtgcagcagcacctgagcaacaccctgaagatggccgagcaggacaacaaggaggcccaggagatgatcggcgccctgaaggagagaagccaccacatggagagaatcatcgagagcgagcagaagggcaaggccgccctggccgccaccctggaggagtacaaggccaccgtggccagcgaccagatcgagatgaacagactgaaggcccagctggagaacgagaagcagaaggtggccgagctgtacagcatccacaacagcggcgacaagagcgacatccaggacctgctggagagcgtgagactggacaaggagaaggccgagaccctggccagcagcctgcaggaggacctggcccacaccagaaacgacgccaacagactgcaggacgccatcgccaaggtggaggacgagtacagagccttccaggaggaggccaagaagcagatcgaggacctgaacatgaccctggagaagctgagaagcgacctggacgagaaggagaccgagagaagcgacatgaaggagaccatcttcgagctggaggacgaggtggagcagcacagagccgtgaagctgcacgacaacctgatcatcagcgacctggagaacaccgtgaagaagctgcaggaccagaagcacgacatggagagagagatcaagaccctgcacagaagactgagagaggagagcgccgagtggagacagttccaggccgacctgcagaccgccgtggtgatcgccaacgacatcaagagcgaggcccaggaggagatcggcgacctgaagagaagactgcacgaggcccaggagaagaacgagaagctgaccaaggagctggaggagatcaagagcagaaagcaggaggaggagagaggcagagtgtacaactacatgaacgccgtggagagagacctggccgccctgagacagggcatgggcctgagcagaagaagcagcaccagcagcgagcccacccccaccgtgaagaccctgatcaagagcttcgacagcgccagccaggtgcccaaccccgccgccgccgccatccccagaacccccctgagccccagccccatgaagaccccccccgccgccgccgtgagccccatgcagatggagagcagcagcgtggcccacgccggcatgcagtggagagacctgggcagcctgcagcccctgccccccggcttcaagtag

SEQ ID NO: 100546 - DNA, 2370 bp, synthetic construct
  misc_feature 1..2370: note = Description of Artificial Sequence: Synthetic coding sequence
  source 1..2370: mol_type = other DNA
atgaagaaggccagcagaagcgtgggcagcgtgcccaaggtgagcgccatcagcaagacccagaccgccgagaagatcaagcccgagaacagcagcagcgccagcaccggcggcaagctggtgaagcccggcaccgccgccagcctgagcaagaccaagagcagcgacgacctgctggccggcatggccggcggcgtgaccgtgaccaacggcgtgaagggcaagaagagcacctgccccagcgccgcccccagcgccagcgcccccgccatgaccaccgtggagaacaagagcaagatcagcaccggcaccgccagcagcaccaagagaagcaccagcaccggcaacaaggagagcagcagcaccagagagagactgagagagagaaccagactgaaccagagcaagaagctgcccagcgccggccagggcgccaacgacatggccctggccaagagaagcagaagcagaaccgccaccgagtgcgacgtgagaatgagcaagagcaagagcgacaaccagatcagcgacagagccgccctggaggccaaggtgaaggacctgctgaccctggccaagaccaaggacgtggagatcctgcacctgagaaacgagctgagagacatgagagcccagctgggcatcaacgaggaccacagcgagggcgacgagaagagcgagaaggagaccatcatggcccaccagcccaccgacgtggagagcaccctgctgcagctgcaggagcagaacaccgccatcagagaggagctgaaccagctgaagaacgagaacagaatgctgaaggacagactgaacgccctgggcttcagcctggagcagagactggacaacagcgagaagctgttcggctaccagagcctgagccccgagatcacccccgacaaccagagcgacggcggcggcaccctgaccagcagcgtggagggcagcgcccccggcagcgtggaggacctgctgagccaggacgagaacaccctgatggaccaccagcacagcaacagcatggacaacctggacagcgagtgcagcgaggtgtaccagcccctgaccagcagcgacgacgccctggacgcccccagcagcagcgagagcgagggcatccccagcatcgagagaagcagaaagggcagcagcggcaacgccagcgaggtgagcgtggcctgcctgaccgagagaatccaccagatggaggagaaccagcacagcaccagcgaggagctgcaggccaccctgcaggagctggccgacctgcagcagatcacccaggagctgaacagcgagaacgagagactgggcgaggagaaggtgatcctgatggagagcctgtgccagcagagcgacaagctggagcacttcagcagacagatcgagtacttcagaagcctgctggacgagcaccacatcagctacgtgatcgacgaggacgtgaagagcggcagatacatggagctggagcagagatacatggacctggccgagaacgccagattcgagagagagcagctgctgggcgtgcagcagcacctgagcaacaccctgaagatggccgagcaggacaacaaggaggcccaggagatgatcggcgccctgaaggagagaagccaccacatggagagaatcatcgagagcgagcagaagggcaaggccgccctggccgccaccctggaggagtacaaggccaccgtggccagcgaccagatcgagatgaacagactgaaggcccagctggagaacgagaagcagaaggtggccgagctgtacagcatccacaacagcggcgacaagagcgacatccaggacctgctggagagcgtgagactggacaaggagaaggccgagaccctggccagcagcctgcaggaggacctggcccacaccagaaacgacgccaacagactgcaggacgccatcgccaaggtggaggacgagtacagagccttccaggaggaggccaagaagcagatcgaggacctgaacatgaccctggagaagctgagaagcgacctggacgagaaggagaccgagagaagcgacatgaaggagaccatcttcgagctggaggacgaggtggagcagcacagagccgtgaagctgcacgacaacctgatcatcagcgacctggagaacaccgtgaagaagctgcaggaccagaagcacgacatggagagagagatcaagaccctgcacagaagactgagagaggagagcgccgagtggagacagttccaggccgacctgcagaccgccgtggtgatcgccaacgacatcaagagcgaggcccaggaggagatcggcgacctgaagagaagactgcacgaggcccaggagaagaacgagaagctgacctag

SEQ ID NO: 100547 - DNA, 3354 bp, synthetic construct; identical to SEQ ID NO: 100544
  misc_feature 1..3354: note = Description of Artificial Sequence: Synthetic coding sequence
  source 1..3354: mol_type = other DNA

SEQ ID NO: 100548 - DNA, 3237 bp, synthetic construct
  misc_feature 1..3237: note = Description of Artificial Sequence: Synthetic coding sequence
  source 1..3237: mol_type = other DNA
atgaagaaggccagcagaagcgtgggcagcgtgcccaaggtgagcgccatcagcaagacccagaccgccgagaagatcaagcccgagaacagcagcagcgccagcaccggcggcaagctggtgaagcccggcaccgccgccagcctgagcaagaccaagagcagcgacgacctgctggccggcatggccggcggcgtgaccgtgaccaacggcgtgaagggcaagaagagcacctgccccagcgccgcccccagcgccagcgcccccgccatgaccaccgtggagaacaagagcaagatcagcaccggcaccgccagcagcaccaagagaagcaccagcaccggcaacaaggagagcagcagcaccagagagagactgagagagagaaccagactgaaccagagcaagaagctgcccagcgccggccagggcgccaacgacatggccctggccaagagaagcagaagcagaaccgccaccgagtgcgacgtgagaatgagcaagagcaagagcgacaaccagatcagcgacagagccgccctggaggccaaggtgaaggacctgctgaccctggccaagaccaaggacgtggagatcctgcacctgagaaacgagctgagagacatgagagcccagctgggcatcaacgaggaccacagcgagggcgacgagaagagcgagaaggagaccatcatggcccaccagcccaccgacgtggagagcaccctgctgcagctgcaggagcagaacaccgccatcagagaggagctgaaccagctgaagaacgagaacagaatgctgaaggacagactgaacgccctgggcttcagcctggagcagagactggacaacagcgagaagctgttcggctaccagagcctgagccccgagatcacccccgacaaccagagcgacggcggcggcaccctgaccagcagcgtggagggcagcgcccccggcagcgtggaggacctgctgagccaggacgagaacaccctgatggaccaccagcacagcaacagcatggacaacctggacagcgagtgcagcgaggtgtaccagcccctgaccagcagcgacgacgccctggacgcccccagcagcagcgagagcgagggcatccccagcatcgagagaagcagaaagggcagcagcggcaacgccagcgaggtgagcgtggcctgcctgaccgagagaatccaccagatggaggagaaccagcacagcaccagcgaggagctgcaggccaccctgcaggagctggccgacctgcagcagatcacccaggagctgaacagcgagaacgagagactgggcgaggagaaggtgatcctgatggagagcctgtgccagcagagcgacaagctggagcacttcagcagacagatcgagtacttcagaagcctgctggacgagcaccacatcagctacgtgatcgacgaggacgtgaagagcggcagatacatggagctggagcagagatacatggacctggccgagaacgccagattcgagagagagcagctgctgggcgtgcagcagcacctgagcaacaccctgaagatggccgagcaggacaacaaggaggcccaggagatgatcggcgccctgaaggagagaagccaccacatggagagaatcatcgagagcgagcagaagggcaaggccgccctggccgccaccctggaggagtacaaggccaccgtggccagcgaccagatcgagatgaacagactgaaggcccagctggagaacgagaagcagaaggtggccgagctgtacagcatccacaacagcggcgacaagagcgacatccaggacctgctggagagcgtgagactggacaaggagaaggccgagaccctggccagcagcctgcaggaggacctggcccacaccagaaacgacgccaacagactgcaggacgccatcgccaaggtggaggacgagtacagagccttccaggaggaggccaagaagcagatcgaggacctgaacatgaccctggagaagctgagaagcgacctggacgagaaggagaccgagagaagcgacatgaaggagaccatcttcgagctggaggacgaggtggagcagcacagagccgtgaagctgcacgacaacctgatcatcagcgacctggagaacaccgtgaagaagctgcaggaccagaagcacgacatggagagagagatcaagaccctgcacagaagactgagagaggagagcgccgagtggagacagttccaggccgacctgcagaccgccgtggtgatcgccaacgacatcaagagcgaggcccaggaggagatcggcgacctgaagagaagactgcacgaggcccaggagaagaacgagaagctgaccaaggagctggaggagatcaagagcagaaagcaggaggaggagagaggcagagtgtacaactacatgaacgccgtggagagagacctggccgccctgagacagggcatgggcctgagcagaagaagcagcaccagcagcgagcccacccccaccgtgaagaccctgatcaagagcttcgacagcgccagccaggtgcccaaccccgccgccgccgccatccccagaacccccctgagccccagccccatgaagaccccccccgccgccgccgtgagccccatgcagagacacagcatcagcggccccatcagcaccagcaagcccctgaccgccctgagcgacaagagacccaactacggcgagatccccgtgcaggagcacctgctgagaaccagcagcgccagcagacccgccagcctgcccagagtgcccgccatggagagcgccaagaccctgagcgtgagcagaagaagcagcgaggaggtgaagagagacatcagcgcccaggagggcgccagccccgccagcctgatggccatgggcaccaccagcccccagctgagcctgagcagcagccccaccgccagcgtgacccccaccaccagaagcagaatcagagaggagagaaaggaccccctgagcgccctggccagagagtacggcggcagcaagagaaacgccctgctgaagtggtgccagaagaagaccgagggctaccagagaagaaacttcatgctggccttccaggccgccgagagcgtgggcatcaagagcaccctggacatcaacgagatggtgagaaccgagagacccgactggcagaacgtgatgctgtacgtgaccgccatctacaagtacttcgagacctag

SEQ ID NO: 100549 - DNA, 2781 bp, synthetic construct
  misc_feature 1..2781: note = Description of Artificial Sequence: Synthetic coding sequence
  source 1..2781: mol_type = other DNA
atgaccaccaaggactaccccagcctgtggggcttcggcaccaccaagaccttcaagatccccatcgagcacctggacttcaagtacatcgagaagtgcagcgacgtgaagcacctggagaagatcctgtgcgtgctgagaagcggcgaggagggctactaccccgagctgaccgagttctgcgagaagcacctgcaggccctggcccccgagagcagagccctgagaaaggacaagcccgccgccaccgccgccagcttcaccgccgaggagtgggagaagatcgacggcgacatcaagagctgggtgagcgagatcaagaaggaggaggacaagatgcacttccacgagaccgagaccttccccgccatgaaggacaacctgccccccgtgagaggcagcaacagctgcctgcacgtgggcaaggagaagtacagcaagagacccaccaagaagaagacccccagagactacgccgagtgggacaagttcgacgtggagaaggagtgcctgaagatcgacgaggactacaaggagaagaccgtgatcgacaagagccacctgagcaagatcgagaccagaatcgacaccgccggcctgaccgagaaggagaaggacttcctggccaccagagagaaggagaagggcaacgaggccttcaacagcggcgactacgaggaggccgtgatgtactacaccagaagcatcagcgccctgcccaccgtggtggcctacaacaacagagcccaggccgagatcaagctgcagaactggaacagcgccttccaggactgcgagaaggtgctggagctggagcccggcaacgtgaaggccctgctgagaagagccaccacctacaagcaccagaacaagctgagagaggccaccgaggacctgagcaaggtgctggacgtggagcccgacaacgacctggccaagaagaccctgagcgaggtggagagagacctgaagaacagcgaggccgccagcgagacccagaccaagggcaagagaatggtgatccaggagatcgagaacagcgaggacgaggagggcaagagcggcagaaagcacgaggacggcggcggcgacaagaagcccgccgagcccgccggcgccgccagagccgcccagccctgcgtgatgggcaacatccagaagaagctgaccggcaaggccgagggcggcaagagacccgccagaggcgccccccagagaggccagacccccgaggccggcgccgacaagagaagccccagaagagccagcgccgccgccgccgccggcggcggcgccaccggccaccccggcggcggccagggcgccgagaaccccgccggcctgaagagccagggcaacgagctgttcagaagcggccagttcgccgaggccgccggcaagtacagcgccgccatcgccctgctggagcccgccggcagcgagatcgccgacgacctgagcatcctgtacagcaacagagccgcctgctacctgaaggagggcaactgcagcggctgcatccaggactgcaacagagccctggagctgcaccccttcagcatgaagcccctgctgagaagagccatggcctacgagaccctggagcagtacggcaaggcctacgtggactacaagaccgtgctgcagatcgactgcggcctgcagctggccaacgacagcgtgaacagactgagcagaatcctgatggagctggacggccccaactggagagagaagctgagccccatccccgccgtgcccgccagcgtgcccctgcaggcctggcaccccgccaaggagatgatcagcaagcaggccggcgacagcagcagccacagacagcagggcatcaccgacgagaagaccttcaaggccctgaaggaggagggcaaccagtgcgtgaacgacaagaactacaaggacgccctgagcaagtacagcgagtgcctgaagatcaacaacaaggagtgcgccatctacaccaacagagccctgtgctacctgaagctgtgccagttcgaggaggccaagcaggactgcgaccaggccctgcagctggccgacggcaacgtgaaggccttctacagaagagccctggcccacaagggcctgaagaactaccagaagagcctgatcgacctgaacaaggtgatcctgctggaccccagcatcatcgaggccaagatggagctggaggaggtgaccagactgctgaacctgaaggacaagaccgcccccttcaacaaggagaaggagagaagaaagatcgagatccaggaggtgaacgagggcaaggaggagcccggcagacccgccggcgaggtgagcatgggctgcctggccagcgagaagggcggcaagagcagcagaagccccgaggaccccgagaagctgcccatcgccaagcccaacaacgcctacgagttcggccagatcatcaacgccctgagcaccagaaaggacaaggaggcctgcgcccacctgctggccatcaccgcccccaaggacctgcccatgttcctgagcaacaagctggagggcgacaccttcctgctgctgatccagagcctgaagaacaacctgatcgagaaggaccccagcctggtgtaccagcacctgctgtacctgagcaaggccgagagattcaagatgatgctgaccctgatcagcaagggccagaaggagctgatcgagcagctgttcgaggacctgagcgacacccccaacaaccacttcaccctggaggacatccaggccctgaagagacagtacgagctgtag

SEQ ID NO: 100550 - DNA, 2781 bp, synthetic construct; identical to SEQ ID NO: 100549
  misc_feature 1..2781: note = Description of Artificial Sequence: Synthetic coding sequence
  source 1..2781: mol_type = other DNA

SEQ ID NO: 100551 - DNA, 1044 bp, synthetic construct
  misc_feature 1..1044: note = Description of Artificial Sequence: Synthetic coding sequence
  source 1..1044: mol_type = other DNA
atggccgcccagagaggcatgcccagcagcgccgtgagagtgctggaggaggccctgggcatgggcctgaccgccgccggcgacgccagagacaccgccgacgccgtggccgccgagggcgcctactacctggagcaggtgaccatcaccgaggccagcgaggacgactacgagtacgaggagatccccgacgacaacttcagcatccccgagggcgaggaggacctggccaaggccatccagatggcccaggagcaggccaccgacaccgagatcctggagagaaagaccgtgctgcccagcaagcacgccgtgcccgaggtgatcgaggacttcctgtgcaacttcctgatcaagatgggcatgaccagaaccctggactgcttccagagcgagtggtacgagctgatccagaagggcgtgaccgagctgagaaccgtgggcaacgtgcccgacgtgtacacccagatcatgctgctggagaacgagaacaagaacctgaagaaggacctgaagcactacaagcaggccgccgacaaggccagagaggacctgctgaagatccagaaggagagagacttccacagaatgcaccacaagagaatcgtgcaggagaagaacaagctgatcaacgacctgaagggcctgaagctgcactacgccagctacgagcccaccatcagagtgctgcacgagaagcaccacaccctgctgaaggagaagatgctgaccagcctggagagagacaaggtggtgggccagatcagcggcctgcaggagaccctgaagaagctgcagagaggccacagctaccacggcccccagatcaaggtggaccacagcagagagaaggagaacgcccccgagggccccacccagaagggcctgagagaggccagagagcagaacaagtgcaagaccaagatgaagggcaacaccaagcagtggaccggcaacagccagacctggaacaagaccgtgcccctgcaggacaccatcggcagaagacaggagaacaacagcgcccaccagcacatcgactag

SEQ ID NO: 100552 - DNA, 1896 bp, synthetic construct
  misc_feature 1..1896: note = Description of Artificial Sequence: Synthetic coding sequence
  source 1..1896: mol_type = other DNA
atggccgcccagagaggcatgcccagcagcgccgtgagagtgctggaggaggccctgggcatgggcctgaccgccgccggcgacgccagagacaccgccgacgccgtggccgccgagggcgcctactacctggagcaggtgaccatcaccgaggccagcgaggacgactacgagtacgaggagatccccgacgacaacttcagcatccccgagggcgaggaggacctggccaaggccatccagatggcccaggagcaggccaccgacaccgagatcctggagagaaagaccgtgctgcccagcaagcacgccgtgcccgaggtgatcgaggacttcctgtgcaacttcctgatcaagatgggcatgaccagaaccctggactgcttccagagcgagtggtacgagctgatccagaagggcgtgaccgagctgagaaccgtgggcaacgtgcccgacgtgtacacccagatcatgctgctggagaacgagaacaagaacctgaagaaggacctgaagcactacaagcaggccgccgacaaggccagagaggacctgctgaagatccagaaggagagagacttccacagaatgcaccacaagagaatcgtgcaggagaagaacaagctgatcaacgacctgaagggcctgaagctgcactacgccagctacgagcccaccatcagagtgctgcacgagaagcaccacaccctgctgaaggagaagatgctgaccagcctggagagagacaaggtggtgggccagatcagcggcctgcaggagaccctgaagaagctgcagagaggccacagctaccacggcccccagatcaaggtggaccacagcagagagaaggagaacgcccccgagggccccacccagaagggcctgagagaggccagagagcagaacaagtgcaagaccaagatgaagggcaacaccaaggacagcgagttccccatcgacatgcagcccaaccccaacctgaacgtgagcaaggagagcctgagccccgccaagttcgactacaagctgaagaacatcttcagactgcacgagctgcccgtgagctgcgtgagcatgcagccccacaaggacatcctggtgagctgcggcgaggacagactgtggaaggtgctgggcctgcccaagtgcaacgtgctgctgaccggcttcggccacaccgactggctgagcgactgctgcttccaccccagcggcgacaagctggccaccagcagcggcgacaccaccgtgaagctgtgggacctgtgcaagggcgactgcatcctgaccttcgagggccacagcagagccgtgtggagctgcacctggcacagctgcggcaacttcgtggccagcagcagcctggacaagaccagcaagatctgggacgtgaacagcgagagatgcagatgcaccctgtacggccacaccgacagcgtgaacagcatcgagttcttccccttcagcaacaccctgctgaccagcagcgccgacaagaccctgagcatctgggacgccagaaccggcatctgcgagcagagcctgtacggccacatgcacagcatcaacgacgccatcttcgaccccagaggccacatgatcgccagctgcgacgcctgcggcgtgaccaagctgtgggacttcagaaagctgctgcccatcgtgagcatcgacatcggccccagccccggcaacgaggtgaacttcgacagcagcggcagagtgctggcccaggccagcggcaacggcgtgatccacctgctggacctgaagagcggcgagatccacaagctgatgggccacgagaacgaggcccacaccgtggtgttcagccacgacggcgagatcctgttcagcggcggcagcgacggcaccgtgagaacctggagctag

SEQ ID NO: 100553 - DNA, 1614 bp, synthetic construct
  misc_feature 1..1614: note = Description of Artificial Sequence: Synthetic coding sequence
  source 1..1614: mol_type = other DNA
atgaccatgaacatgaagagataccagatgaccatcctggccagccagaaggtgaagaagatctggcagaagcagttcagatggcccaagaacagactgcagatcctgaagttctggtacgagctgatccagaagggcgtgaccgagctgagaaccgtgggcaacgtgcccgacgtgtacacccagatcatgctgctggagaacgagaacaagaacctgaagaaggacctgaagcactacaagcaggccgccgacaaggccagagaggacctgctgaagatccagaaggagagagacttccacagaatgcaccacaagagaatcgtgcaggagaagaacaagctgatcaacgacctgaagggcctgaagctgcactacgccagctacgagcccaccatcagagtgctgcacgagaagcaccacaccctgctgaaggagaagatgctgaccagcctggagagagacaaggtggtgggccagatcagcggcctgcaggagaccctgaagaagctgcagagaggccacagctaccacggcccccagatcaaggtggaccacagcagagagaaggagaacgcccccgagggccccacccagaagggcctgagagaggccagagagcagaacaagtgcaagaccaagatgaagggcaacaccaaggacagcgagttccccatcgacatgcagcccaaccccaacctgaacgtgagcaaggagagcctgagccccgccaagttcgactacaagctgaagaacatcttcagactgcacgagctgcccgtgagctgcgtgagcatgcagccccacaaggacatcctggtgagctgcggcgaggacagactgtggaaggtgctgggcctgcccaagtgcaacgtgctgctgaccggcttcggccacaccgactggctgagcgactgctgcttccaccccagcggcgacaagctggccaccagcagcggcgacaccaccgtgaagctgtgggacctgtgcaagggcgactgcatcctgaccttcgagggccacagcagagccgtgtggagctgcacctggcacagctgcggcaacttcgtggccagcagcagcctggacaagaccagcaagatctgggacgtgaacagcgagagatgcagatgcaccctgtacggccacaccgacagcgtgaacagcatcgagttcttccccttcagcaacaccctgctgaccagcagcgccgacaagaccctgagcatctgggacgccagaaccggcatctgcgagcagagcctgtacggccacatgcacagcatcaacgacgccatcttcgaccccagaggccacatgatcgccagctgcgacgcctgcggcgtgaccaagctgtgggacttcagaaagctgctgcccatcgtgagcatcgacatcggccccagccccggcaacgaggtgaacttcgacagcagcggcagagtgctggcccaggccagcggcaacggcgtgatccacctgctggacctgaagagcggcgagatccacaagctgatgggccacgagaacgaggcccacaccgtggtgttcagccacgacggcgagatcctgttcagcggcggcagcgacggcaccgtgagaacctggagctag

SEQ ID NO: 100554 - DNA, 756 bp, synthetic construct
  misc_feature 1..756: note = Description of Artificial Sequence: Synthetic coding sequence
  source 1..756: mol_type = other DNA
atgggcgtgggcaccaaggccagagccagccactggagaagactgctgagcctgggcgccacccccgaggagcccctgctggacttcaagatccccgacgacaacttcagcatccccgagggcgaggaggacctggccaaggccatccagatggcccaggagcaggccaccgacaccgagatcctggagagaaagaccgtgctgcccagcaagcacgccgtgcccgaggtgatcgaggacttcctgtgcaacttcctgatcaagatgggcatgaccagaaccctggactgcttccagagcgagtggtacgagctgatccagaagggcgtgaccgagctgagaaccgtgggcaacgtgcccgacgtgtacacccagatcatgctgctggagaacgagaacaagaacctgaagaaggacctgaagcactacaagcaggccgccgacaaggccagagaggacctgctgaagatccagaaggagagagacttccacagaatgcaccacaagagaatcgtgcaggagaagaacaagctgatcaacgacctgaagggcctgaagctgcactacgccagctacgagcccaccatcagagtgctgcacgagaagcaccacaccctgctgaaggagaagatgctgaccagcctggagagagacaaggtggtgggccagatcagcggcctgcaggagaccctgaagaagctgcagagaggccacagctaccacggcccccagatcaagggcaagtgcaagatgtag

SEQ ID NO: 100555 - DNA, 552 bp, synthetic construct
  misc_feature 1..552: note = Description of Artificial Sequence: Synthetic coding sequence
  source 1..552: mol_type = other DNA
atggccgcccagagaggcatgcccagcagcgccgtgagagtgctggaggaggccctgggcatgggcctgaccgccgccggcgacgccagagacaccgccgacgccgtggccgccgagggcgcctactacctggagcaggtgaccatcaccgaggccagcgaggacgactacgagtacgaggagatccccgacgacaacttcagcatccccgagggcgaggaggacctggccaaggccatccagatggcccaggagcaggccaccgacaccgagatcctggagagaaagaccgtgctgcccagcaagcacgccgtgcccgaggtgatcgaggacttcctgtgcaacttcctgatcaagatgggcatgaccagaaccctggactgcttccagagcgagtggtacgagctgatccagaagggcgtgaccgagctgagaaccgtgggcaacgtgcccgacgtgtacacccagatcatgctgctggagaacgagaacaagaacctgaagaaggacctgaagcactacaagcaggccgccgagtacgtgatcttctag

SEQ ID NO: 100556 - DNA, 768 bp, synthetic construct
  misc_feature 1..768: note = Description of Artificial Sequence: Synthetic coding sequence
  source 1..768: mol_type = other DNA
gacagcgagttccccatcgacatgcagcccaaccccaacctgaacgtgagcaaggagagcctgagccccgccaagttcgactacaagctgaagaacatcttcagactgcacgagctgcccgtgagctgcgtgagcatgcagccccacaaggacatcctggtgagctgcggcgaggacagactgtggaaggtgctgggcctgcccaagtgcaacgtgctgctgaccggcttcggccacaccgactggctgagcgactgctgcttccaccccagcgagagatgcagatgcaccctgtacggccacaccgacagcgtgaacagcatcgagttcttccccttcagcaacaccctgctgaccagcagcgccgacaagaccctgagcatctgggacgccagaaccggcatctgcgagcagagcctgtacggccacatgcacagcatcaacgacgccatcttcgaccccagaggccacatgatcgccagctgcgacgcctgcggcgtgaccaagctgtgggacttcagaaagctgctgcccatcgtgagcatcgacatcggccccagccccggcaacgaggtgaacttcgacagcagcggcagagtgctggcccaggccagcggcaacggcgtgatccacctgctggacctgaagagcggcgagatccacaagctgatgggccacgagaacgaggcccacaccgtggtgttcagccacgacggcgagatcctgttcagcggcggcagcgacggcaccgtgagaacctggagctag

SEQ ID NO: 100557 - DNA, 1314 bp, synthetic construct
  misc_feature 1..1314: note = Description of Artificial Sequence: Synthetic coding sequence
  source 1..1314: mol_type = other DNA
atgagaagaagcagcagacccggcagcgccagcagcagcagaaagcacacccccaacttcttcagcgagaacagcagcatgagcatcaccagcgaggacagcaagggcctgagaagcgccgagcccggccccggcgagcccgagggcagaagagccagaggccccagctgcggcgagcccgccctgagcgccggcgtgcccggcggcaccacctgggccggcagcagccagcagaagcccgcccccagaagccacaactggcagaccgcctgcggcgccgccaccgtgagaggcggcgccagcgagcccaccggcagccccgtggtgagcgaggagcccctggacctgctgcccaccctggacctgagacaggagatgcccccccccagagtgttcaagagcttcctgagcctgctgttccagggcctgagcgtgctgctgagcctggccggcgacgtgctggtgagcatgtacagagaggtgtgcagcatcagattcctgttcaccgccgtgagcctgctgagcctgttcctgagcgccttctggctgggcctgctgtacctggtgagccccctggagaacgagcccaaggagatgctgaccctgagcgagtaccacgagagagtgagaagccagggccagcagctgcagcagctgcaggccgagctggacaagctgcacaaggaggtgagcaccgtgagagccgccaacagcgagagagtggccaagctggtgttccagagactgaacgaggacttcgtgagaaagcccgactacgccctgagcagcgtgggcgccagcatcgacctgcagaagaccagccacgactacgccgacagaaacaccgcctacttctggaacagattcagcttctggaactacgccagaccccccaccgtgatcctggagccccacgtgttccccggcaactgctgggccttcgagggcgaccagggccaggtggtgatccagctgcccggcagagtgcagctgagcgacatcaccctgcagcaccccccccccagcgtggagcacaccggcggcgccaacagcgcccccagagacttcgccgtgttcggcctgcaggtgtacgacgagaccgaggtgagcctgggcaagttcaccttcgacgtggagaagagcgagatccagaccttccacctgcagaacgacccccccgccgccttccccaaggtgaagatccagatcctgagcaactggggccaccccagattcacctgcctgtacagagtgagagcccacggcgtgagaaccagcgagggcgccgagggcagcgcccagggcccccactag

SEQ ID NO: 100558 - DNA, 1377 bp, synthetic construct
  misc_feature 1..1377: note = Description of Artificial Sequence: Synthetic coding sequence
  source 1..1377: mol_type = other DNA
atgagccagagacaggtgctgcaggtgttcgagcagtaccagaaggccagaacccagttcgtgcagatggtggccgagctggccaccagaccccagaacatcgagaccctgcagaacgccggcgtgatgagcctgctgagaaccctgctgctggacgtggtgcccaccatccagcagaccgccgccctggccctgggcagactggccaactacaacgacgacctggccgaggccgtggtgaagtgcgacatcctgccccagctggtgtacagcctggccgagcagaacagattctacaagaaggccgccgccttcgtgctgagagccgtgggcaagcacagcccccagctggcccaggccatcgtggactgcggcgccctggacaccctggtgatctgcctggaggacttcgaccccggcgtgaaggaggccgccgcctgggccctgagatacatcgccagacacaacgccgagctgagccaggccgtggtggacgccggcgccgtgcccctgctggtgctgtgcatccaggagcccgagatcgccctgaagagaatcgccgccagcgccctgagcgacatcgccaagcacagccccgagctggcccagaccgtggtggacgccggcgccgtggcccacctggcccagatgatcctgaaccccgacgccaagctgaagcaccagatcctgagcgccctgagccaggtgagcaagcacagcgtggacctggccgagatggtggtggaggccgagatcttccccgtggtgctgacctgcctgaaggacaaggacgagtacgtgaagaagaacgccagcaccctgatcagagagatcgccaagcacacccccgagctgagccagctggtggtgaacgccggcggcgtggccgccgtgatcgactgcatcggcagctgcaagggcaacaccagactgcccggcatcatgatgctgggctacgtggccgcccacagcgagaacctggccatggccgtgatcatcagcaagggcgtgccccagctgagcgtgtgcctgagcgaggagcccgaggaccacatcaaggccgccgccgcctgggccctgggccagatcggcagacacacccccgagcacgccagagccgtggccgtgaccaacaccctgcccgtgctgctgagcctgtacatgagcaccgagagcagcgaggacctgcaggtgaagagcaagaaggccatcaagaacatcctgcagaagtgcacctacctgcccgccctggagcccttcctgtacgacgccccccccaacatcctgaagcacgtggtgggccagttcagcaaggtgctgttcccctggatcttcagatacaccagcgccgagggcggccagctgagcaccacctag

SEQ ID NO: 100559 - DNA, 813 bp, synthetic construct
  misc_feature 1..813: note = Description of Artificial Sequence: Synthetic coding sequence
  source 1..813: mol_type = other DNA
atgagccagagacaggtgctgcaggtgttcgagcagtaccagaaggccagaacccagttcgtgcagatggtggccgagctggccaccagaccccagaacatcgagaccctgcagaacgccggcgtgatgagcctgctgagaaccctgctgctggacgtggtgcccaccatccagcagaccgccgccctggccctgggcagactggccaactacaacgacgacctggccgaggccgtggtgaagtgcgacatcctgccccagctggtgtacagcctggccgagcagaacggcgtgccccagctgagcgtgtgcctgagcgaggagcccgaggaccacatcaaggccgccgccgcctgggccctgggccagatcggcagacacacccccgagcacgccagagccgtggccgtgaccaacaccctgcccgtgctgctgagcctgtacatgagcaccgagagcagcgaggacctgcaggtgaagagcaagaaggccatcaagaacatcctgcagaagtgcacctacctgcccgccctggagcccttcctgtacgacgccccccccaacatcctgaagcacgtggtgggccagttcagcaaggtgctgccccacgacagcaaggccagaagactgttcgtgaccagcggcggcctgaagaaggtgcaggagatcaaggccgagcccggcagcctgctgcaggagtacatcaacagcatcaacagctgctaccccgaggagatcgtgagatactacagccccggctacagcgacaccctgctgcagagagtggacagctaccagcccctgaacaactag

SEQ ID NO: 100560 - DNA, 1758 bp, synthetic construct
  misc_feature 1..1758: note = Description of Artificial Sequence: Synthetic coding sequence
  source 1..1758: mol_type = other DNA
atgagccagagacaggtgctgcaggtgttcgagcagtaccagaaggccagaacccagttcgtgcagatggtggccgagctggccaccagaccccagaacatcgagaccctgcagaacgccggcgagcccggcgccagaacccccgtggcccccagagccctgagccccagaagactgagacccgccgccctgcccgtggagctgctgggcagcagaagcgtgggcaccggcgtgagaaagagcatccacagcttccagagagtgttcggcggccaggccgagagagtgaagctgcccgacggctgcggcagatgcgccctgagcctgttccccagcagcctgcacaccggcgtgatgagcctgctgagaaccctgctgctggacgtggtgcccaccatccagcagaccgccgccctggccctgggcagactggccaactacaacgacgacctggccgaggccgtggtgaagtgcgacatcctgccccagctggtgtacagcctggccgagcagaacagattctacaagaaggccgccgccttcgtgctgagagccgtgggcaagcacagcccccagctggcccaggccatcgtggactgcggcgccctggacaccctggtgatctgcctggaggacttcgaccccggcgtgaaggaggccgccgcctgggccctgagatacatcgccagacacaacgccgagctgagccaggccgtggtggacgccggcgccgtgcccctgctggtgctgtgcatccaggagcccgagatcgccctgaagagaatcgccgccagcgccctgagcgacatcgccaagcacagccccgagctggcccagaccgtggtggacgccggcgccgtggcccacctggcccagatgatcctgaaccccgacgccaagctgaagcaccagatcctgagcgccctgagccaggtgagcaagcacagcgtggacctggccgagatggtggtggaggccgagatcttccccgtggtgctgacctgcctgaaggacaaggacgagtacgtgaagaagaacgccagcaccctgatcagagagatcgccaagcacacccccgagctgagccagctggtggtgaacgccggcggcgtggccgccgtgatcgactgcatcggcagctgcaagggcaacaccagactgcccggcatcatgatgctgggctacgtggccgcccacagcgagaacctggccatggccgtgatcatcagcaagggcgtgccccagctgagcgtgtgcctgagcgaggagcccgaggaccacatcaaggccgccgccgcctgggccctgggccagatcggcagacacacccccgagcacgccagagccgtggccgtgaccaacaccctgcccgtgctgctgagcctgtacatgagcaccgagagcagcgaggacctgcaggtgaagagcaagaaggccatcaagaacatcctgcagaagtgcacctacctgcccgccctggagcccttcctgtacgacgccccccccaacatcctgaagcacgtggtgggccagttcagcaaggtgctgccccacgacagcaaggccagaagactgttcgtgaccagcggcggcctgaagaaggtgcaggagatcaaggccgagcccggcagcctgctgcaggagtacatcaacagcatcaacagctgctaccccgaggagatcgtgagatactacagccccggctacagcgacaccctgctgcagagagtggacagctaccagcccctgaacaactag

SEQ ID NO: 100561 - DNA, 1530 bp, synthetic construct
  misc_feature 1..1530: note = Description of Artificial Sequence: Synthetic coding sequence
  source 1..1530: mol_type = other DNA
atgagccagagacaggtgctgcaggtgttcgagcagtaccagaaggccagaacccagttcgtgcagatggtggccgagctggccaccagaccccagaacatcgagaccctgcagaacgccggcgtgatgagcctgctgagaaccctgctgctggacgtggtgcccaccatccagcagaccgccgccctggccctgggcagactggccaactacaacgacgacctggccgaggccgtggtgaagtgcgacatcctgccccagctggtgtacagcctggccgagcagaacagattctacaagaaggccgccgccttcgtgctgagagccgtgggcaagcacagcccccagctggcccaggccatcgtggactgcggcgccctggacaccctggtgatctgcctggaggacttcgaccccggcgtgaaggaggccgccgcctgggccctgagatacatcgccagacacaacgccgagctgagccaggccgtggtggacgccggcgccgtgcccctgctggtgctgtgcatccaggagcccgagatcgccctgaagagaatcgccgccagcgccctgagcgacatcgccaagcacagccccgagctggcccagaccgtggtggacgccggcgccgtggcccacctggcccagatgatcctgaaccccgacgccaagctgaagcaccagatcctgagcgccctgagccaggtgagcaagcacagcgtggacctggccgagatggtggtggaggccgagatcttccccgtggtgctgacctgcctgaaggacaaggacgagtacgtgaagaagaacgccagcaccctgatcagagagatcgccaagcacacccccgagctgagccagctggtggtgaacgccggcggcgtggccgccgtgatcgactgcatcggcagctgcaagggcaacaccagactgcccggcatcatgatgctgggctacgtggccgcccacagcgagaacctggccatggccgtgatcatcagcaagggcgtgccccagctgagcgtgtgcctgagcgaggagcccgaggaccacatcaaggccgccgccgcctgggccctgggccagatcggcagacacacccccgagcacgccagagccgtggccgtgaccaacaccctgcccgtgctgctgagcctgtacatgagcaccgagagcagcgaggacctgcaggtgaagagcaagaaggccatcaagaacatcctgcagaagtgcacctacctgcccgccctggagcccttcctgtacgacgccccccccaacatcctgaagcacgtggtgggccagttcagcaaggtgctgccccacgacagcaaggccagaagactgttcgtgaccagcggcggcctgaagaaggtgcaggagatcaaggccgagcccggcagcctgctgcaggagtacatcaacagcatcaacagctgctaccccgaggagatcgtgagatactacagccccggctacagcgacaccctgctgcagagagtggacagctaccagcccctgaacaactag

SEQ ID NO: 100562 - DNA, 741 bp, synthetic construct
  misc_feature 1..741: note = Description of Artificial Sequence: Synthetic coding sequence
  source 1..741: mol_type = other DNA
atgagccagagacaggtgctgcaggtgttcgagcagtaccagaaggccagaacccagttcgtgcagatggtggccgagctggccaccagaccccagaacatcgagaccctgcagaacgccggcgagcccggcgccagaacccccgtggcccccagagccctgagccccagaagactgagacccgccgccctgcccgtggagctgctgggcagcagaagcgtgggcaccggcgtgagaaagagcatccacagcttccagagagtgttcggcggccaggccgagagagtgaagctgcccgacggctgcggcagatgcgccctgagcctgttccccagcagcctgcacaccggcgtgatgagcctgctgagaaccctgctgctggacgtggtgcccaccatccagcagaccgccgccctggccctgggcagactggccaactacaacgacgacctggccgaggccgtggtgaagtgcgacatcctgccccagctggtgtacagcctggccgagcagaacagattctacaagaaggccgccgccttcgtgctgagagccgtgggcaagcacagcccccagctggcccaggccatcgtggactgcggcgccctggacaccctggtgatctgcctggaggacttcgaccccggcgtgaaggaggccgccgcctgggccctgagatacatcgccagacacaacgccgagctgagccaggccgtggtggacgccggcgccgtgccctag

SEQ ID NO: 100563 - DNA, 576 bp, synthetic construct
  misc_feature 1..576: note = Description of Artificial Sequence: Synthetic coding sequence
  source 1..576: mol_type = other DNA
atgagccagagacaggtgctgcaggtgttcgagcagtaccagaaggccagaacccagttcgtgcagatggtggccgagctggccaccagaccccagaacatcgagaccctgcagaacgccggcgtgatgagcctgctgagaaccctgctgctggacgtggtgcccaccatccagcagaccgccgccctggccctgggcagactggccaactacaacgacgacctggccgaggccgtggtgaagtgcgacatcctgccccagctggtgtacagcctggccgagcagaacggcgtgccccagctgagcgtgtgcctgagcgaggagcccgaggaccacatcaaggccgccgccgcctgggccctgggccagatcggcagacacacccccgagcacgccagagccgtggccgtgaccaacaccctgcccgtgctgctgagcctgtacatgagcaccgagagcagcgaggacctgcaggtgaagagcaagaaggccatcaagaacatcctgcagaagtgcacctacctgcccgccctggagcccttcctgtacgacgccccccccaacatcctgaagtag

SEQ ID NO: 100564 - DNA, 1455 bp, synthetic construct
  misc_feature 1..1455: note = Description of Artificial Sequence: Synthetic coding sequence
  source 1..1455: mol_type = other DNA
atgcacagcctgaccatggacctgtggatccccaacggccaggccggcgtgatgagcctgctgagaaccctgctgctggacgtggtgcccaccatccagcagaccgccgccctggccctgggcagactggccaactacaacgacgacctggccgaggccgtggtgaagtgcgacatcctgccccagctggtgtacagcctggccgagcagaacagattctacaagaaggccgccgccttcgtgctgagagccgtgggcaagcacagcccccagctggcccaggccatcgtggactgcggcgccctggacaccctggtgatctgcctggaggacttcgaccccggcgtgaaggaggccgccgcctgggccctgagatacatcgccagacacaacgccgagctgagccaggccgtggtggacgccggcgccgtgcccctgctggtgctgtgcatccaggagcccgagatcgccctgaagagaatcgccgccagcgccctgagcgacatcgccaagcacagccccgagctggcccagaccgtggtggacgccggcgccgtggcccacctggcccagatgatcctgaaccccgacgccaagctgaagcaccagatcctgagcgccctgagccaggtgagcaagcacagcgtggacctggccgagatggtggtggaggccgagatcttccccgtggtgctgacctgcctgaaggacaaggacgagtacgtgaagaagaacgccagcaccctgatcagagagatcgccaagcacacccccgagctgagccagctggtggtgaacgccggcggcgtggccgccgtgatcgactgcatcggcagctgcaagggcaacaccagactgcccggcatcatgatgctgggctacgtggccgcccacagcgagaacctggccatggccgtgatcatcagcaagggcgtgccccagctgagcgtgtgcctgagcgaggagcccgaggaccacatcaaggccgccgccgcctgggccctgggccagatcggcagacacacccccgagcacgccagagccgtggccgtgaccaacaccctgcccgtgctgctgagcctgtacatgagcaccgagagcagcgaggacctgcaggtgaagagcaagaaggccatcaagaacatcctgcagaagtgcacctacctgcccgccctggagcccttcctgtacgacgccccccccaacatcctgaagcacgtggtgggccagttcagcaaggtgctgccccacgacagcaaggccagaagactgttcgtgaccagcggcggcctgaagaaggtgcaggagatcaaggccgagcccggcagcctgctgcaggagtacatcaacagcatcaacagctgctaccccgaggagatcgtgagatactacagccccggctacagcgacaccctgctgcagagagtggacagctaccagcccctgaacaactag

SEQ ID NO: 100565 - DNA, 1506 bp, synthetic construct
  misc_feature 1..1506: note = Description of Artificial Sequence: Synthetic coding sequence
  source 1..1506: mol_type = other DNA
atggagaccaacgagagcaccgagggcagcagaagcagaagcagaagcctggacatccagcccagcagcgagggcctgggccccaccagcgagcccttccccagcagcgacgacagccccagaagcgccctggccgccgccaccgccgccgccgccgccgccgccagcgccgccgccgccaccgccgccttcaccaccgccaaggccgccgccctgagcaccaagacccccgccccctgcagcgagttcatggagcccagcagcgaccccagcctgctgggcgagccctgcgccggccccggcttcacccacaacatcgcccacggcagcctgggcttcgagcccgtgtacgtgagctgcatcgcccaggacacctgcaccaccaccgaccacagcagcaaccccggccccgtgcccggcagcagcagcggccccgtgctgggcagcagcagcggcgccggccacggcagcggcagcggcagcggccccggctgcggcagcgtgcccggcagcggcagcggccccggccccggcagcggccccggcagcggccccggccacggcagcggcagccaccccggccccgccagcggccccggccccgacaccggccccgacagcgagctgagcccctgcatcccccccggcttcagaaacctggtggccgacagagtgcccaactacaccagctggagccagcactgcccctgggagccccagaagcagcccccctgggagttcctgcaggtgctggagcccggcgccagaggcctgtggaagccccccgacatcaagggcaagctgatggtgtgctacgagaccctgcccagaggccagtgcctgctgtacaactgggaggaggagagagccaccaaccacctggaccaggtgcccagcatgcaggacggcagcgagagcttcttcttcagacacggccacagaggcctgctgaccatgcagctgaagagccccatgcccagcagcaccacccagaaggacagctaccagccccccggcaacgtgtactggcccctgagaggcaagagagaggccatgctggagatgctgctgcagcaccagatctgcaaggaggtgcaggccgagcaggagcccaccagaaagctgttcgaggtggagagcgtgacccaccacgactacagaatggagctggcccaggccggcacccccgcccccaccaagccccacgactacagacaggagcagcccgagaccttctggatccagagagccccccagctgcccacctggtggcccctgcccacccaggtgcccgccgccgaggactacctgacctggaaggagtggggcttcaccggcgtgcaggaggtgctgagcgccctgctgagagccacccccggcgagtacagcgtgaacatctgcggcatgaacgagcaccccgtgtgcagcagaacctggaccaacagactgtgccaccaggagatgggcagcaagaagaccgtgacccaggaggacagaggctggtag

SEQ ID NO: 100566 - DNA, 1458 bp, synthetic construct
  misc_feature 1..1458: note = Description of Artificial Sequence: Synthetic coding sequence
  source 1..1458: mol_type = other DNA
atggagaccaacgagagcaccgagggcagcagaagcagaagcagaagcctggacatccagcccagcagcgagggcctgggccccaccagcgagcccttccccagcagcgacgacagccccagaagcgccctggccgccgccaccgccgccgccgccgccgccgccagcgccgccgccgccaccgccgccttcaccaccgccaaggccgccgccctgagcaccaagacccccgccccctgcagcgagttcatggagcccagcagcgaccccagcctgctgggcgagccctgcgccggccccggcttcacccacaacatcgcccacggcagcctgggcttcgagcccgtgtacgtgagctgcatcgcccaggacacctgcaccaccaccgaccacagcagcaaccccggccccgtgcccggcagcagcagcggccccgtgctgggcagcagcagcggcgccggccacggcagcggcagcggcagcggccccggctgcggcagcgtgcccggcagcggcagcggccccggccccggcagcggccccggcagcggccccggccacggcagcggcagccaccccggccccgccagcggccccggccccgacaccggccccgacagcgagctgagcccctgcatcccccccggcttcagaaacctggtggccgacagagtgcccaactacaccagctggagccagcactgcccctgggagccccagaagcagcccccctgggagttcctgcaggtgctggagcccggcgccagaggcctgtggaagccccccgacatcaagggcaagctgatggtgtgctacgagaccctgcccagaggccagtgcctgctgtacaactgggaggaggagagagccaccaaccacctggaccaggtgcccagcatgcaggacggcagcgagagcttcttcttcagacacggccacagaggcctgctgaccatgcagctgaagagccccatgcccagcagcaccacccagaaggacagctaccagccccccggcaacgtgtactggcccctgagaggcaagagagaggccatgctggagatgctgctgcagcaccagatctgcaaggaggtgcaggccgagcaggagcccaccagaaagctgttcgaggtggagagcgtgacccaccacgactacagaatggagctggcccaggccggcacccccgcccccaccaagccccacgactacagacaggagcagcccgagaccttctggatccagagagccccccagctgcccggcgtgagcaacatcagaaccctggacacccccttcagaaagaactgcagcttcagcacccccgtgcccctgagcctgggcaagctgctgccctacgagcccgagaactacccctaccagctgggcgagatcagcagcctgccctgccccggcggcagactgggcggcggcggcggcagaatgacccccttctag

SEQ ID NO: 100567 - DNA, 1281 bp, synthetic construct
  misc_feature 1..1281: note = Description of Artificial Sequence: Synthetic coding sequence
  source 1..1281: mol_type = other DNA
atggagaccaacgagagcaccgagggcagcagaagcagaagcagaagcctggacatccagcccagcagcgagggcctgggccccaccagcgagcccttccccagcagcgacgacagccccagaagcgccctggccgccgccaccgccgccgccgccgccgccgccagcgccgccgccgccaccgccgccttcaccaccgccaaggccgccgccctgagcaccaagacccccgccccctgcagcgagttcatggagcccagcagcgaccccagcctgctgggcgagccctgcgccggccccggcttcacccacaacatcgcccacggcagcctgggcttcgagcccgtgtacgtgagctgcatcgcccaggacacctgcaccaccaccgaccacagcagcaaccccggccccgtgcccggcagcagcagcggccccgtgctgggcagcagcagcggcgccggccacggcagcggcagcggcagcggccccggctgcggcagcgtgcccggcagcggcagcggccccggccccggcagcggccccggcagcggccccggccacggcagcggcagccaccccggccccgccagcggccccggccccgacaccggccccgacagcgagctgagcccctgcatcccccccggcttcagaaacctggtggccgacagagtgcccaactacaccagctggagccagcactgcccctgggagccccagaagcagcccccctgggagttcctgcaggtgctggagcccggcgccagaggcctgtggaagccccccgacatcaagggcaagctgatggtgtgctacgagaccctgcccagaggccagtgcctgctgtacaactgggaggaggagagagccaccaaccacctggaccaggtgcccagcatgcaggacggcagcgagagcttcttcttcagacacggccacagaggcctgctgaccatgcagctgaagagccccatgcccagcagcaccacccagaaggacagctaccagccccccggcaacgtgtactggcccctgagaggcaagagagaggccatgctggagatgctgctgcagcaccagatctgcaaggaggtgcaggccgagcaggagcccaccagaaagctgttcgaggtggagagcgtgacccaccacgactacagaatggagctggcccaggccggcacccccgcccccaccaagccccacgactacagacaggagcagcccgagaccttctggatccagagagccccccagctgcccgtgtgcgagggcgactag

SEQ ID NO: 100568 - DNA, 3966 bp, synthetic construct
  misc_feature 1..3966: note = Description of Artificial Sequence: Synthetic coding sequence
  source 1..3966: mol_type = other DNA
atggagctggaggacggcgtggtgtaccaggaggagcccggcggcagcggcgccgtgatgagcgagagagtgagcggcctggccggcagcatctacagagagttcgagagactgatcggcagatacgacgaggaggtggtgaaggagctgatgcccctggtggtggccgtgctggagaacctggacagcgtgttcgcccaggaccaggagcaccaggtggagctggagctgctgagagacgacaacgagcagctgatcacccagtacgagagagagaaggccctgagaaagcacgccgaggagaagttcatcgagttcgaggacagccaggagcaggagaagaaggacctgcagaccagagtggagagcctggagagccagaccagacagctggagctgaaggccaagaactacgccgaccagatcagcagactggaggagagagaggccgagctgaagaaggagtacaacgccctgcaccagagacacaccgagatgatccacaactacatggagcacctggagagaaccaagctgcaccagctgagcggcagcgaccagctggagagcaccgcccacagcagaatcagaaaggagagacccatcagcctgggcatcttccccctgcccgccggcgacggcctgctgacccccgacgcccagaagggcggcgagacccccggcagcgagcagtggaagttccaggagctgagccagcccagaagccacaccagcctgaaggtgagcaacagccccgagccccagaaggccgtggagcaggaggacgagctgagcgacgtgagccagggcggcagcaaggccaccacccccgccagcaccgccaacagcgacgtggccaccatccccaccgacacccccctgaaggaggagaacgagggcttcgtgaaggtgaccgacgcccccaacaagagcgagatcagcaagcacatcgaggtgcaggtggcccaggagaccagaaacgtgagcaccggcagcgccgagaacgaggagaagagcgaggtgcaggccatcatcgagagcacccccgagctggacatggacaaggacctgagcggctacaagggcagcagcacccccaccaagggcatcgagaacaaggccttcgacagaaacaccgagagcctgttcgaggagctgagcagcgccggcagcggcctgatcggcgacgtggacgagggcgccgacctgctgggcatgggcagagaggtggagaacctgatcctggagaacacccagctgctggagaccaagaacgccctgaacatcgtgaagaacgacctgatcgccaaggtggacgagctgacctgcgagaaggacgtgctgcagggcgagctggaggccgtgaagcaggccaagctgaagctggaggagaagaacagagagctggaggaggagctgagaaaggccagagccgaggccgaggacgccagacagaaggccaaggacgacgacgacagcgacatccccaccgcccagagaaagagattcaccagagtggagatggccagagtgctgatggagagaaaccagtacaaggagagactgatggagctgcaggaggccgtgagatggaccgagatgatcagagccagcagagagaaccccgccatgcaggagaagaagagaagcagcatctggcagttcttcagcagactgttcagcagcagcagcaacaccaccaagaagcccgagccccccgtgaacctgaagtacaacgcccccaccagccacgtgacccccagcgtgaagaagagaagcagcaccctgagccagctgcccggcgacaagagcaaggccttcgacttcctgagcgaggagaccgaggccagcctggccagcagaagagagcagaagagagagcagtacagacaggtgaaggcccacgtgcagaaggaggacggcagagtgcaggccttcggctggagcctgccccagaagtacaagcaggtgaccaacggccagggcgagaacaagatgaagaacctgcccgtgcccgtgtacctgagacccctggacgagaaggacaccagcatgaagctgtggtgcgccgtgggcgtgaacctgagcggcggcaagaccagagacggcggcagcgtggtgggcgccagcgtgttctacaaggacgtggccggcctggacaccgagggcagcaagcagagaagcgccagccagagcagcctggacaagctggaccaggagctgaaggagcagcagaaggagctgaagaaccaggaggagctgagcagcctggtgtggatctgcaccagcacccacagcgccaccaaggtgctgatcatcgacgccgtgcagcccggcaacatcctggacagcttcaccgtgtgcaacagccacgtgctgtgcatcgccagcgtgcccggcgccagagagaccgactaccccgccggcgaggacctgagcgagagcggccaggtggacaaggccagcctgtgcggcagcatgaccagcaacagcagcgccgagaccgacagcctgctgggcggcatcaccgtggtgggctgcagcgccgagggcgtgaccggcgccgccaccagccccagcaccaacggcgccagccccgtgatggacaagccccccgagatggaggccgagaacagcgaggtggacgagaacgtgcccaccgccgaggaggccaccgaggccaccgagggcaacgccggcagcgccgaggacaccgtggacatcagccagaccggcgtgtacaccgagcacgtgttcaccgaccccctgggcgtgcagatccccgaggacctgagccccgtgtaccagagcagcaacgacagcgacgcctacaaggaccagatcagcgtgctgcccaacgagcaggacctggtgagagaggaggcccagaagatgagcagcctgctgcccaccatgtggctgggcgcccagaacggctgcctgtacgtgcacagcagcgtggcccagtggagaaagtgcctgcacagcatcaagctgaaggacagcatcctgagcatcgtgcacgtgaagggcatcgtgctggtggccctggccgacggcaccctggccatcttccacagaggcgtggacggccagtgggacctgagcaactaccacctgctggacctgggcagaccccaccacagcatcagatgcatgaccgtggtgcacgacaaggtgtggtgcggctacagaaacaagatctacgtggtgcagcccaaggccatgaagatcgagaagagcttcgacgcccaccccagaaaggagagccaggtgagacagctggcctgggtgggcgacggcgtgtgggtgagcatcagactggacagcaccctgagactgtaccacgcccacacctaccagcacctgcaggacgtggacatcgagccctacgtgagcaagatgctgggcaccggcaagctgggcttcagcttcgtgagaatcaccgccctgatggtgagctgcaacagactgtgggtgggcaccggcaacggcgtgatcatcagcatccccctgaccgagaccaacaagaccagcggcgtgcccggcaacagacccggcagcgtgatcagagtgtacggcgacgagaacagcgacaaggtgacccccggcaccttcatcccctactgcagcatggcccacgcccagctgtgcttccacggccacagagacgccgtgaagttcttcgtggccgtgcccggccaggtgatcagcccccagagcagcagcagcggcaccgacctgaccggcgacaaggccggccccagcgcccaggagcccggcagccagacccccctgaagagcatgctggtgatcagcggcggcgagggctacatcgacttcagaatgggcgacgagggcggcgagagcgagctgctgggcgaggacctgcccctggagcccagcgtgaccaaggccgagagaagccacctgatcgtgtggcaggtgatgtacggcaacgagtag

SEQ ID NO: 100569 - DNA, 3924 bp, synthetic construct
  misc_feature 1..3924: note = Description of Artificial Sequence: Synthetic coding sequence
  source 1..3924: mol_type = other DNA
atggagctggaggacggcgtggtgtaccaggaggagcccggcggcagcggcgccgtgatgagcgagagagtgagcggcctggccggcagcatctacagagagttcgagagactgatcggcagatacgacgaggaggtggtgaaggagctgatgcccctggtggtggccgtgctggagaacctggacagcgtgttcgcccaggaccaggagcaccaggtggagctggagctgctgagagacgacaacgagcagctgatcacccagtacgagagagagaaggccctgagaaagcacgccgaggagaagttcatcgagttcgaggacagccaggagcaggagaagaaggacctgcagaccagagtggagagcctggagagccagaccagacagctggagctgaaggccaagaactacgccgaccagatcagcagactggaggagagagaggccgagctgaagaaggagtacaacgccctgcaccagagacacaccgagatgatccacaactacatggagcacctggagagaaccaagctgcaccagctgagcggcagcgaccagctggagagcaccgcccacagcagaatcagaaaggagagacccatcagcctgggcatcttccccctgcccgccggcgacggcctgctgacccccgacgcccagaagggcggcgagacccccggcagcgagcagtggaagttccaggagctgagccagcccagaagccacaccagcctgaaggacgagctgagcgacgtgagccagggcggcagcaaggccaccacccccgccagcaccgccaacagcgacgtggccaccatccccaccgacacccccctgaaggaggagaacgagggcttcgtgaaggtgaccgacgcccccaacaagagcgagatcagcaagcacatcgaggtgcaggtggcccaggagaccagaaacgtgagcaccggcagcgccgagaacgaggagaagagcgaggtgcaggccatcatcgagagcacccccgagctggacatggacaaggacctgagcggctacaagggcagcagcacccccaccaagggcatcgagaacaaggccttcgacagaaacaccgagagcctgttcgaggagctgagcagcgccggcagcggcctgatcggcgacgtggacgagggcgccgacctgctgggcatgggcagagaggtggagaacctgatcctggagaacacccagctgctggagaccaagaacgccctgaacatcgtgaagaacgacctgatcgccaaggtggacgagctgacctgcgagaaggacgtgctgcagggcgagctggaggccgtgaagcaggccaagctgaagctggaggagaagaacagagagctggaggaggagctgagaaaggccagagccgaggccgaggacgccagacagaaggccaaggacgacgacgacagcgacatccccaccgcccagagaaagagattcaccagagtggagatggccagagtgctgatggagagaaaccagtacaaggagagactgatggagctgcaggaggccgtgagatggaccgagatgatcagagccagcagagagaaccccgccatgcaggagaagaagagaagcagcatctggcagttcttcagcagactgttcagcagcagcagcaacaccaccaagaagcccgagccccccgtgaacctgaagtacaacgcccccaccagccacgtgacccccagcgtgaagaagagaagcagcaccctgagccagctgcccggcgacaagagcaaggccttcgacttcctgagcgaggagaccgaggccagcctggccagcagaagagagcagaagagagagcagtacagacaggtgaaggcccacgtgcagaaggaggacggcagagtgcaggccttcggctggagcctgccccagaagtacaagcaggtgaccaacggccagggcgagaacaagatgaagaacctgcccgtgcccgtgtacctgagacccctggacgagaaggacaccagcatgaagctgtggtgcgccgtgggcgtgaacctgagcggcggcaagaccagagacggcggcagcgtggtgggcgccagcgtgttctacaaggacgtggccggcctggacaccgagggcagcaagcagagaagcgccagccagagcagcctggacaagctggaccaggagctgaaggagcagcagaaggagctgaagaaccaggaggagctgagcagcctggtgtggatctgcaccagcacccacagcgccaccaaggtgctgatcatcgacgccgtgcagcccggcaacatcctggacagcttcaccgtgtgcaacagccacgtgctgtgcatcgccagcgtgcccggcgccagagagaccgactaccccgccggcgaggacctgagcgagagcggccaggtggacaaggccagcctgtgcggcagcatgaccagcaacagcagcgccgagaccgacagcctgctgggcggcatcaccgtggtgggctgcagcgccgagggcgtgaccggcgccgccaccagccccagcaccaacggcgccagccccgtgatggacaagccccccgagatggaggccgagaacagcgaggtggacgagaacgtgcccaccgccgaggaggccaccgaggccaccgagggcaacgccggcagcgccgaggacaccgtggacatcagccagaccggcgtgtacaccgagcacgtgttcaccgaccccctgggcgtgcagatccccgaggacctgagccccgtgtaccagagcagcaacgacagcgacgcctacaaggaccagatcagcgtgctgcccaacgagcaggacctggtgagagaggaggcccagaagatgagcagcctgctgcccaccatgtggctgggcgcccagaacggctgcctgtacgtgcacagcagcgtggcccagtggagaaagtgcctgcacagcatcaagctgaaggacagcatcctgagcatcgtgcacgtgaagggcatcgtgctggtggccctggccgacggcaccctggccatcttccacagaggcgtggacggccagtgggacctgagcaactaccacctgctggacctgggcagaccccaccacagcatcagatgcatgaccgtggtgcacgacaaggtgtggtgcggctacagaaacaagatctacgtggtgcagcccaaggccatgaagatcgagaagagcttcgacgcccaccccagaaaggagagccaggtgagacagctggcctgggtgggcgacggcgtgtgggtgagcatcagactggacagcaccctgagactgtaccacgcccacacctaccagcacctgcaggacgtggacatcgagccctacgtgagcaagatgctgggcaccggcaagctgggcttcagcttcgtgagaatcaccgccctgatggtgagctgcaacagactgtgggtgggcaccggcaacggcgtgatcatcagcatccccctgaccgagaccaacaagaccagcggcgtgcccggcaacagacccggcagcgtgatcagagtgtacggcgacgagaacagcgacaaggtgacccccggcaccttcatcccctactgcagcatggcccacgcccagctgtgcttccacggccacagagacgccgtgaagttcttcgtggccgtgcccggccaggtgatcagcccccagagcagcagcagcggcaccgacctgaccggcgacaaggccggccccagcgcccaggagcccggcagccagacccccctgaagagcatgctggtgatcagcggcggcgagggctacatcgacttcagaatgggcgacgagggcggcgagagcgagctgctgggcgaggacctgcccctggagcccagcgtgaccaaggccgagagaagccacctgatcgtgtggcaggtgatgtacggcaacgagtag

SEQ ID NO: 100570 - DNA, 1908 bp, synthetic construct
  misc_feature 1..1908: note = Description of Artificial Sequence: Synthetic coding sequence
  source 1..1908: mol_type = other DNA
agcctgaaggacgagctgagcgacgtgagccagggcggcagcaaggccaccacccccgccagcaccgccaacagcgacgtggccaccatccccaccgacacccccctgaaggaggagaacgagggcttcgtgaaggtgaccgacgcccccaacaagagcgagatcagcaagcacatcgaggtgcaggtggcccaggagaccagaaacgtgagcaccggcagcgccgagaacgaggagaagagcgaggtgcaggccatcatcgagagcacccccgagctggacatggacaaggacctgagcggctacaagggcagcagcacccccaccaagggcatcgagaacaaggccttcgacagaaacaccgagagcctgttcgagaagagaagcagcaccctgagccagctgcccggcgacaagagcaaggccttcgacttcctgagcgaggagaccgaggccagcctggccagcagaagagagcagaagagagagcagtacagacaggtgaaggcccacgtgcagaaggaggacggcagagtgcaggccttcggctggagcctgccccagaagtacaagcaggtgaccaacggccagggcgagaacaagatgaagaacctgcccgtgcccgtgtacctgagacccctggacgagaaggacaccagcatgaagaagctgtggtgcgccgtgggcgtgaacctgagcggcggcaagaccagagacggcggcagcgtggtgggcgccagcgtgttctacaaggacgtggccggcctggacaccgagggcagcaagcagagaagcgccagccagagcagcctggacaagctggaccaggagctgaaggagcagcagaaggagctgaagaaccaggaggagctgagcagcctggtgtggatctgcaccagcacccacagcgccaccaaggtgctgatcatcgacgccgtgcagcccggcaacatcctggacagcttcaccgtgtgcaacagccacgtgctgtgcatcgccagcgtgcccggcgccagagagaccgactaccccgccggcgaggacctgagcgagagcggccaggtggacaaggccagcctgtgcggcagcatgaccagcaacagcagcgccgagaccgacagcctgctgggcggcatcaccgtggtgggctgcagcgccgagggcgtgaccggcgccgccaccagccccagcaccaacggcgccagccccgtgatggacaagccccccgagatggaggccgagaacagcgaggtggacgagaacgtgcccaccgccgaggaggccaccgaggccaccgagggcaacgccggcagcgccgaggacaccgtggacatcagccagaccggcgtgtacaccgagcacgtgttcaccgaccccctgggcgtgcagatccccgaggacctgagccccgtgtaccagagcagcaacgacagcgacgcctacaaggaccagatcagcgtgctgcccaacgagcaggacctggtgagagaggaggcccagaagatgagcagcctgctgcccaccatgtggctgggcgcccagaacggctgcctgtacgtgcacagcagcgtggcccagtggagaaagtgcctgcacagcatcaagctgaaggacagcatcctgagcatcgtgcacgtgaagggcatcgtgctggtggccctggccgacggcaccctggccatcttccacagaggcgtggacggccagtgggacctgagcaactaccacctgctggacctgggcagaccccaccacagcatcagatgcatgaccgtggtgcacgacaaggtgtggtgcggctacagaaacaagatctacgtgctgcacagcagcctgggcgacggcgccagaccctgcctgaagaccgacaagcaggccaagaacagactgaagagcggcttccactag

SEQ ID NO: 100571 - DNA, 3207 bp, synthetic construct
  misc_feature 1..3207: note = Description of Artificial Sequence: Synthetic coding sequence
  source 1..3207: mol_type = other DNA
agcctgaaggacgagctgagcgacgtgagccagggcggcagcaaggccaccacccccgccagcaccgccaacagcgacgtggccaccatccccaccgacacccccctgaaggaggagaacgagggcttcgtgaaggtgaccgacgcccccaacaagagcgagatcagcaagcacatcgaggtgcaggtggcccaggagaccagaaacgtgagcaccggcagcgccgagaacgaggagaagagcgaggtgcaggccatcatcgagagcacccccgagctggacatggacaaggacctgagcggctacaagggcagcagcacccccaccaagggcatcgagaacaaggccttcgacagaaacaccgagagcctgttcgaggagctgagcagcgccggcagcggcctgatcggcgacgtggacgagggcgccgacctgctgggcatgggcagagaggtggagaacctgatcctggagaacacccagctgctggagaccaagaacgccctgaacatcgtgaagaacgacctgatcgccaaggtggacgagctgacctgcgagaaggacgtgctgcagggcgagctggaggccgtgaagcaggccaagctgaagctggaggagaagaacagagagctggaggaggagctgagaaaggccagagccgaggccgaggacgccagacagaaggccaaggacgacgacgacagcgacatccccaccgcccagagaaagagattcaccagagtggagatggccagagtgctgatggagagaaaccagtacaaggagagactgatggagctgcaggaggccgtgagatggaccgagatgatcagagccagcagagagaaccccgccatgcaggagaagaagagaagcagcatctggcagttcgtgcccaccagattcagcagactgttcagcagcagcagcaacaccaccaagaagcccgagccccccgtgaacctgaagtacaacgcccccaccagccacgtgacccccagcgtgaagaagagaagcagcaccctgagccagctgcccggcgacaagagcaaggccttcgacttcctgagcgaggagaccgaggccagcctggccagcagaagagagcagaagagagagcagtacagacaggtgaaggcccacgtgcagaaggaggacggcagagtgcaggccttcggctggagcctgccccagaagtacaagcaggtgaccaacggccagggcgagaacaagatgaagaacctgcccgtgcccgtgtacctgagacccctggacgagaaggacaccagcatgaagaagctgtggtgcgccgtgggcgtgaacctgagcggcggcaagaccagagacggcggcagcgtggtgggcgccagcgtgttctacaaggacgtggccggcctggacaccgagggcagcaagcagagaagcgccagccagagcagcctggacaagctggaccaggagctgaaggagcagcagaaggagctgaagaaccaggaggagctgagcagcctggtgtggatctgcaccagcacccacagcgccaccaaggtgctgatcatcgacgccgtgcagcccggcaacatcctggacagcttcaccgtgtgcaacagccacgtgctgtgcatcgccagcgtgcccggcgccagagagaccgactaccccgccggcgaggacctgagcgagagcggccaggtggacaaggccagcctgtgcggcagcatgaccagcaacagcagcgccgagaccgacagcctgctgggcggcatcaccgtggtgggctgcagcgccgagggcgtgaccggcgccgccaccagccccagcaccaacggcgccagccccgtgatggacaagccccccgagatggaggccgagaacagcgaggtggacgagaacgtgcccaccgccgaggaggccaccgaggccaccgagggcaacgccggcagcgccgaggacaccgtggacatcagccagaccggcgtgtacaccgagcacgtgttcaccgaccccctgggcgtgcagatccccgaggacctgagccccgtgtaccagagcagcaacgacagcgacgcctacaaggaccagatcagcgtgctgcccaacgagcaggacctggtgagagaggaggcccagaagatgagcagcctgctgcccaccatgtggctgggcgcccagaacggctgcctgtacgtgcacagcagcgtggcccagtggagaaagtgcctgcacagcatcaagctgaaggacagcatcctgagcatcgtgcacgtgaagggcatcgtgctggtggccctggccgacggcaccctggccatcttccacagaggcgtggacggccagtgggacctgagcaactaccacctgctggacctgggcagaccccaccacagcatcagatgcatgaccgtggtgcacgacaaggtgtggtgcggctacagaaacaagatctacgtggtgcagcccaaggccatgaagatcgagaagagcttcgacgcccaccccagaaaggagagccaggtgagacagctggcctgggtgggcgacggcgtgtgggtgagcatcagactggacagcaccctgagactgtaccacgcccacacctaccagcacctgcaggacgtggacatcgagccctacgtgagcaagatgctgggcaccggcaagctgggcttcagcttcgtgagaatcaccgccctgatggtgagctgcaacagactgtgggtgggcaccggcaacggcgtgatcatcagcatccccctgaccgagaccaacaagaccagcggcgtgcccggcaacagacccggcagcgtgatcagagtgtacggcgacgagaacagcgacaaggtgacccccggcaccttcatcccctactgcagcatggcccacgcccagctgtgcttccacggccacagagacgccgtgaagttcttcgtggccgtgcccggccaggtgatcagcccccagagcagcagcagcggcaccgacctgaccggcgacaaggccggccccagcgcccaggagcccggcagccagacccccctgaagagcatgctggtgatcagcggcggcgagggctacatcgacttcagaatgggcgacgagggcggcgagagcgagctgctgggcgaggacctgcccctggagcccagcgtgaccaaggccgagagaagccacctgatcgtgtggcaggtgatgtacggcaacgagtag

SEQ ID NO: 100572 - DNA, 3237 bp, synthetic construct
  misc_feature 1..3237: note = Description of Artificial Sequence: Synthetic coding sequence
  source 1..3237: mol_type = other DNA
agcgtgaaggtgagcaacagccccgagccccagaaggccgtggagcaggaggacgagctgagcgacgtgagccagggcggcagcaaggccaccacccccgccagcaccgccaacagcgacgtggccaccatccccaccgacacccccctgaaggaggagaacgagggcttcgtgaaggtgaccgacgcccccaacaagagcgagatcagcaagcacatcgaggtgcaggtggcccaggagaccagaaacgtgagcaccggcagcgccgagaacgaggagaagagcgaggtgcaggccatcatcgagagcacccccgagctggacatggacaaggacctgagcggctacaagggcagcagcacccccaccaagggcatcgagaacaaggccttcgacagaaacaccgagagcctgttcgaggagctgagcagcgccggcagcggcctgatcggcgacgtggacgagggcgccgacctgctgggcatgggcagagaggtggagaacctgatcctggagaacacccagctgctggagaccaagaacgccctgaacatcgtgaagaacgacctgatcgccaaggtggacgagctgacctgcgagaaggacgtgctgcagggcgagctggaggccgtgaagcaggccaagctgaagctggaggagaagaacagagagctggaggaggagctgagaaaggccagagccgaggccgaggacgccagacagaaggccaaggacgacgacgacagcgacatccccaccgcccagagaaagagattcaccagagtggagatggccagagtgctgatggagagaaaccagtacaaggagagactgatggagctgcaggaggccgtgagatggaccgagatgatcagagccagcagagagaaccccgccatgcaggagaagaagagaagcagcatctggcagttcttcagcagactgttcagcagcagcagcaacaccaccaagaagcccgagccccccgtgaacctgaagtacaacgcccccaccagccacgtgacccccagcgtgaagaagagaagcagcaccctgagccagctgcccggcgacaagagcaaggccttcgacttcctgagcgaggagaccgaggccagcctggccagcagaagagagcagaagagagagcagtacagacaggtgaaggcccacgtgcagaaggaggacggcagagtgcaggccttcggctggagcctgccccagaagtacaagcaggtgaccaacggccagggcgagaacaagatgaagaacctgcccgtgcccgtgtacctgagacccctggacgagaaggacaccagcatgaagaagctgtggtgcgccgtgggcgtgaacctgagcggcggcaagaccagagacggcggcagcgtggtgggcgccagcgtgttctacaaggacgtggccggcctggacaccgagggcagcaagcagagaagcgccagccagagcagcctggacaagctggaccaggagctgaaggagcagcagaaggagctgaagaaccaggaggagctgagcagcctggtgtggatctgcaccagcacccacagcgccaccaaggtgctgatcatcgacgccgtgcagcccggcaacatcctggacagcttcaccgtgtgcaacagccacgtgctgtgcatcgccagcgtgcccggcgccagagagaccgactaccccgccggcgaggacctgagcgagagcggccaggtggacaaggccagcctgtgcggcagcatgaccagcaacagcagcgccgagaccgacagcctgctgggcggcatcaccgtggtgggctgcagcgccgagggcgtgaccggcgccgccaccagccccagcaccaacggcgccagccccgtgatggacaagccccccgagatggaggccgagaacagcgaggtggacgagaacgtgcccaccgccgaggaggccaccgaggccaccgagggcaacgccggcagcgccgaggacaccgtggacatcagccagaccggcgtgtacaccgagcacgtgttcaccgaccccctgggcgtgcagatccccgaggacctgagccccgtgtaccagagcagcaacgacagcgacgcctacaaggaccagatcagcgtgctgcccaacgagcaggacctggtgagagaggaggcccagaagatgagcagcctgctgcccaccatgtggctgggcgcccagaacggctgcctgtacgtgcacagcagcgtggcccagtggagaaagtgcctgcacagcatcaagctgaaggacagcatcctgagcatcgtgcacgtgaagggcatcgtgctggtggccctggccgacggcaccctggccatcttccacagaggcgtggacggccagtgggacctgagcaactaccacctgctggacctgggcagaccccaccacagcatcagatgcatgaccgtggtgcacgacaaggtgtggtgcggctacagaaacaagatctacgtggtgcagcccaaggccatgaagatcgagaagagcttcgacgcccaccccagaaaggagagccaggtgagacagctggcctgggtgggcgacggcgtgtgggtgagcatcagactggacagcaccctgagactgtaccacgcccacacctaccagcacctgcaggacgtggacatcgagccctacgtgagcaagatgctgggcaccggcaagctgggcttcagcttcgtgagaatcaccgccctgatggtgagctgcaacagactgtgggtgggcaccggcaacggcgtgatcatcagcatccccctgaccgagaccaacaagaccagcggcgtgcccggcaacagacccggcagcgtgatcagagtgtacggcgacgagaacagcgacaaggtgacccccggcaccttcatcccctactgcagcatggcccacgcccagctgtgcttccacggccacagagacgccgtgaagttcttcgtggccgtgcccggccaggtgatcagcccccagagcagcagcagcggcaccgacctgaccggcgacaaggccggccccagcgcccaggagcccggcagccagacccccctgaagagcatgctggtgatcagcggcggcgagggctacatcgacttcagaatgggcgacgagggcggcgagagcgagctgctgggcgaggacctgcccctggagcccagcgtgaccaaggccgagagaagccacctgatcgtgtggcaggtgatgtacggcaacgagtag

SEQ ID NO: 100573 - DNA, 3936 bp, synthetic construct
  misc_feature 1..3936: note = Description of Artificial Sequence: Synthetic coding sequence
  source 1..3936: mol_type = other DNA
atggagctggaggacggcgtggtgtaccaggaggagcccggcggcagcggcgccgtgatgagcgagagagtgagcggcctggccggcagcatctacagagagttcgagagactgatcggcagatacgacgaggaggtggtgaaggagctgatgcccctggtggtggccgtgctggagaacctggacagcgtgttcgcccaggaccaggagcaccaggtggagctggagctgctgagagacgacaacgagcagctgatcacccagtacgagagagagaaggccctgagaaagcacgccgaggagaagttcatcgagttcgaggacagccaggagcaggagaagaaggacctgcagaccagagtggagagcctggagagccagaccagacagctggagctgaaggccaagaactacgccgaccagatcagcagactggaggagagagaggccgagctgaagaaggagtacaacgccctgcaccagagacacaccgagatgatccacaactacatggagcacctggagagaaccaagctgcaccagctgagcggcagcgaccagctggagagcaccgcccacagcagaatcagaaaggagagacccatcagcctgggcatcttccccctgcccgccggcgacggcctgctgacccccgacgcccagaagggcggcgagacccccggcagcgagcagtggaagttccaggagctgagccagcccagaagccacaccagcctgaaggacgagctgagcgacgtgagccagggcggcagcaaggccaccacccccgccagcaccgccaacagcgacgtggccaccatccccaccgacacccccctgaaggaggagaacgagggcttcgtgaaggtgaccgacgcccccaacaagagcgagatcagcaagcacatcgaggtgcaggtggcccaggagaccagaaacgtgagcaccggcagcgccgagaacgaggagaagagcgaggtgcaggccatcatcgagagcacccccgagctggacatggacaaggacctgagcggctacaagggcagcagcacccccaccaagggcatcgagaacaaggccttcgacagaaacaccgagagcctgttcgaggagctgagcagcgccggcagcggcctgatcggcgacgtggacgagggcgccgacctgctgggcatgggcagagaggtggagaacctgatcctggagaacacccagctgctggagaccaagaacgccctgaacatcgtgaagaacgacctgatcgccaaggtggacgagctgacctgcgagaaggacgtgctgcagggcgagctggaggccgtgaagcaggccaagctgaagctggaggagaagaacagagagctggaggaggagctgagaaaggccagagccgaggccgaggacgccagacagaaggccaaggacgacgacgacagcgacatccccaccgcccagagaaagagattcaccagagtggagatggccagagtgctgatggagagaaaccagtacaaggagagactgatggagctgcaggaggccgtgagatggaccgagatgatcagagccagcagagagaaccccgccatgcaggagaagaagagaagcagcatctggcagttcgtgcccaccagattcagcagactgttcagcagcagcagcaacaccaccaagaagcccgagccccccgtgaacctgaagtacaacgcccccaccagccacgtgacccccagcgtgaagaagagaagcagcaccctgagccagctgcccggcgacaagagcaaggccttcgacttcctgagcgaggagaccgaggccagcctggccagcagaagagagcagaagagagagcagtacagacaggtgaaggcccacgtgcagaaggaggacggcagagtgcaggccttcggctggagcctgccccagaagtacaagcaggtgaccaacggccagggcgagaacaagatgaagaacctgcccgtgcccgtgtacctgagacccctggacgagaaggacaccagcatgaagctgtggtgcgccgtgggcgtgaacctgagcggcggcaagaccagagacggcggcagcgtggtgggcgccagcgtgttctacaaggacgtggccggcctggacaccgagggcagcaagcagagaagcgccagccagagcagcctggacaagctggaccaggagctgaaggagcagcagaaggagctgaagaaccaggaggagctgagcagcctggtgtggatctgcaccagcacccacagcgccaccaaggtgctgatcatcgacgccgtgcagcccggcaacatcctggacagcttcaccgtgtgcaacagccacgtgctgtgcatcgccagcgtgcccggcgccagagagaccgactaccccgccggcgaggacctgagcgagagcggccaggtggacaaggccagcctgtgcggcagcatgaccagcaacagcagcgccgagaccgacagcctgctgggcggcatcaccgtggtgggctgcagcgccgagggcgtgaccggcgccgccaccagccccagcaccaacggcgccagccccgtgatggacaagccccccgagatggaggccgagaacagcgaggtggacgagaacgtgcccaccgccgaggaggccaccgaggccaccgagggcaacgccggcagcgccgaggacaccgtggacatcagccagaccggcgtgtacaccgagcacgtgttcaccgaccccctgggcgtgcagatccccgaggacctgagccccgtgtaccagagcagcaacgacagcgacgcctacaaggaccagatcagcgtgctgcccaacgagcaggacctggtgagagaggaggcccagaagatgagcagcctgctgcccaccatgtggctgggcgcccagaacggctgcctgtacgtgcacagcagcgtggcccagtggagaaagtgcctgcacagcatcaagctgaaggacagcatcctgagcatcgtgcacgtgaagggcatcgtgctggtggccctggccgacggcaccctggccatcttccacagaggcgtggacggccagtgggacctgagcaactaccacctgctggacctgggcagaccccaccacagcatcagatgcatgaccgtggtgcacgacaaggtgtggtgcggctacagaaacaagatctacgtggtgcagcccaaggccatgaagatcgagaagagcttcgacgcccaccccagaaaggagagccaggtgagacagctggcctgggtgggcgacggcgtgtgggtgagcatcagactggacagcaccctgagactgtaccacgcccacacctaccagcacctgcaggacgtggacatcgagccctacgtgagcaagatgctgggcaccggcaagctgggcttcagcttcgtgagaatcaccgccctgatggtgagctgcaacagactgtgggtgggcaccggcaacggcgtgatcatcagcatccccctgaccgagaccaacaagaccagcggcgtgcccggcaacagacccggcagcgtgatcagagtgtacggcgacgagaacagcgacaaggtgacccccggcaccttcatcccctactgcagcatggcccacgcccagctgtgcttccacggccacagagacgccgtgaagttcttcgtggccgtgcccggccaggtgatcagcccccagagcagcagcagcggcaccgacctgaccggcgacaaggccggccccagcgcccaggagcccggcagccagacccccctgaagagcatgctggtgatcagcggcggcgagggctacatcgacttcagaatgggcgacgagggcggcgagagcgagctgctgggcgaggacctgcccctggagcccagcgtgaccaaggccgagagaagccacctgatcgtgtggcaggtgatgtacggcaacgagtag

SEQ ID NO: 100574 - DNA, 3534 bp, synthetic construct
  misc_feature 1..3534: note = Description of Artificial Sequence: Synthetic coding sequence
  source 1..3534: mol_type = other DNA
atgagccccggctgcatgctgctgttcgtgttcggcttcgtgggcggcgccgtggtgatcaacagcgccatcctggtgagcctgagcgtgctgctgctggtgcacttcagcatcagcaccggcgtgcccgccctgacccagaacctgcccagaatcctgagaaaggagagacccatcagcctgggcatcttccccctgcccgccggcgacggcctgctgacccccgacgcccagaagggcggcgagacccccggcagcgagcagtggaagttccaggagctgagccagcccagaagccacaccagcctgaaggacgagctgagcgacgtgagccagggcggcagcaaggccaccacccccgccagcaccgccaacagcgacgtggccaccatccccaccgacacccccctgaaggaggagaacgagggcttcgtgaaggtgaccgacgcccccaacaagagcgagatcagcaagcacatcgaggtgcaggtggcccaggagaccagaaacgtgagcaccggcagcgccgagaacgaggagaagagcgaggtgcaggccatcatcgagagcacccccgagctggacatggacaaggacctgagcggctacaagggcagcagcacccccaccaagggcatcgagaacaaggccttcgacagaaacaccgagagcctgttcgaggagctgagcagcgccggcagcggcctgatcggcgacgtggacgagggcgccgacctgctgggcatgggcagagaggtggagaacctgatcctggagaacacccagctgctggagaccaagaacgccctgaacatcgtgaagaacgacctgatcgccaaggtggacgagctgacctgcgagaaggacgtgctgcagggcgagctggaggccgtgaagcaggccaagctgaagctggaggagaagaacagagagctggaggaggagctgagaaaggccagagccgaggccgaggacgccagacagaaggccaaggacgacgacgacagcgacatccccaccgcccagagaaagagattcaccagagtggagatggccagagtgctgatggagagaaaccagtacaaggagagactgatggagctgcaggaggccgtgagatggaccgagatgatcagagccagcagagagaaccccgccatgcaggagaagaagagaagcagcatctggcagttcttcagcagactgttcagcagcagcagcaacaccaccaagaagcccgagccccccgtgaacctgaagtacaacgcccccaccagccacgtgacccccagcgtgaagaagagaagcagcaccctgagccagctgcccggcgacaagagcaaggccttcgacttcctgagcgaggagaccgaggccagcctggccagcagaagagagcagaagagagagcagtacagacaggtgaaggcccacgtgcagaaggaggacggcagagtgcaggccttcggctggagcctgccccagaagtacaagcaggtgaccaacggccagggcgagaacaagatgaagaacctgcccgtgcccgtgtacctgagacccctggacgagaaggacaccagcatgaagctgtggtgcgccgtgggcgtgaacctgagcggcggcaagaccagagacggcggcagcgtggtgggcgccagcgtgttctacaaggacgtggccggcctggacaccgagggcagcaagcagagaagcgccagccagagcagcctggacaagctggaccaggagctgaaggagcagcagaaggagctgaagaaccaggaggagctgagcagcctggtgtggatctgcaccagcacccacagcgccaccaaggtgctgatcatcgacgccgtgcagcccggcaacatcctggacagcttcaccgtgtgcaacagccacgtgctgtgcatcgccagcgtgcccggcgccagagagaccgactaccccgccggcgaggacctgagcgagagcggccaggtggacaaggccagcctgtgcggcagcatgaccagcaacagcagcgccgagaccgacagcctgctgggcggcatcaccgtggtgggctgcagcgccgagggcgtgaccggcgccgccaccagccccagcaccaacggcgccagccccgtgatggacaagccccccgagatggaggccgagaacagcgaggtggacgagaacgtgcccaccgccgaggaggccaccgaggccaccgagggcaacgccggcagcgccgaggacaccgtggacatcagccagaccggcgtgtacaccgagcacgtgttcaccgaccccctgggcgtgcagatccccgaggacctgagccccgtgtaccagagcagcaacgacagcgacgcctacaaggaccagatcagcgtgctgcccaacgagcaggacctggtgagagaggaggcccagaagatgagcagcctgctgcccaccatgtggctgggcgcccagaacggctgcctgtacgtgcacagcagcgtggcccagtggagaaagtgcctgcacagcatcaagctgaaggacagcatcctgagcatcgtgcacgtgaagggcatcgtgctggtggccctggccgacggcaccctggccatcttccacagaggcgtggacggccagtgggacctgagcaactaccacctgctggacctgggcagaccccaccacagcatcagatgcatgaccgtggtgcacgacaaggtgtggtgcggctacagaaacaagatctacgtggtgcagcccaaggccatgaagatcgagaagagcttcgacgcccaccccagaaaggagagccaggtgagacagctggcctgggtgggcgacggcgtgtgggtgagcatcagactggacagcaccctgagactgtaccacgcccacacctaccagcacctgcaggacgtggacatcgagccctacgtgagcaagatgctgggcaccggcaagctgggcttcagcttcgtgagaatcaccgccctgatggtgagctgcaacagactgtgggtgggcaccggcaacggcgtgatcatcagcatccccctgaccgagaccgtgatcctgcaccagggcagactgctgggcctgagagccaacaagaccagcggcgtgcccggcaacagacccggcagcgtgatcagagtgtacggcgacgagaacagcgacaaggtgacccccggcaccttcatcccctactgcagcatggcccacgcccagctgtgcttccacggccacagagacgccgtgaagttcttcgtggccgtgcccggccaggtgatcagcccccagagcagcagcagcggcaccgacctgaccggcgacaaggccggccccagcgcccaggagcccggcagccagacccccctgaagagcatgctggtgatcagcggcggcgagggctacatcgacttcagaatgggcgacgagggcggcgagagcgagctgctgggcgaggacctgcccctggagcccagcgtgaccaaggccgagagaagccacctgatcgtgtggcaggtgatgtacggcaacgagtag

SEQ ID NO: 100575 - DNA, 2760 bp, synthetic construct
  misc_feature 1..2760: note = Description of Artificial Sequence: Synthetic coding sequence
  source 1..2760: mol_type = other DNA
atggtgatgagatggggcgagagaaacgacgtgatcgcctgggagctgctgcaggacggcgtggagaacgccctgaacatcgtgaagaacgacctgatcgccaaggtggacgagctgacctgcgagaaggacgtgctgcagggcgagctggaggccgtgaagcaggccaagctgaagctggaggagaagaacagagagctggaggaggagctgagaaaggccagagccgaggccgaggacgccagacagaaggccaaggacgacgacgacagcgacatccccaccgcccagagaaagagattcaccagagtggagatggccagagtgctgatggagagaaaccagtacaaggagagactgatggagctgcaggaggccgtgagatggaccgagatgatcagagccagcagagagaaccccgccatgcaggagaagaagagaagcagcatctggcagttcttcagcagactgttcagcagcagcagcaacaccaccaagaagcccgagccccccgtgaacctgaagtacaacgcccccaccagccacgtgacccccagcgtgaagaagagaagcagcaccctgagccagctgcccggcgacaagagcaaggccttcgacttcctgagcgaggagaccgaggccagcctggccagcagaagagagcagaagagagagcagtacagacaggtgaaggcccacgtgcagaaggaggacggcagagtgcaggccttcggctggagcctgccccagaagtacaagcaggtgaccaacggccagggcgagaacaagatgaagaacctgcccgtgcccgtgtacctgagacccctggacgagaaggacaccagcatgaagctgtggtgcgccgtgggcgtgaacctgagcggcggcaagaccagagacggcggcagcgtggtgggcgccagcgtgttctacaaggacgtggccggcctggacaccgagggcagcaagcagagaagcgccagccagagcagcctggacaagctggaccaggagctgaaggagcagcagaaggagctgaagaaccaggaggagctgagcagcctggtgtggatctgcaccagcacccacagcgccaccaaggtgctgatcatcgacgccgtgcagcccggcaacatcctggacagcttcaccgtgtgcaacagccacgtgctgtgcatcgccagcgtgcccggcgccagagagaccgactaccccgccggcgaggacctgagcgagagcggccaggtggacaaggccagcctgtgcggcagcatgaccagcaacagcagcgccgagaccgacagcctgctgggcggcatcaccgtggtgggctgcagcgccgagggcgtgaccggcgccgccaccagccccagcaccaacggcgccagccccgtgatggacaagccccccgagatggaggccgagaacagcgaggtggacgagaacgtgcccaccgccgaggaggccaccgaggccaccgagggcaacgccggcagcgccgaggacaccgtggacatcagccagaccggcgtgtacaccgagcacgtgttcaccgaccccctgggcgtgcagatccccgaggacctgagccccgtgtaccagagcagcaacgacagcgacgcctacaaggaccagatcagcgtgctgcccaacgagcaggacctggtgagagaggaggcccagaagatgagcagcctgctgcccaccatgtggctgggcgcccagaacggctgcctgtacgtgcacagcagcgtggcccagtggagaaagtgcctgcacagcatcaagctgaaggacagcatcctgagcatcgtgcacgtgaagggcatcgtgctggtggccctggccgacggcaccctggccatcttccacagaggcgtggacggccagtgggacctgagcaactaccacctgctggacctgggcagaccccaccacagcatcagatgcatgaccgtggtgcacgacaaggtgtggtgcggctacagaaacaagatctacgtggtgcagcccaaggccatgaagatcgagaagagcttcgacgcccaccccagaaaggagagccaggtgagacagctggcctgggtgggcgacggcgtgtgggtgagcatcagactggacagcaccctgagactgtaccacgcccacacctaccagcacctgcaggacgtggacatcgagccctacgtgagcaagatgctgggcaccggcaagctgggcttcagcttcgtgagaatcaccgccctgatggtgagctgcaacagactgtgggtgggcaccggcaacggcgtgatcatcagcatccccctgaccgagaccaacaagaccagcggcgtgcccggcaacagacccggcagcgtgatcagagtgtacggcgacgagaacagcgacaaggtgacccccggcaccttcatcccctactgcagcatggcccacgcccagctgtgcttccacggccacagagacgccgtgaagttcttcgtggccgtgcccggccaggtgatcagcccccagagcagcagcagcggcaccgacctgaccggcgacaaggccggccccagcgcccaggagcccggcagccagacccccctgaagagcatgctggtgatcagcggcggcgagggctacatcgacttcagaatgggcgacgagggcggcgagagcgagctgctgggcgaggacctgcccctggagcccagcgtgaccaaggccgagagaagccacctgatcgtgtggcaggtgatgtacggcaacgagtag

SEQ ID NO: 100576 - DNA, 825 bp, synthetic construct
  misc_feature 1..825: note = Description of Artificial Sequence: Synthetic coding sequence
  source 1..825: mol_type = other DNA
atggagctggaggacggcgtggtgtaccaggaggagcccggcggcagcggcgccgtgatgagcgagagagtgagcggcctggccggcagcatctacagagagttcgagagactgatcggcagatacgacgaggaggtggtgaaggagctgatgcccctggtggtggccgtgctggagaacctggacagcgtgttcgcccaggaccaggagcaccaggtggagctggagctgctgagagacgacaacgagcagctgatcacccagtacgagagagagaaggccctgagaaagcacgccgaggagaagttcatcgagttcgaggacagccaggagcaggagaagaaggacctgcagaccagagtggagagcctggagagccagaccagacagctggagctgaaggccaagaactacgccgaccagagcgccatgagccccggctgcatgctgctgttcgtgttcggcttcgtgggcggcgccgtggtgatcaacagcgccatcctggtgagcctgagcgtgctgctgctggtgcacttcagcatcagcaccggcgtgcccgccctgacccagaacctgcccagaatcctgagaaaggagagacccatcagcctgggcatcttccccctgcccgccggcgacggcctgctgacccccgacgcccagaagggcggcgagacccccggcagcgagcagtggaagttccaggagctgagccagcccagaagccacaccagcctgaaggtgagcaacagccccgagccccagaaggccgtggagcaggaggtgagaatggtgctgctgaacatcctgcagaaggtgtactag

SEQ ID NO: 100577 - DNA, 1053 bp, synthetic construct
  misc_feature 1..1053: note = Description of Artificial Sequence: Synthetic coding sequence
  source 1..1053: mol_type = other DNA
atgaagcccctggtgctgctggtggccctgctgctgtggcccagcagcgtgcccgcctaccccagcatcaccgtgacccccgacgaggagcagaacctgaaccactacatccaggtgctggagaacctggtgagaagcgtgcccagcggcgagcccggcagagagaagaagagcaacagccccaagcacgtgtacagcatcgccagcaagggcagcaagttcaaggagctggtgacccacggcgacgccagcaccgagaacgacgtgctgaccaaccccatcagcgaggagaccaccaccttccccaccggcggcttcacccccgagatcggcaagaagaagcacaccgagagcacccccttctggagcatcaagcccaacaacgtgagcatcgtgctgcacgccgaggagccctacatcgagaacgaggagcccgagcccgagcccgagcccgccgccaagcagaccgaggcccccagaatgctgcccgtggtgaccgagagcagcaccagcccctacgtgaccagctacaagagccccgtgaccaccctggacaagagcaccggcatcggcatcagcaccgagagcgaggacgtgccccagctgagcggcgagaccgccatcgagaagcccgaggagttcggcaagcaccccgagagctggaacaacgacgacatcctgaagaagatcctggacatcaacagccaggtgcagcaggccctgctgagcgacaccagcaaccccgcctacagagaggacatcgaggccagcaaggaccacctgaagagaagcctggccctggccgccgccgccgagcacaagctgaagaccatgtacaagagccagctgctgcccgtgggcagaaccagcaacaagatcgacgacatcgagaccgtgatcaacatgctgtgcaacagcagaagcaagctgtacgagtacctggacatcaagtgcgtgccccccgagatgagagagaaggccgccaccgtgttcaacaccctgaagaacatgtgcagaagcagaagagtgaccgccctgctgaaggtgtactag

SEQ ID NO: 100578 - DNA, 711 bp, synthetic construct
  misc_feature 1..711: note = Description of Artificial Sequence: Synthetic coding sequence
  source 1..711: mol_type = other DNA
atggccagcagcgtggacgaggaggccctgcaccagctgtacctgtgggtggacaacatccccctgagcagacccaagagaaacctgagcagagacttcagcgacggcgtgctggtggccgaggtgatcaagttctacttccccaagatggtggagatgcacaactacgtgcccgccaacagcctgcagcagaagctgagcaactggggccacctgaacagaaaggtgctgaagagactgaacttcagcgtgcccgacgacgtgatgagaaagatcgcccagtgcgcccccggcgtggtggagctggtgctgatccccctgagacagagactggaggagagacagagaagaagaaagcagggcgccggcagcctgcaggagctggccccccaggacggcagcggctacatggacgtgggcgtgagccagaaggccagaggcgagggcgtgcccgacccccagggcggcggccagctgagctgggacagaccccccgcccccagaccccccgcctacaacagagccctgcagggcgaccccagcttcgtgctgcagatcgccgagaaggagcaggagctgctggccagccaggagaccgtgcaggtgctgcagatgaaggtgagaagactggagcacctgctgcagctgaagaacgtgagaatcgaggacctgagcagaagactgcagcaggccgagagaaagcagagatag

SEQ ID NO: 100579 - DNA, 351 bp, synthetic construct
  misc_feature 1..351: note = Description of Artificial Sequence: Synthetic coding sequence
  source 1..351: mol_type = other DNA
atgtgcgaccagaccaagcacagcaagtgctgccccgccaagggcaaccagtgctgccccccccagcagaaccagtgctgccagagcaagggcaaccagtgctgcccccccaagcagaaccagtgctgccagcccaagggcagccagtgctgcccccccaagcacaaccactgctgccagcccaagcccccctgctgcatccaggccagatgctgcggcctggagaccaagcccgaggtgagccccctgaacatggagagcgagcccaacagcccccagacccaggacaagggctgccagacccagcagcagccccacagcccccagaacgagagcagacccagcaagtag

SEQ ID NO: 100580 - DNA, 294 bp, synthetic construct; identical to SEQ ID NO: 100422
  misc_feature 1..294: note = Description of Artificial Sequence: Synthetic coding sequence
  source 1..294: mol_type = other DNA

SEQ ID NO: 100581 - DNA, 2019 bp, synthetic construct
  misc_feature 1..2019: note = Description of Artificial Sequence: Synthetic coding sequence
  source 1..2019: mol_type = other DNA
atgagaagcatcagaagcttcgccaacgacgacagacacgtgatggtgaagcacagcaccatctaccccagccccgaggagctggaggccgtgcagaacatggtgagcaccgtggagtgcgccctgaagcacgtgagcgactggctggacgagaccaacaagggcaccaagaccgagggcgagaccgaggtgaagaaggacgaggccggcgagaactacagcaaggaccagggcggcagaaccctgtgcggcgtgatgagaatcggcctggtggccaagggcctgctgatcaaggacgacatggacctggagctggtgctgatgtgcaaggacaagcccaccgagaccctgctgaacaccgtgaaggacaacctgcccatccagatccagaagctgaccgaggagaagtaccaggtggagcagtgcgtgaacgaggccagcatcatcatcagaaacaccaaggagcccaccctgaccctgaaggtgatcctgaccagccccctgatcagagacgagctggagaagaaggacggcgagaacgtgagcatgaaggacccccccgacctgctggacagacagaagtgcctgaacgccctggccagcctgagacacgccaagtggttccaggccagagccaacggcctgaagagctgcgtgatcgtgctgagaatcctgagagacctgtgcaacagagtgcccacctgggcccccctgaagggctggcccctggagctgatctgcgagaagagcatcggcacctgcaacagacccctgggcgccggcgaggccctgagaagagtgatggagtgcctggccagcggcatcctgctgcccggcggccccggcctgcacgacccctgcgagagagaccccaccgacgccctgagctacatgaccatccagcagaaggaggacatcacccacagcgcccagcacgccctgagactgagcgccttcggccagatctacaaggtgctggagatggaccccctgcccagcagcaagcccttccagaagtacagctggagcgtgaccgacaaggagggcgccggcagcagcgccctgaagagacccttcgaggacggcctgggcgacgacaaggaccccaacaagaagatgaagagaaacctgagaaagatcctggacagcaaggccatcgacctgatgaacgccctgatgagactgaaccagatcagacccggcctgcagtacaagctgctgagccagagcggccccgtgcacgcccccgtgttcaccatgagcgtggacgtggacggcaccacctacgaggccagcggccccagcaagaagaccgccaagctgcacgtggccgtgaaggtgctgcaggccatgggctaccccaccggcttcgacgccgacatcgagtgcatgagcagcgacgagaagagcgacaacgagagcaagaacgagaccgtgagcagcaacagcagcaacaacaccggcaacagcaccaccgagaccagcagcaccctggaggtgagaacccagggccccatcctgaccgccagcggcaagaaccccgtgatggagctgaacgagaagagaagaggcctgaagtacgagctgatcagcgagaccggcggcagccacgacaagagattcgtgatggaggtggaggtggacggccagaagttcagaggcgccggccccaacaagaaggtggccaaggccagcgccgccctggccgccctggagaagctgttcagcggccccaacgccgccaacaacaagaagaagaagatcatcccccaggccaagggcgtggtgaacaccgccgtgagcgccgccgtgcaggccgtgagaggcagaggcagaggcaccctgaccagaggcgccttcgtgggcgccaccgccgcccccggctacatcgcccccggctacggcaccccctacggctacagcaccgccgcccccgcctacggcctgcccaagagaatggtgctgctgcccgtgatgaagttccccacctaccccgtgccccactacagcttcttctag

SEQ ID NO: 100582 - DNA, 1977 bp, synthetic construct
  misc_feature 1..1977: note = Description of Artificial Sequence: Synthetic coding sequence
  source 1..1977: mol_type = other DNA
atggtgaagcacagcaccatctaccccagccccgaggagctggaggccgtgcagaacatggtgagcaccgtggagtgcgccctgaagcacgtgagcgactggctggacgagaccaacaagggcaccaagaccgagggcgagaccgaggtgaagaaggacgaggccggcgagaactacagcaaggaccagggcggcagaaccctgtgcggcgtgatgagaatcggcctggtggccaagggcctgctgatcaaggacgacatggacctggagctggtgctgatgtgcaaggacaagcccaccgagaccctgctgaacaccgtgaaggacaacctgcccatccagatccagaagctgaccgaggagaagtaccaggtggagcagtgcgtgaacgaggccagcatcatcatcagaaacaccaaggagcccaccctgaccctgaaggtgatcctgaccagccccctgatcagagacgagctggagaagaaggacggcgagaacgtgagcatgaaggacccccccgacctgctggacagacagaagtgcctgaacgccctggccagcctgagacacgccaagtggttccaggccagagccaacggcctgaagagctgcgtgatcgtgctgagaatcctgagagacctgtgcaacagagtgcccacctgggcccccctgaagggctggcccctggagctgatctgcgagaagagcatcggcacctgcaacagacccctgggcgccggcgaggccctgagaagagtgatggagtgcctggccagcggcatcctgctgcccggcggccccggcctgcacgacccctgcgagagagaccccaccgacgccctgagctacatgaccatccagcagaaggaggacatcacccacagcgcccagcacgccctgagactgagcgccttcggccagatctacaaggtgctggagatggaccccctgcccagcagcaagcccttccagaagtacagctggagcgtgaccgacaaggagggcgccggcagcagcgccctgaagagacccttcgaggacggcctgggcgacgacaaggaccccaacaagaagatgaagagaaacctgagaaagatcctggacagcaaggccatcgacctgatgaacgccctgatgagactgaaccagatcagacccggcctgcagtacaagctgctgagccagagcggccccgtgcacgcccccgtgttcaccatgagcgtggacgtggacggcaccacctacgaggccagcggccccagcaagaagaccgccaagctgcacgtggccgtgaaggtgctgcaggccatgggctaccccaccggcttcgacgccgacatcgagtgcatgagcagcgacgagaagagcgacaacgagagcaagaacgagaccgtgagcagcaacagcagcaacaacaccggcaacagcaccaccgagaccagcagcaccctggaggtgagaacccagggccccatcctgaccgccagcggcaagaaccccgtgatggagctgaacgagaagagaagaggcctgaagtacgagctgatcagcgagaccggcggcagccacgacaagagattcgtgatggaggtggaggtggacggccagaagttcagaggcgccggccccaacaagaaggtggccaaggccagcgccgccctggccgccctggagaagctgttcagcggccccaacgccgccaacaacaagaagaagaagatcatcccccaggccaagggcgtggtgaacaccgccgtgagcgccgccgtgcaggccgtgagaggcagaggcagaggcaccctgaccagaggcgccttcgtgggcgccaccgccgcccccggctacatcgcccccggctacggcaccccctacggctacagcaccgccgcccccgcctacggcctgcccaagagaatggtgctgctgcccgtgatgaagttccccacctaccccgtgccccactacagcttcttctag

SEQ ID NO: 100583 - DNA, 285 bp, synthetic construct
  misc_feature 1..285: note = Description of Artificial Sequence: Synthetic coding sequence
  source 1..285: mol_type = other DNA
atgagaagcatcagaagcttcgccaacgacgacagacacgtgatggtgaagcacagcaccatctaccccagccccgaggagctggaggccgtgcagaacatggtgagcaccgtggagtgcgccctgaagcacgtgagcgactggctggacgagaccaacaagggcaccaagaccgagggcgagaccgaggtgaagaaggacgaggccggcgagaactacagcaagtggagcgacatcgtgtggtgcaacgaggactggcccggctgcaagagactggccgactag

SEQ ID NO: 100584 - DNA, 2019 bp, synthetic construct; identical to SEQ ID NO: 100581
  misc_feature 1..2019: note = Description of Artificial Sequence: Synthetic coding sequence
  source 1..2019: mol_type = other DNA

SEQ ID NO: 100585 - DNA, 225 bp, synthetic construct
  misc_feature 1..225: note = Description of Artificial Sequence: Synthetic coding sequence
  source 1..225: mol_type = other DNA
atgagaagcatcagaagcttcgccaacgacgacagacacgtgatggtgaagcacagcaccatctaccccagccccgaggagctggaggccgtgcagaacatggtgagcaccgtggagtgcgccctgaagcacgtgagcgactggctggacgagaccaacaagggcaccaagaccgagggcgagaccgaggtgaagaaggacgaggccggcgagaactacagctag

SEQ ID NO: 100586 - DNA, 1776 bp, synthetic construct
  misc_feature 1..1776: note = Description of Artificial Sequence: Synthetic coding sequence
  source 1..1776: mol_type = other DNA
atgagcctgctgaccaactacgagggcctgagacaccagatcgagagactggtgagagagaacgaggagctgaagaagctggtgagactgatcagagagaaccacgagctgaagagcgccatcaagacccaggccggcggcctgggcatcagcggcttcaccagcggcctgggcgaggccaccgccggcctgagcagcagacagaacaacggcgtgttcctgccccccagccccgccgtggccaacgagagagtgctggaggaggtgggcatcatggccctggcccccctggccgagatgctgaccagcctgcagcccagcgccacccccggcagcctgatgagccccctgaccggcaccctgagcaccctgctgagcggccccgcccccaccagccagagcagccccctgaccagcttcctgaccagccccatcgccggccccctgaccggcaccctggccagcagcctgggcctgcccagcaccggcaccctgacccccagcagcctggtggccggccccgtggccatgagccagagcagccccctgatcgcccccgtgatgggcaccgtggccgtgagcctgagcagccccctgctgagcagcaccgccaccccccccggcgtgagccagaacctgctggccaaccccatgagcaacctggtgctgcccgaggcccccagactgagactggccgagcccctgagaggcggccccaccggcccccagagccccgcctgcgtggtgcccaccgccaccaccaaggtgcccctgagcaccgagcccccccagagcacccaggaccccgagcccctgagcatggccttcgccggcgcccccctgcagaccagcacccccatcggcgccatgggcacccccgcccccaagaccgccttcagcttcaacaccagcgacacccaggcccagcccagcgccgcccaggagcaggtggtgcccgccagcgtgcccaccagccccaccaccagccccaccgtgaccgtgctggccagcgcccccgccctggccccccaggtggccaccagctacacccccagcagcaccacccacatcgcccagggcgccccccacccccccagcagaatgcacaacagccccacccagaacctgcccgtgccccactgccccccccacaacgcccacagcccccccagaaccagcagcagccccgccagcgtgaacgacagcagaggccccagaaccaccgagcccagcaccaagagcatgatggaggtggagagaaagctggcccacagaaagaccagcaagttccccgagaaccccagagagagcaagcagctggcctgggagagactggtgggcgagatcgccttccagctggacagaagaatcctgagcagcatcttccccgagagagtgagactgtacggcttcaccgtgagcaacatccccgagaagatcatccaggccagcctgaaccccagcgaccacaagctggacgagaagctgtgccagagactgacccagagatacgtgagcgtgatgaacagactgcagagcctgggctacaacggcagagtgcaccccgccctgaccgagcagctggtgaacgcctacggcatcctgagagagagacccgagctggccgccagcgagggcggcccctacaccgtggacttcctgcagagagtggtggtggagaccgtgcaccccggcatgctggccgacgccctgctgctgctgagctgcctgagccagctggcccacgacgacggcaagcccatgttcatctggtag

SEQ ID NO: 100587 - DNA, 1326 bp, synthetic construct
  misc_feature 1..1326: note = Description of Artificial Sequence: Synthetic coding sequence
  source 1..1326: mol_type = other DNA
atgagcctgctgaccaactacgagggcctgagacaccagatcgagagactggtgagagagaacgaggagctgaagaagctggtgagactgatcagagagaaccacgagctgaagagcgccatcaagacccaggccggcggcctgggcatcagcggcttcaccagcggcctgggcgaggccaccgccggcctgagcagcagacagaacaacggcgtgttcctgccccccagccccgccgtggccaacgagagagtgctggaggaggtgggcatcatggccctggcccccctggccgagatgctgaccagcctgcagcccagcgccacccccggcagcctgatgagccccctgaccggcaccctgagcaccctgctgagcggccccgcccccaccagccagagcagccccctgaccagcttcctgaccagccccatcgccggccccctgaccggcaccctggccagcagcctgggcctgcccagcaccggcaccctgacccccagcagcctggtggccggccccgtggccatgagccagagcagccccctgatcgcccccgtgatgggcaccgtggccgtgagcctgagcagccccctgctgagcagcaccgccaccccccccggcgtgagccagaacctgctggccaaccccatgagcaacctggtgctgcccgaggcccccagactgagactggccgagcccctgagaggcggccccaccggcccccagagccccgcctgcgtggtgcccaccgccaccaccaaggtgcccctgagcaccgagcccccccagagcacccaggaccccgagcccctgagcatggccttcgccggcgcccccctgcagaccagcacccccatcggcgccatgggcacccccgcccccaagaccgccttcagcttcaacaccagcgacacccaggcccagcccagcgccgcccaggagcaggtggtgcccgccagcgtgcccaccagccccaccaccagccccaccgtgaccgtgctggccagcgcccccgccctggccccccaggtggccaccagctacacccccagcagcaccacccacatcgcccagggcgccccccacccccccagcagaatgcacaacagccccacccagaacctgcccgtgccccactgccccccccacaacgcccacagcccccccagaaccagcagcagccccgccagcgtgaacgacagcagaggccccagaaccaccgagcccagcaccaagagcatgatggaggtggagagaaagctggcccacagaaagaccagcaagttccccgagaaccccagaggcttccccgagccccagtag

SEQ ID NO: 100588 - DNA, 573 bp, synthetic construct
  misc_feature 1..573: note = Description of Artificial Sequence: Synthetic coding sequence
  source 1..573: mol_type = other DNA
atgagcagcagcgccctgacctgcggcagcaccctggagaagagcggcgacacctgggagatgaaggccctggacagcagcagactggtgccctggccccccagaggcctgggcagcagcacccagcaccccaacaagccccactgcgccctggccagctgccagggccccggcgtgctgcccggcgccgccagcgccctgcccgagctgaccttccagggcgacgtgtgccagagcgagacctgccagagatacctgcaggccgccatcagcctggacatcgccgtgagccagatcaacctgctgggcagacccagcagcccccccgccctgctgatccagcagggcagctgcgagcaggtgatccacaacagcaccccccagttcctgggcatggaggacggcgacaacgagagaaccaccggctggctgtggagactgtgcgaggacatcgacgccgagcccagcagcaccggctgcagcagaagcaaccagctgaccttcaccgagggctgcttcgtgagaagcctgagcaccgtgtacagcaacacccacatccacacccacctgtag

SEQ ID NO: 100589 - DNA, 1791 bp, synthetic construct
  misc_feature 1..1791: note = Description of Artificial Sequence: Synthetic coding sequence
  source 1..1791: mol_type = other DNA
atgggcttcatcatccacatccagcaggtgaagaagcagagaaagaagctggaccagggcctgatcctgaagaaggagaagtacagaaaggagaagaagtgcgccagcctgagcttcgaggtgagcagcgacggcggcaccgagcccagcgccctggtggacgacaacggcagcgaggaggacttcagctacgaggacctgtgccaggccagccccagatacctgcagcccggcggcgagcagctggccatcaacgagctgatcagcgacggcaacgtggtgtgcgccgaggccctgtgggaccacgtgaccatggacgaccaggagctgggcttcaaggccggcgacgtgatccaggtgctggaggccagcaacaaggactggtggtggggcagaagcgaggacaaggaggcctggttccccgccagcttcgtgagactgagagtgaaccaggaggagctgagcgagaacagcagcagcacccccagcgaggagcaggacgaggaggccagccagagcagacacagacactgcgagaacaagcagcagatgagaaccaacgtgatcagagagatcatggacaccgagagagtgtacatcaagcacctgagagacatctgcgagggctacatcagacagtgcagaaagcacaccggcatgttcaccgtggcccagctggccaccatcttcggcaacatcgaggacatctacaagttccagagaaagttcctgaaggacctggagaagcagtacaacaaggaggagccccacctgagcgagatcggcagctgcttcctgcagaaccaggagggcttcgccatctacagcgagtactgcaacaaccaccccggcgcctgcctggagctggccaacctgatgaagcagggcaagtacagacacttcttcgaggcctgcagactgctgcagcagatgatcgacatcgccatcgacggcttcctgctgacccccgtgcagaagatctgcaagtaccccctgcagctggccgagctgctgaagtacaccacccaggagcacggcgactacagcaacatcaaggccgcctacgaggccatgaagaacgtggcctgcctgatcaacgagagaaagagaaagctggagagcatcgacaagatcgccagatggcaggtgagcatcgtgggctgggagggcctggacatcctggacagaagcagcgagctgatccacagcggcgagctgaccaagatcaccaagcagggcaagagccagcagagaaccttcttcctgttcgaccaccagctggtgagctgcaagaaggacctgctgagaagagacatgctgtactacaagggcagactggacatggacgagatggagctggtggacctgggcgacggcagagacaaggactgcaacctgagcgtgaagaacgccttcaagctggtgagcagaaccaccgacgaggtgtacctgttctgcgccaagaagcaggaggacaaggccagatggctgcaggcctgcgccgacgagagaagaagagtgcaggaggacaaggagatgggcatggagatcagcgagaaccagaagaagctggccatgctgaacgcccagaaggccggccacggcaagagcaagggctacaacagatgccccgtggcccccccccaccagggcctgcaccccatccaccagagacacatcaccatgcccaccagcgtgccccagcagcaggtgttcggcctggccgagcccaagagaaagagcagcctgttctggcacaccttcaacagactgacccccttcagaaagtag

SEQ ID NO: 100590 - DNA, 1959 bp, synthetic construct
  misc_feature 1..1959: note = Description of Artificial Sequence: Synthetic coding sequence
  source 1..1959: mol_type = other DNA
atgaccagcgccagccccgaggaccagaacgcccccgtgggctgccccaagggcgccagaagaagaagacccatcagcgtgatcggcggcgtgagcctgtacggcaccaaccagaccgaggagctggacaacctgctgacccagcccgccagcagaccccccatgcccgcccaccaggtgcccccctacaaggccgtgagcgccagattcagacccttcaccttcagccagagcacccccatcggcctggacagagtgggcagaagaagacagatgagagccagcaacgtgagcagcgacggcggcaccgagcccagcgccctggtggacgacaacggcagcgaggaggacttcagctacgaggacctgtgccaggccagccccagatacctgcagcccggcggcgagcagctggccatcaacgagctgatcagcgacggcaacgtggtgtgcgccgaggccctgtgggaccacgtgaccatggacgaccaggagctgggcttcaaggccggcgacgtgatccaggtgctggaggccagcaacaaggactggtggtggggcagaagcgaggacaaggaggcctggttccccgccagcttcgtgagactgagagtgaaccaggaggagctgagcgagaacagcagcagcacccccagcgaggagcaggacgaggaggccagccagagcagacacagacactgcgagaacaagcagcagatgagaaccaacgtgatcagagagatcatggacaccgagagagtgtacatcaagcacctgagagacatctgcgagggctacatcagacagtgcagaaagcacaccggcatgttcaccgtggcccagctggccaccatcttcggcaacatcgaggacatctacaagttccagagaaagttcctgaaggacctggagaagcagtacaacaaggaggagccccacctgagcgagatcggcagctgcttcctgcagaaccaggagggcttcgccatctacagcgagtactgcaacaaccaccccggcgcctgcctggagctggccaacctgatgaagcagggcaagtacagacacttcttcgaggcctgcagactgctgcagcagatgatcgacatcgccatcgacggcttcctgctgacccccgtgcagaagatctgcaagtaccccctgcagctggccgagctgctgaagtacaccacccaggagcacggcgactacagcaacatcaaggccgcctacgaggccatgaagaacgtggcctgcctgatcaacgagagaaagagaaagctggagagcatcgacaagatcgccagatggcaggtgagcatcgtgggctgggagggcctggacatcctggacagaagcagcgagctgatccacagcggcgagctgaccaagatcaccaagcagggcaagagccagcagagaaccttcttcctgttcgaccaccagctggtgagctgcaagaaggacctgctgagaagagacatgctgtactacaagggcagactggacatggacgagatggagctggtggacctgggcgacggcagagacaaggactgcaacctgagcgtgaagaacgccttcaagctggtgagcagaaccaccgacgaggtgtacctgttctgcgccaagaagcaggaggacaaggccagatggctgcaggcctgcgccgacgagagaagaagagtgcaggaggacaaggagatgggcatggagatcagcgagaaccagaagaagctggccatgctgaacgcccagaaggccggccacggcaagagcaagggctacaacagatgccccgtggcccccccccaccagggcctgcaccccatccaccagagacacatcaccatgcccaccagcgtgccccagcagcaggtgttcggcctggccgagcccaagagaaagagcagcctgttctggcacaccttcaacagactgacccccttcagaaagtag

SEQ ID NO: 100591 - DNA, 3834 bp, synthetic construct
  misc_feature 1..3834: note = Description of Artificial Sequence: Synthetic coding sequence
  source 1..3834: mol_type = other DNA
atgacccaggccgccgtgagaccctgggccccctgcctggagaacatgaccaccgcccccaacggcctgggccccggccccgccgccccctgcgccggcagcgacctgaaggacgccaagatggtgaccagcctggcctgcggcaacggcgtgtgcggctgcagccccggcggcgacaccgacacccaggaggccaagctgagccccgccaagctggtgagactgttcagcaccagcagaaagagaaccggcgcccaccccgagagaccccacagcatggtgctggtgggcaacagcagcacctggaacaccctggccagcttcagaaagatgggcagcttcaagaagctgaagagcagcgtgctgaagggcatccagagcagagagggcagcaacgcctgcagcaagggcgaggccagcgagcacggcctgggcaagagcatccccaacggcgccgtgcccggcgcccaggccagcagaggcagccccctggcccccggccccgcctgcggcgccctgagacccgccgagtggggcaccctggacggcagcgacctggaggacaccgacgacgccttccagagaagcacccacagaagcagaagcctgagaagagcctacggcctgggcagaatctgcctgctggacgccccccagaaccacgccacccccaccatcgccaccggccaggtgcccgccgtgtgcgagatcctggtgagagaccccgagaacaacagcatgggctacagaagaagcaagagcaccgacaacctggccttcctgaagaagagcagcttcaagagaaagagcaccagcaacctggccgacctgagaaccgcccacgacgccagagtgccccagagaaccctgagcagcagcagcaccgacagccagaagctgggcagcggcagaaccaagagatggagaagccccatcagagccaaggacttcgacagagtgttcaagctggtgagcaacgtgaccgaggccgcctggagaagagagagccccagaagcggcgcccccagccccggcgaggccagcctgagactgcaggcccacagcagactgcacgacgactacagcagaagagtgagcagaagcaccgagcaggacagcagaagaggcggcgccgtgatgcacggcaccaccgccacctgcaccgtggcccccggcttcggcagcgccaccagcaagggcccccacctggacgccgacaccgccgtgttccccctggagaccaagagcagctgggccgtggagagcgacagcagctgcacctgcagcagcctgcccagccccatcgtgcaggacgtgctgagcaaggacagctgcgaccccaacgccggcagccagctgaccttcgaccccgagcagccccccacccccctgagacccaccacccccaagccccagagcccccagagcccccagagccccggcgccggcagcgccagctgccacagcaaccacagcgccctgagcgccaacagcgaggagagcgagggcagagccgaggagcccgcccagagagagcccggccccgtgagcctgcaggaccccctggaggccacccacggcgacgagggcagcaaggacctgctggtgaacatcggcgtggccgccggccccgaggagaaggagaaggaggaggtggtgcccgacggcccctggagaagaagcagcagccaggacgaggagagaaccgaggcccagagaacccccaagagaagatggggcagcggcagaagacccagacccagacccttcagcgactacggccagctggccagcagaagcctgagcatccccgaggacagcgtggccgccgacccccagaaggaggacagagtggacgaggacccccaggccagcatgaccagcgccagccccgaggaccagaacgcccccgtgggctgccccaagggcgccagaagaagaagacccatcagcgtgatcggcggcgtgagcctgtacggcaccaaccagaccgaggagctggacaacctgctgacccagcccgccagcagaccccccatgcccgcccaccaggtgcccccctacaaggccgtgagcgccagattcagacccttcaccttcagccagagcacccccatcggcctggacagagtgggcagaagaagacagatgagagccagcaacgtgagcagcgacggcggcaccgagcccagcgccctggtggacgacaacggcagcgaggaggacttcagctacgaggacctgtgccaggccagccccagatacctgcagcccggcggcgagcagctggccatcaacgagctgatcagcgacggcaacgtggtgtgcgccgaggccctgtgggaccacgtgaccatggacgaccaggagctgggcttcaaggccggcgacgtgatccaggtgctggaggccagcaacaaggactggtggtggggcagaagcgaggacaaggaggcctggttccccgccagcttcgtgagactgagagtgaaccaggaggagctgagcgagaacagcagcagcacccccagcgaggagcaggacgaggaggccagccagagcagacacagacactgcgagaacaagcagcagatgagaaccaacgtgatcagagagatcatggacaccgagagagtgtacatcaagcacctgagagacatctgcgagggctacatcagacagtgcagaaagcacaccggcatgttcaccgtggcccagctggccaccatcttcggcaacatcgaggacatctacaagttccagagaaagttcctgaaggacctggagaagcagtacaacaaggaggagccccacctgagcgagatcggcagctgcttcctgcagaaccaggagggcttcgccatctacagcgagtactgcaacaaccaccccggcgcctgcctggagctggccaacctgatgaagcagggcaagtacagacacttcttcgaggcctgcagactgctgcagcagatgatcgacatcgccatcgacggcttcctgctgacccccgtgcagaagatctgcaagtaccccctgcagctggccgagctgctgaagtacaccacccaggagcacggcgactacagcaacatcaaggccgcctacgaggccatgaagaacgtggcctgcctgatcaacgagagaaagagaaagctggagagcatcgacaagatcgccagatggcaggtgagcatcgtgggctgggagggcctggacatcctggacagaagcagcgagctgatccacagcggcgagctgaccaagatcaccaagcagggcaagagccagcagagaaccttcttcctgttcgaccaccagctggtgagctgcaagaaggacctgctgagaagagacatgctgtactacaagggcagactggacatggacgagatggagctggtggacctgggcgacggcagagacaaggactgcaacctgagcgtgaagaacgccttcaagctggtgagcagaaccaccgacgaggtgtacctgttctgcgccaagaagcaggaggacaaggccagatggctgcaggcctgcgccgacgagagaagaagagtgcaggaggacaaggagatgggcatggagatcagcgagaaccagaagaagctggccatgctgaacgcccagaaggccggccacggcaagagcaagggctacaacagatgccccgtggcccccccccaccagggcctgcaccccatccaccagagacacatcaccatgcccaccagcgtgccccagcagcaggtgttcggcctggccgagcccaagagaaagagcagcctgttctggcacaccttcaacagactgacccccttcagaaagtag

SEQ ID NO: 100592 - DNA, 3948 bp, synthetic construct
  misc_feature 1..3948: note = Description of Artificial Sequence: Synthetic coding sequence
  source 1..3948: mol_type = other DNA
tgacccgtggccacccaggagcccgacgtgcagggcagatgcgagtgccaggacggcatccccggcgacgagggcctggagctgagaagcgccgacagcgccgtgcccgtggccatgacccaggccgccgtgagaccctgggccccctgcctggagaacatgaccaccgcccccaacggcctgggccccggccccgccgccccctgcgccggcagcgacctgaaggacgccaagatggtgaccagcctggcctgcggcaacggcgtgtgcggctgcagccccggcggcgacaccgacacccaggaggccaagctgagccccgccaagctggtgagactgttcagcaccagcagaaagagaaccggcgcccaccccgagagaccccacagcatggtgctggtgggcaacagcagcacctggaacaccctggccagcttcagaaagatgggcagcttcaagaagctgaagagcagcgtgctgaagggcatccagagcagagagggcagcaacgcctgcagcaagggcgaggccagcgagcacggcctgggcaagagcatccccaacggcgccgtgcccggcgcccaggccagcagaggcagccccctggcccccggccccgcctgcggcgccctgagacccgccgagtggggcaccctggacggcagcgacctggaggacaccgacgacgccttccagagaagcacccacagaagcagaagcctgagaagagcctacggcctgggcagaatctgcctgctggacgccccccagaaccacgccacccccaccatcgccaccggccaggtgcccgccgtgtgcgagatcctggtgagagaccccgagaacaacagcatgggctacagaagaagcaagagcaccgacaacctggccttcctgaagaagagcagcttcaagagaaagagcaccagcaacctggccgacctgagaaccgcccacgacgccagagtgccccagagaaccctgagcagcagcagcaccgacagccagaagctgggcagcggcagaaccaagagatggagaagccccatcagagccaaggacttcgacagagtgttcaagctggtgagcaacgtgaccgaggccgcctggagaagagagagccccagaagcggcgcccccagccccggcgaggccagcctgagactgcaggcccacagcagactgcacgacgactacagcagaagagtgagcagaagcaccgagcaggacagcagaagaggcggcgccgtgatgcacggcaccaccgccacctgcaccgtggcccccggcttcggcagcgccaccagcaagggcccccacctggacgccgacaccgccgtgttccccctggagaccaagagcagctgggccgtggagagcgacagcagctgcacctgcagcagcctgcccagccccatcgtgcaggacgtgctgagcaaggacagctgcgaccccaacgccggcagccagctgaccttcgaccccgagcagccccccacccccctgagacccaccacccccaagccccagagcccccagagcccccagagccccggcgccggcagcgccagctgccacagcaaccacagcgccctgagcgccaacagcgaggagagcgagggcagagccgaggagcccgcccagagagagcccggccccgtgagcctgcaggaccccctggaggccacccacggcgacgagggcagcaaggacctgctggtgaacatcggcgtggccgccggccccgaggagaaggagaaggaggaggtggtgcccgacggcccctggagaagaagcagcagccaggacgaggagagaaccgaggcccagagaacccccaagagaagatggggcagcggcagaagacccagacccagacccttcagcgactacggccagctggccagcagaagcctgagcatccccgaggacagcgtggccgccgacccccagaaggaggacagagtggacgaggacccccaggccagcatgaccagcgccagccccgaggaccagaacgcccccgtgggctgccccaagggcgccagaagaagaagacccatcagcgtgatcggcggcgtgagcctgtacggcaccaaccagaccgaggagctggacaacctgctgacccagcccgccagcagaccccccatgcccgcccaccaggtgcccccctacaaggccgtgagcgccagattcagacccttcaccttcagccagagcacccccatcggcctggacagagtgggcagaagaagacagatgagagccagcaacgtgagcagcgacggcggcaccgagcccagcgccctggtggacgacaacggcagcgaggaggacttcagctacgaggacctgtgccaggccagccccagatacctgcagcccggcggcgagcagctggccatcaacgagctgatcagcgacggcaacgtggtgtgcgccgaggccctgtgggaccacgtgaccatggacgaccaggagctgggcttcaaggccggcgacgtgatccaggtgctggaggccagcaacaaggactggtggtggggcagaagcgaggacaaggaggcctggttccccgccagcttcgtgagactgagagtgaaccaggaggagctgagcgagaacagcagcagcacccccagcgaggagcaggacgaggaggccagccagagcagacacagacactgcgagaacaagcagcagatgagaaccaacgtgatcagagagatcatggacaccgagagagtgtacatcaagcacctgagagacatctgcgagggctacatcagacagtgcagaaagcacaccggcatgttcaccgtggcccagctggccaccatcttcggcaacatcgaggacatctacaagttccagagaaagttcctgaaggacctggagaagcagtacaacaaggaggagccccacctgagcgagatcggcagctgcttcctgcagaaccaggagggcttcgccatctacagcgagtactgcaacaaccaccccggcgcctgcctggagctggccaacctgatgaagcagggcaagtacagacacttcttcgaggcctgcagactgctgcagcagatgatcgacatcgccatcgacggcttcctgctgacccccgtgcagaagatctgcaagtaccccctgcagctggccgagctgctgaagtacaccacccaggagcacggcgactacagcaacatcaaggccgcctacgaggccatgaagaacgtggcctgcctgatcaacgagagaaagagaaagctggagagcatcgacaagatcgccagatggcaggtgagcatcgtgggctgggagggcctggacatcctggacagaagcagcgagctgatccacagcggcgagctgaccaagatcaccaagcagggcaagagccagcagagaaccttcttcctgttcgaccaccagctggtgagctgcaagaaggacctgctgagaagagacatgctgtactacaagggcagactggacatggacgagatggagctggtggacctgggcgacggcagagacaaggactgcaacctgagcgtgaagaacgccttcaagctggtgagcagaaccaccgacgaggtgtacctgttctgcgccaagaagcaggaggacaaggccagatggctgcaggcctgcgccgacgagagaagaagagtgcaggaggacaaggagatgggcatggagatcagcgagaaccagaagaagctggccatgctgaacgcccagaaggccggccacggcaagagcaagggctacaacagatgccccgtggcccccccccaccagggcctgcaccccatccaccagagacacatcaccatgcccaccagcgtgccccagcagcaggtgttcggcctggccgagcccaagagaaagagcagcctgttctggcacaccttcaacagactgacccccttcagaaagtag

SEQ ID NO: 100593 - DNA, 1851 bp, synthetic construct
  misc_feature 1..1851: note = Description of Artificial Sequence: Synthetic coding sequence
  source 1..1851: mol_type = other DNA
atgcccgcccaccaggtgcccccctacaaggccgtgagcgccagattcagacccttcaccttcagccagagcacccccatcggcctggacagagtgggcagaagaagacagatgagagccagcaacgtgagcagcgacggcggcaccgagcccagcgccctggtggacgacaacggcagcgaggaggacttcagctacgaggacctgtgccaggccagccccagatacctgcagcccggcggcgagcagctggccatcaacgagctgatcagcgacggcaacgtggtgtgcgccgaggccctgtgggaccacgtgaccatggacgaccaggagctgggcttcaaggccggcgacgtgatccaggtgctggaggccagcaacaaggactggtggtggggcagaagcgaggacaaggaggcctggttccccgccagcttcgtgagactgagagtgaaccaggaggagctgagcgagaacagcagcagcacccccagcgaggagcaggacgaggaggccagccagagcagacacagacactgcgagaacaagcagcagatgagaaccaacgtgatcagagagatcatggacaccgagagagtgtacatcaagcacctgagagacatctgcgagggctacatcagacagtgcagaaagcacaccggcatgttcaccgtggcccagctggccaccatcttcggcaacatcgaggacatctacaagttccagagaaagttcctgaaggacctggagaagcagtacaacaaggaggagccccacctgagcgagatcggcagctgcttcctgcagaaccaggagggcttcgccatctacagcgagtactgcaacaaccaccccggcgcctgcctggagctggccaacctgatgaagcagggcaagtacagacacttcttcgaggcctgcagactgctgcagcagatgatcgacatcgccatcgacggcttcctgctgacccccgtgcagaagatctgcaagtaccccctgcagctggccgagctgctgaagtacaccacccaggagcacggcgactacagcaacatcaaggccgcctacgaggccatgaagaacgtggcctgcctgatcaacgagagaaagagaaagctggagagcatcgacaagatcgccagatggcaggtgagcatcgtgggctgggagggcctggacatcctggacagaagcagcgagctgatccacagcggcgagctgaccaagatcaccaagcagggcaagagccagcagagaaccttcttcctgttcgaccaccagctggtgagctgcaagaaggacctgctgagaagagacatgctgtactacaagggcagactggacatggacgagatggagctggtggacctgggcgacggcagagacaaggactgcaacctgagcgtgaagaacgccttcaagctggtgagcagaaccaccgacgaggtgtacctgttctgcgccaagaagcaggaggacaaggccagatggctgcaggcctgcgccgacgagagaagaagagtgcaggaggacaaggagatgggcatggagatcagcgagaaccagaagaagctggccatgctgaacgcccagaaggccggccacggcaagagcaaggtgagactgcagcaggtgccctgcggccccaccgcccccggccccgccccccacccccccgccccccaccactacgcccacaagagaccccccgccgccggcctgtggcccggcggcacccaggaggaggtgctggccctgctggcccacctgcagcaggcccaccccctgcccgagatgaagaccggcggctgcgccagcatggagctgggcgtgaagagaagaaactag

SEQ ID NO: 100594 - DNA, 1710 bp, synthetic construct
  misc_feature 1..1710: note = Description of Artificial Sequence: Synthetic coding sequence
  source 1..1710: mol_type = other DNA
atggacgccggcagcagcagaagcctggagaacgccgtgaacagaatctaccacgaccagctggtgcccaagatcaacaccagcaagaagatgagcaccctggcccacccccccaacatcctggagatgagccaggagatcaagaagaactgcggcggcaagcaggtggagatcaccctggagagaaccaagatgaccaagggcatcaaggagaagcagagcaacgacctggagaaggccgccttcaagagaaaggccgagggcgaggagaagcccaccagaaagaagcaggccaagatcaccgagctggacaaccagctgatcaccatgcccctgccccacatccccctgaagaacatcatggacgtggagatgaagctggtgtacatcgacgagatgggcgtgagatacgagttcgtggagagcttcatgagcaccggcagccagcccacctgccaggccgccgagatcgtggaccccctgagcgtgcacaacttcagcttcctgccccagatcgacaagtggctgcaggtggccctgaaggacgccagcagctgctacagacagaagaagtacgccctggccgccggccagttcagaaccgccctggagctgtgcagcaagggcgccgtgctgggcgagcccttcgacgcccccgccgaggacatcgccagcgtggccagcttcatcgagaccaagctggtgacctgctacctgagaatgagaaagcccgacctggccctgaaccacgcccacagaagcatcgtgctgaaccccgcctacttcagaaaccacctgagacaggccaccgtgttcagatgcctggagagatacagcgaggccgccagaagcgccatgatcgccgactacatgttctggctgggcggcggcagagaggagagcatcagcaagctgatcaagctgtactggcaggccatgatcgaggaggccatcaccagagccgagagcttcagcgtgatgtacacccccttcgccaccaagatcagagccgacaagatcgagaaggtgaaggacgccttcaccaagacccaccccgcctacgccgagtacatgtacaccgacctgcaggccctgcacatgctgccccagaccgtggactggagcagcttccccccccagcagtacctgctgaccctgggcttcaagaacaaggacgacggcaagttcctggagaagatcagcagcagaaagctgcccatcttcaccgagcacaagacccccttcggcctgaccagagaggacaccgtgagacagatggagaccatgggcaagagaatcctgcccatcctggacttcatcagaagcacccagctgaacggcagcttccccgccagcagcggcgtgatggagaagctgcagtacgccagcctgctgagccagctgcagagagtgaaggagcagagccaggtgatcaaccaggccatggccgagctggccaccatcccctacctgcaggacatcagccagcaggaggccgagctgctgcagagcctgatggccgacgccatggacaccctggagggcagaagaaacaacaacgagagagtgtggaacatgatccagaaggtgggccagatcgaggacttcctgtaccagctggaggacagcttcctgaagaccaagaagctgagaaccgccagaagacagaagaccaagatgaagagactgcagaccgtgcagcagagatag

SEQ ID NO: 100595 - DNA, 1086 bp, synthetic construct
  misc_feature 1..1086: note = Description of Artificial Sequence: Synthetic coding sequence
  source 1..1086: mol_type = other DNA
atggccaccctggccagactgcaggccagaagcagcaccgtgggcaaccagtactacttcagaaacagcgtggtggaccccttcagaaagaaggagaacgacgccgccgtgaagatccagagctggttcagaggctgccaggtgagagcctacatcagacacctgaacagaatcgtgaccatcatccagaagtggtggagaagcttcctgggcagaaagcagtaccagctgaccgtgcaggtggcctactacaccatgatgatgaacctgtacaacgccatggccgtgagaatccagagaagatggagaggctacagagtgagaaagtacctgttcaactactactacctgaaggagtacctgaaggtggtgagcgagaccaacgacgccatcagaaaggccctggaggagttcgccgagatgaaggagagagaggagaagaaggccaacctggagagagaggagaagaagagagactaccaggccagaaagatgcactacctgctgagcaccaagcagatccccggcatctacaacagccccttcagaaaggagcccgacccctgggagctgcagctgcagaaggccaagcccctgacccacagaagacccaaggtgaagcagaaggacagcaccagcctgaccgactggctggcctgcaccagcgccagaagcttccccagaagcgagatcctgccccccatcaacagaaagcagtgccagggccccttcagagacatcaccgaggtgctggagcagagatacagacccctggagcccaccctgagagtggccgagcccatcgacgagctgaagctggccagagaggagctgagaagagaggagtggctgcagaacgtgaacgacaacatgttcctgcccttcagcagctaccacaagaacgagaagtacatccccagcatgcacctgagcagcaagtacggccccatcagctacaaggagcagttcagaagcgagaaccccaagaagtggatctgcgacaaggacttccagaccgtgctgcccagcttcgagctgttcagcaagtacggcaagctgtacagcaaggccggccagatcgtgtag

SEQ ID NO: 100596 - DNA, 1617 bp, synthetic construct
  misc_feature 1..1617: note = Description of Artificial Sequence: Synthetic coding sequence
  source 1..1617: mol_type = other DNA
atggccgagaacctgaagagactggtgagcaacgagaccctgagaaccctgcaggagaagctggacttctggctgaaggagtacaacaccaacacctgcgaccagaacctgaaccactgcctggagctgatcgagcaggtggccaaggtgcagggccagctgttcggcatcctgaccgccgccgcccaggagggcggcagaaacgacggcgtggagaccatcaagagcagactgctgccctggctggaggccagcttcaccgccgccagcctgggcaagagcgtggacagcaaggtgcccagcctgcaggacaccttcgacagagagagacacaaggaccccagccccagagacagagacatgcagcagctggacagcaacctgaacagcaccagaagccagtgcaaccaggtgcaggacgacctggtggagaccgagaagaacctggaggagagcaagaacagaagcgccatcagcctgctggccgccgaggaggagatcaaccagctgaagaagcagctgaagagcctgcaggcccaggaggacgccagacacagaaacaccgaccagagaagcagcgagaacagaagaagcgagccctggagcctggaggagagaaagagagagcagtggaacagcctgaagcagaacgccgaccagcaggacaccgaggccatgagcgactacaagaagcagctgagaaacctgaaggaggagatcgccgtgctgagcgccgagaagagcgccctgcagggcagaagcagcagaagcagaagccccagccccgcccccagaagcagaagctgcagcagaagcagaagcgccagccccagcaccgccgtgaaggtgagaagacccagccccaacagaagcaagctgagcaacgtggccagaaaggccgccctgctgagcagattcagcgacagctacagccaggccagactggacgcccagtgcctgctgagaagatgcatcgacaaggccgagaccgtgcagagaatcatctacatcgccaccgtggaggccttccacgtggccaagatggccttcagacacttcaagatccacgtgagaaagagcctgacccccagctacgtgggcagcaacgacttcgagaacgccgtgctggactacgtgatctgccacctggacctgtacgacagccagagcagcgtgaacgacgtgatcagagccatgaacgtgaaccccaagatcagcttcccccccgtggtggacttctgcctgctgagcgacttcatccaggagatctgctgcatcgccttcgccatgcaggccctggagccccccctggacatcgcctacggcgccgacggcgaggtgttcaacgactgcaagtacagaagaagctacgacagcgacttcaccgcccccctggtgctgtaccacgtgtggcccgccctgatggagaacgactgcgtgatcatgaagggcgaggccgtgaccagaagaggcgccttctggaacagcgtgagaagcgtgagcagatgcagaagcagaagcctgagccccatctgccccagaagccagatcggcctgaacaccatgagcagaagcagaagccccagccccatcagatgcggcctgcccagattctag

SEQ ID NO: 100597 - DNA, 504 bp, synthetic construct
  misc_feature 1..504: note = Description of Artificial Sequence: Synthetic coding sequence
  source 1..504: mol_type = other DNA
atgatcatcaccacctggatcgtgtacatcctggccagaaagggcgtgggcctgcccttcctgcccatcaccagcagcgacatcgacgtggtggagagcgaggccgtgagcgtgctgcaccactggctgaagaagaccgaggaggaggccagcagaggcatcaaggagaagctgagcatcaaccaccccagccagggcgtgagagagaagatgagcaccgacagcccccccacccacggccaggacatccacgtgaccagagacgtggtgaagcaccacctgagcaagagcgacctgctggccaaccagagccaggaggtgctggaggagagaaccagaatccagttcatcagatggagccacaccagaatcttccaggtgcccagcgagatgaccgaggacatcatgagagacagaatcgagcaggtgagaagaagcatcagcagactgaccgacgtgagcgcccaggacttcagcatgagacccagcagcagcgactgctag

SEQ ID NO: 100598 - DNA, 504 bp, synthetic construct; identical to SEQ ID NO: 100597
  misc_feature 1..504: note = Description of Artificial Sequence: Synthetic coding sequence
  source 1..504: mol_type = other DNA

SEQ ID NO: 100599 - DNA, 1563 bp, synthetic construct
  misc_feature 1..1563: note = Description of Artificial Sequence: Synthetic coding sequence
  source 1..1563: mol_type = other DNA
atgggcaagcccagcagcatggacaccaagttcaaggacgacctgttcagaaagtacgtgcagttccacgagagcaaggtggacaccaccaccagcagacagagacccggcagcgacgagtgcctgagagtggccgccagcaccctgctgagcctgcacaaggtggaccccttctacagattcagactgatccagttctacgaggtggtggagagcagcctgagaagcctgagcagcagcagcctgagagccctgcacggcgccttcagcatgctggagaccgtgggcatcaacctgttcctgtacccctggaagaaggagttcagaagcatcaagacctacaccggccccttcgtgtactacgtgaagagcaccctgctggaggaggacatcagagccatcctgagctgcatgggctacacccccgagctgggcaccgcctacaagctgagagagctggtggagaccctgcaggtgaagatggtgagcttcgagctgttcctggccaaggtggagtgcgagcagatgctggagatccacagccaggtgaaggacaagggctacagcgagctggacatcgtgagcgagagaaagagcagcgccgaggacgtgagaggctgcagcgacgccctgagaagaagagccgagggcagagagcacctgaccgccagcatgagcagagtggccctgcagaagagcgccagcgagagagccgccaaggactactacaagcccagagtgaccaagcccagcagaagcgtggacgcctacgacagctactgggagagcagaaagccccccctgaaggccagcctgagcctgagaaaggagcccgtggccaccgacgtgggcgacgacctgaaggacgagatcatcagacccagccccagcctgctgaccatggccagcagcccccacggcagccccgacgtgctgccccccgccagccccagcaacggccccgccctgctgagaggcacctacttcagcacccaggacgacgtggacctgtacaccgacagcgagcccagagccacctacagaagacaggacgccctgagacccgacgtgtggctgctgagaaacgacgcccacagcctgtaccacaagagaagcccccccgccaaggagagcgccctgagcaagtgccagagctgcggcctgagctgcagcagcagcctgtgccagagatgcgacagcctgctgacctgcccccccgccagcaagcccagcgccttccccagcaaggccagcacccacgacagcctggcccacggcgccagcctgagagagaagtaccccggccagacccagggcctggacagactgccccacctgcacagcaagagcaagcccagcaccacccccaccagcagatgcggcttctgcaacagacccggcgccaccaacacctgcacccagtgcagcaaggtgagctgcgacgcctgcctgagcgcctaccactacgacccctgctacaagaagagcgagctgcacaagttcatgcccaacaaccagctgaactacaagagcacccagctgagccacctggtgtacagatag

SEQ ID NO: 100600 - DNA, 1563 bp, synthetic construct; identical to SEQ ID NO: 100599
  misc_feature 1..1563: note = Description of Artificial Sequence: Synthetic coding sequence
  source 1..1563: mol_type = other DNA

SEQ ID NO: 100601 - DNA, 1152 bp, synthetic construct
  misc_feature 1..1152: note = Description of Artificial Sequence: Synthetic coding sequence
  source 1..1152: mol_type = other DNA
atgggctacacccccgagctgggcaccgcctacaagctgagagagctggtggagaccctgcaggtgaagatggtgagcttcgagctgttcctggccaaggtggagtgcgagcagatgctggagatccacagccaggtgaaggacaagggctacagcgagctggacatcgtgagcgagagaaagagcagcgccgaggacgtgagaggctgcagcgacgccctgagaagaagagccgagggcagagagcacctgaccgccagcatgagcagagtggccctgcagaagagcgccagcgagagagccgccaaggactactacaagcccagagtgaccaagcccagcagaagcgtggacgcctacgacagctactgggagagcagaaagccccccctgaaggccagcctgagcctgagaaaggagcccgtggccaccgacgtgggcgacgacctgaaggacgagatcatcagacccagccccagcctgctgaccatggccagcagcccccacggcagccccgacgtgctgccccccgccagccccagcaacggccccgccctgctgagaggcacctacttcagcacccaggacgacgtggacctgtacaccgacagcgagcccagagccacctacagaagacaggacgccctgagacccgacgtgtggctgctgagaaacgacgcccacagcctgtaccacaagagaagcccccccgccaaggagagcgccctgagcaagtgccagagctgcggcctgagctgcagcagcagcctgtgccagagatgcgacagcctgctgacctgcccccccgccagcaagcccagcgccttccccagcaaggccagcacccacgacagcctggcccacggcgccagcctgagagagaagtaccccggccagacccagggcctggacagactgccccacctgcacagcaagagcaagcccagcaccacccccaccagcagatgcggcttctgcaacagacccggcgccaccaacacctgcacccagtgcagcaaggtgagctgcgacgcctgcctgagcgcctaccactacgacccctgctacaagaagagcgagctgcacaagttcatgcccaacaaccagctgaactacaagagcacccagctgagccacctggtgtacagatag

SEQ ID NO: 100602 - DNA, 2409 bp, synthetic construct
  misc_feature 1..2409: note = Description of Artificial Sequence: Synthetic coding sequence
  source 1..2409: mol_type = other DNA
atgctgggcgccagagcctggctgggcagagtgctgctgctgcccagagccggcgccggcctggccgccagcagaagatgccccggcgtgtggcccagaacctggccccacagaagccccagcagaggcagcagcagcagagacaaggacagaagcgccaccgtgagcagcagcgtgcccatgcccgccggcggcaagggcagccaccccagcagcaccccccagagagtgcccaacagactgatccacgagaagagcccctacctgctgcagcacgcctacaaccccgtggactggtacccctggggccaggaggccttcgacaaggccagaaaggagaacaagcccatcttcctgagcgtgggctacagcacctgccactggtgccacatgatggaggaggagagcttccagaacgaggagatcggcagactgctgagcgaggacttcgtgagcgtgaaggtggacagagaggagagacccgacgtggacaaggtgtacatgaccttcgtgcaggccaccagcagcggcggcggctggcccatgaacgtgtggctgacccccaacctgcagcccttcgtgggcggcacctacttcccccccgaggacggcctgaccagagtgggcttcagaaccgtgctgctgagaatcagagagcagtggaagcagaacaagaacaccctgctggagaacagccagagagtgaccaccgccctgctggccagaagcgagatcagcgtgggcgacagacagctgccccccagcgccgccaccgtgaacaacagatgcttccagcagctggacgagggctacgacgaggagtacggcggcttcgccgaggcccccaagttccccacccccgtgatcctgagcttcctgttcagctactggctgagccacagactgacccaggacggcagcagagcccagcagatggccctgcacaccctgaagatgatggccaacggcggcatcagagaccacgtgggccagggcttccacagatacagcaccgacagacagtggcacgtgccccacttcgagaagatgctgtacgaccaggcccagctggccgtggcctacagccaggccttccagctgagcggcgacgagttctacagcgacgtggccaagggcatcctgcagtacgtggccagaagcctgagccacagaagcggcggcttctacagcgccgaggacgccgacagcccccccgagagaggccagagacccaaggagggcgcctactacgtgtggaccgtgaaggaggtgcagcagctgctgcccgagcccgtgctgggcgccaccgagcccctgaccagcggccagctgctgatgaagcactacggcctgaccgaggccggcaacatcagccccagccaggaccccaagggcgagctgcagggccagaacgtgctgaccgtgagatacagcctggagctgaccgccgccagattcggcctggacgtggaggccgtgagaaccctgctgaacagcggcctggagaagctgttccaggccagaaagcacagacccaagccccacctggacagcaagatgctggccgcctggaacggcctgatggtgagcggctacgccgtgaccggcgccgtgctgggccaggacagactgatcaactacgccaccaacggcgccaagttcctgaagagacacatgttcgacgtggccagcggcagactgatgagaacctgctacaccggccccggcggcaccgtggagcacagcaaccccccctgctggggcttcctggaggactacgccttcgtggtgagaggcctgctggacctgtacgaggccagccaggagagcgcctggctggagtgggccctgagactgcaggacacccaggacaagctgttctgggacagccagggcggcggctacttctgcagcgaggccgagctgggcgccggcctgcccctgagactgaaggacgaccaggacggcgccgagcccagcgccaacagcgtgagcgcccacaacctgctgagactgcacggcttcaccggccacaaggactggatggacaagtgcgtgtgcctgctgaccgccttcagcgagagaatgagaagagtgcccgtggccctgcccgagatggtgagagccctgagcgcccagcagcagaccctgaagcagatcgtgatctgcggcgacagacaggccaaggacaccaaggccctggtgcagtgcgtgcacagcgtgtacatccccaacaaggtgctgatcctggccgacggcgaccccagcagcttcctgagcagacagctgcccttcctgagcaccctgagaagactggaggaccaggccaccgcctacgtgtgcgagaaccaggcctgcagcgtgcccatcaccgacccctgcgagctgagaaagctgctgcacccctag

SEQ ID NO: 100603 - DNA, 2361 bp, synthetic construct
  misc_feature 1..2361: note = Description of Artificial Sequence: Synthetic coding sequence
  source 1..2361: mol_type = other DNA
atgctgggcgccagagcctggctgggcagagtgctgctgctgcccagagccggcgccggcctggccgccagcagaagaggcagcagcagcagagacaaggacagaagcgccaccgtgagcagcagcgtgcccatgcccgccggcggcaagggcagccaccccagcagcaccccccagagagtgcccaacagactgatccacgagaagagcccctacctgctgcagcacgcctacaaccccgtggactggtacccctggggccaggaggccttcgacaaggccagaaaggagaacaagcccatcttcctgagcgtgggctacagcacctgccactggtgccacatgatggaggaggagagcttccagaacgaggagatcggcagactgctgagcgaggacttcgtgagcgtgaaggtggacagagaggagagacccgacgtggacaaggtgtacatgaccttcgtgcaggccaccagcagcggcggcggctggcccatgaacgtgtggctgacccccaacctgcagcccttcgtgggcggcacctacttcccccccgaggacggcctgaccagagtgggcttcagaaccgtgctgctgagaatcagagagcagtggaagcagaacaagaacaccctgctggagaacagccagagagtgaccaccgccctgctggccagaagcgagatcagcgtgggcgacagacagctgccccccagcgccgccaccgtgaacaacagatgcttccagcagctggacgagggctacgacgaggagtacggcggcttcgccgaggcccccaagttccccacccccgtgatcctgagcttcctgttcagctactggctgagccacagactgacccaggacggcagcagagcccagcagatggccctgcacaccctgaagatgatggccaacggcggcatcagagaccacgtgggccagggcttccacagatacagcaccgacagacagtggcacgtgccccacttcgagaagatgctgtacgaccaggcccagctggccgtggcctacagccaggccttccagctgagcggcgacgagttctacagcgacgtggccaagggcatcctgcagtacgtggccagaagcctgagccacagaagcggcggcttctacagcgccgaggacgccgacagcccccccgagagaggccagagacccaaggagggcgcctactacgtgtggaccgtgaaggaggtgcagcagctgctgcccgagcccgtgctgggcgccaccgagcccctgaccagcggccagctgctgatgaagcactacggcctgaccgaggccggcaacatcagccccagccaggaccccaagggcgagctgcagggccagaacgtgctgaccgtgagatacagcctggagctgaccgccgccagattcggcctggacgtggaggccgtgagaaccctgctgaacagcggcctggagaagctgttccaggccagaaagcacagacccaagccccacctggacagcaagatgctggccgcctggaacggcctgatggtgagcggctacgccgtgaccggcgccgtgctgggccaggacagactgatcaactacgccaccaacggcgccaagttcctgaagagacacatgttcgacgtggccagcggcagactgatgagaacctgctacaccggccccggcggcaccgtggagcacagcaaccccccctgctggggcttcctggaggactacgccttcgtggtgagaggcctgctggacctgtacgaggccagccaggagagcgcctggctggagtgggccctgagactgcaggacacccaggacaagctgttctgggacagccagggcggcggctacttctgcagcgaggccgagctgggcgccggcctgcccctgagactgaaggacgaccaggacggcgccgagcccagcgccaacagcgtgagcgcccacaacctgctgagactgcacggcttcaccggccacaaggactggatggacaagtgcgtgtgcctgctgaccgccttcagcgagagaatgagaagagtgcccgtggccctgcccgagatggtgagagccctgagcgcccagcagcagaccctgaagcagatcgtgatctgcggcgacagacaggccaaggacaccaaggccctggtgcagtgcgtgcacagcgtgtacatccccaacaaggtgctgatcctggccgacggcgaccccagcagcttcctgagcagacagctgcccttcctgagcaccctgagaagactggaggaccaggccaccgcctacgtgtgcgagaaccaggcctgcagcgtgcccatcaccgacccctgcgagctgagaaagctgctgcacccctag

SEQ ID NO: 100604 - DNA, 2229 bp, synthetic construct
  misc_feature 1..2229: note = Description of Artificial Sequence: Synthetic coding sequence
  source 1..2229: mol_type = other DNA
atgcccgccggcggcaagggcagccaccccagcagcaccccccagagagtgcccaacagactgatccacgagaagagcccctacctgctgcagcacgcctacaaccccgtggactggtacccctggggccaggaggccttcgacaaggccagaaaggagaacaagcccatcttcctgagcgtgggctacagcacctgccactggtgccacatgatggaggaggagagcttccagaacgaggagatcggcagactgctgagcgaggacttcgtgagcgtgaaggtggacagagaggagagacccgacgtggacaaggtgtacatgaccttcgtgcaggccaccagcagcggcggcggctggcccatgaacgtgtggctgacccccaacctgcagcccttcgtgggcggcacctacttcccccccgaggacggcctgaccagagtgggcttcagaaccgtgctgctgagaatcagagagcagtggaagcagaacaagaacaccctgctggagaacagccagagagtgaccaccgccctgctggccagaagcgagatcagcgtgggcgacagacagctgccccccagcgccgccaccgtgaacaacagatgcttccagcagctggacgagggctacgacgaggagtacggcggcttcgccgaggcccccaagttccccacccccgtgatcctgagcttcctgttcagctactggctgagccacagactgacccaggacggcagcagagcccagcagatggccctgcacaccctgaagatgatggccaacggcggcatcagagaccacgtgggccagggcttccacagatacagcaccgacagacagtggcacgtgccccacttcgagaagatgctgtacgaccaggcccagctggccgtggcctacagccaggccttccagctgagcggcgacgagttctacagcgacgtggccaagggcatcctgcagtacgtggccagaagcctgagccacagaagcggcggcttctacagcgccgaggacgccgacagcccccccgagagaggccagagacccaaggagggcgcctactacgtgtggaccgtgaaggaggtgcagcagctgctgcccgagcccgtgctgggcgccaccgagcccctgaccagcggccagctgctgatgaagcactacggcctgaccgaggccggcaacatcagccccagccaggaccccaagggcgagctgcagggccagaacgtgctgaccgtgagatacagcctggagctgaccgccgccagattcggcctggacgtggaggccgtgagaaccctgctgaacagcggcctggagaagctgttccaggccagaaagcacagacccaagccccacctggacagcaagatgctggccgcctggaacggcctgatggtgagcggctacgccgtgaccggcgccgtgctgggccaggacagactgatcaactacgccaccaacggcgccaagttcctgaagagacacatgttcgacgtggccagcggcagactgatgagaacctgctacaccggccccggcggcaccgtggagcacagcaaccccccctgctggggcttcctggaggactacgccttcgtggtgagaggcctgctggacctgtacgaggccagccaggagagcgcctggctggagtgggccctgagactgcaggacacccaggacaagctgttctgggacagccagggcggcggctacttctgcagcgaggccgagctgggcgccggcctgcccctgagactgaaggacgaccaggacggcgccgagcccagcgccaacagcgtgagcgcccacaacctgctgagactgcacggcttcaccggccacaaggactggatggacaagtgcgtgtgcctgctgaccgccttcagcgagagaatgagaagagtgcccgtggccctgcccgagatggtgagagccctgagcgcccagcagcagaccctgaagcagatcgtgatctgcggcgacagacaggccaaggacaccaaggccctggtgcagtgcgtgcacagcgtgtacatccccaacaaggtgctgatcctggccgacggcgaccccagcagcttcctgagcagacagctgcccttcctgagcaccctgagaagactggaggaccaggccaccgcctacgtgtgcgagaaccaggcctgcagcgtgcccatcaccgacccctgcgagctgagaaagctgctgcacccctag

SEQ ID NO: 100605 - DNA, 228 bp, synthetic construct
  misc_feature 1..228: note = Description of Artificial Sequence: Synthetic coding sequence
  source 1..228: mol_type = other DNA
ggccagggccaccagggccccggccagtgcgtgcacagcgtgtacatccccaacaaggtgctgatcctggccgacggcgaccccagcagcttcctgagcagacagctgcccttcctgagcaccctgagaagactggaggaccaggccaccgcctacgtgtgcgagaaccaggcctgcagcgtgcccatcaccgacccctgcgagctgagaaagctgctgcacccctag

SEQ ID NO: 100606 - DNA, 132 bp, synthetic construct
  misc_feature 1..132: note = Description of Artificial Sequence: Synthetic coding sequence
  source 1..132: mol_type = other DNA
atgctgggcgccagagcctggctgggcagagtgctgctgctgcccagagccggcgccggcctggccgccagcagaagaagcgcctgcagccccaccagcagactgaacagcctgagaagcctgatcccctag

SEQ ID NO: 100607 - DNA, 918 bp, synthetic construct
  misc_feature 1..918: note = Description of Artificial Sequence: Synthetic coding sequence
  source 1..918: mol_type = other DNA
atggccgccgccggccaggagaagggctacctgacccagaccgccgccgccctggacaagagccccagcctgagcccccagctggccgcccccatcagaggcagacccaagaagtgcctggtgtacccccacgcccccaagagcagcagactgagcagaagcgtgctgagatggctgcagggcctggacctgagcttcttccccagaaacatcaacagagacttcagcaacggcttcctgatcgccgagatcttctgcatctactacccctgggagctggagctgagcagcttcgagaacggcaccagcctgaaggtgaagctggacaactgggcccagctggagaagttcctggccagaaagaagttcaagctgcccaaggagctgatccacggcaccatccactgcaaggccggcgtgcccgagatcctgatcgaggaggtgtacaccctgctgacccacagagagatcaagagcatccaggacgacttcgtgaacttcaccgactacagctaccagatgagactgcccctggtgagcagaagcaccgtgagcaagagcatcaaggacaacatcagactgagcgagctgctgagcaaccccaacatgctgaccaacgagctgaaggccgagttcctgatcctgctgcacatgctgcagagaaagctgggcagaaagctgaaccccgagtggttcgacgtgaagcccaccgtgggcgaggtgaccctgaaccacctgcccgcccaggccagcggcagaagatacaacctgaaggtgaagagaggcagagtggtgcccgtgctgcccaacatcggcagcggcggcagcagccacagagagatccacgtgaagcaggccggccagcacagctactacagcgccatgaagcccatcagaaacatggacaagaagccctag

SEQ ID NO: 100608 - DNA, 2682 bp, synthetic construct
  misc_feature 1..2682: note = Description of Artificial Sequence: Synthetic coding sequence
  source 1..2682: mol_type = other DNA
atgagcagcaagaagaacagaaagagactgaaccagagcgccgagaacggcagcagcctgcccagcgccgccagcagctgcgccgaggccagagcccccagcgccggcagcgacttcgccgccaccagcggcaccctgaccgtgaccaacctgctggagaaggtggacgacaagatccccaagaccttccagaacagcctgatccacctgggcctgaacaccatgaagagcgccaacatctgcatcggcagacccgtgctgctgaccagcctgaacggcaagcaggaggtgtacaccgcctggcccatggccggcttccccggcggcaaggtgggcctgagcgagatggcccagaagaacgtgggcgtgagacccggcgacgccatccaggtgcagcccctggtgggcgccgtgctgcaggccgaggagatggacgtggccctgagcgacaaggacatggagatcaacgaggaggagctgaccggctgcatcctgagaaagctggacggcaagatcgtgctgcccggcaacttcctgtactgcaccttctacggcagaccctacaagctgcaggtgctgagagtgaagggcgccgacggcatgatcctgggcggcccccagagcgacagcgacaccgacgcccagagaatggccttcgagcagagcagcatggagaccagcagcctggagctgagcctgcagctgagccagctggacctggaggacacccagatccccaccagcagaagcaccccctacaagcccatcgacgacagaatcaccaacaaggccagcgacgtgctgctggacgtgacccagagccccggcgacggcagcggcctgatgctggaggaggtgaccggcctgaagtgcaacttcgagagcgccagagagggcaacgagcagctgaccgaggaggagagactgctgaagttcagcatcggcgccaagtgcaacaccgacaccttctacttcatcagcagcaccaccagagtgaacttcaccgagatcgacaagaacagcaaggagcaggacaaccagttcaaggtgacctacgacatgatcggcggcctgagcagccagctgaaggccatcagagagatcatcgagctgcccctgaagcagcccgagctgttcaagagctacggcatccccgcccccagaggcgtgctgctgtacggcccccccggcaccggcaagaccatgatcgccagagccgtggccaacgaggtgggcgcctacgtgagcgtgatcaacggccccgagatcatcagcaagttctacggcgagaccgaggccaagctgagacagatcttcgccgaggccaccctgagacaccccagcatcatcttcatcgacgagctggacgccctgtgccccaagagagagggcgcccagaacgaggtggagaagagagtggtggccagcctgctgaccctgatggacggcatcggcagcgaggtgagcgagggccaggtgctggtgctgggcgccaccaacagaccccacgccctggacgccgccctgagaagacccggcagattcgacaaggagatcgagatcggcgtgcccaacgcccaggacagactggacatcctgcagaagctgctgagaagagtgccccacctgctgaccgaggccgagctgctgcagctggccaacagcgcccacggctacgtgggcgccgacctgaaggtgctgtgcaacgaggccggcctgtgcgccctgagaagaatcctgaagaagcagcccaacctgcccgacgtgaaggtggccggcctggtgaagatcaccctgaaggacttcctgcaggccatgaacgacatcagacccagcgccatgagagagatcgccatcgacgtgcccaacgtgagctggagcgacatcggcggcctggagagcatcaagctgaagctggagcaggccgtggagtggcccctgaagcaccccgagagcttcatcagaatgggcatccagccccccaagggcgtgctgctgtacggcccccccggctgcagcaagaccatgatcgccaaggccctggccaacgagagcggcctgaacttcctggccatcaagggccccgagctgatgaacaagtacgtgggcgagagcgagagagccgtgagagagaccttcagaaaggccagagccgtggcccccagcatcatcttcttcgacgagctggacgccctggccgtggagagaggcagcagcctgggcgccggcaacgtggccgacagagtgctggcccagctgctgaccgagatggacggcatcgagcagctgaaggacgtgaccatcctggccgccaccaacagacccgacagaatcgacaaggccctgatgagacccggcagaatcgacagaatcatctacgtgcccctgcccgacgccgccaccagaagagagatcttcaagctgcagttccacagcatgcccgtgagcaacgaggtggacctggacgagctgatcctgcagaccgacgcctacagcggcgccgagatcgtggccgtgtgcagagaggccgccctgctggccctggaggaggacatccaggccaacctgatcatgaagagacacttcacccaggccctgagcaccgtgacccccagaatccccgagagcctgagaagattctacgaggactaccaggagaagagcggcctgcacaccctgtag

SEQ ID NO: 100609 - DNA, 750 bp, synthetic construct
  misc_feature 1..750: note = Description of Artificial Sequence: Synthetic coding sequence
  source 1..750: mol_type = other DNA
atgcagctggacaagttcatctaccacctggcccccgtggagaagagccacggcagactgcagaacagaaccagcagaagccagaagaagaagagcaagagccccgagagaagcaagtactgcatcaacgccaagaactacgagcagcccaccatcagcagcaagagccacagccccagcccctacaccaagagaagaatgtgcgagctgagcgaggacaccagaagaagactggcccacctgaacctgggcccctacgagttcaagaaggagaccgacaagccccccttcgtgatcagacacgtggacccccccagccccagagccgacaccctgctgggcagcagcggcagagactgcgagagagacggctggagcagagtgcacaacgaccacagccacctgggctgctgcagacccaaggactacaaggtgatcagaaccccccacggcagagacttcgacgacagcctggagaagtgcgaggagtacctgagccccagaagctgcagcaagcccagacacagcgccagaaccctgctggtgcacagcgcccccagcaccatgcccaagcacagccccagccccgtgctgaacagagccagcctgagagagagattccacagcgactggtgcagccccagcaactgcgacgagatccacgacagagacgagagagacctggagaaggacgacgagctggagctgaagagaagcctgctgtgcagagacagcgcctacgacagctag

SEQ ID NO: 100610 - DNA, 1419 bp, synthetic construct
  misc_feature 1..1419: note = Description of Artificial Sequence: Synthetic coding sequence
  source 1..1419: mol_type = other DNA
atgcccaaggtgaaggccctgcagtgcgccctggccctggagatcagcagcgtgacctgccccggcgtggtgctgaaggacaaggaggacatctacctgagcatctgcgtgttcggccagtacaagaagacccagtgcgtgcccgccaccttccccctggtgttcaacgccagaatggtgttcgagaaggtgttccccgacgccgtggaccccggcgacgtggtgacccagctggagtacgacaccgccgtgttcgagctgatccagctggtgccccccgtgggcgagaccctgagcacctacgacgagaacaccagagacttcatgttccccggccccaaccagatgagcggccaccacgacagcaacagacaggtgaccatgagaagaatcagcggcctgagaggcaacgcccccagactggagttcagcaccaccagcgtgatcaccgagtgcctgatcagcagcagaaagtgccacacccaggacaagttcatctaccacctggcccccgtggagaagagccacggcagactgcagaacagaaccagcagaagccagaagaagaagagcaagagccccgagagaagcaagtactgcatcaacgccaagaactacgagcagcccaccatcagcagcaagagccacagccccagcccctacaccaagagaagaatgtgcgagctgagcgaggacaccagaagaagactggcccacctgaacctgggcccctacgagttcaagaaggagaccgacaagccccccttcgtgatcagacacgtggacccccccagccccagagccgacaccctgctgggcagcagcggcagagactgcgagagagacggctggagcagagtgcacaacgaccacagccacctgggctgctgcagacccaaggactacaaggtgatcagaaccccccacggcagagacttcgacgacagcctggagaagtgcgaggagtacctgagccccagaagctgcagcaagcccagacacagcgccagaaccctgctggtgcacagcgcccccagcaccatgcccaagcacagccccagccccgtgctgaacagagccagcctgagagagagattccacagcgactggtgcagccccagcaactgcgacgagatccacgacagagacgagagagacctggagaaggacgacgagctggagctgaagagaagcctgctgtgcagagacagcgcctacgacagcgaccccgagtacagcagctgccagcagcccagaggcaccttccacctggacgacggcgagtactggagcaacagagccgccagctacaagggcaagagccacagacccatcttcgagaacagcatggacaagatgtacagaaacctgtacaagaaggcctgcagcagcgccagccacacccaggagagcttctag

SEQ ID NO: 100611 - DNA, 1467 bp, synthetic construct
  misc_feature 1..1467: note = Description of Artificial Sequence: Synthetic coding sequence
  source 1..1467: mol_type = other DNA
atgcccaaggtgaaggccctgcagtgcgccctggccctggagatcagcagcgtgacctgccccggcgtggtgctgaaggacaaggaggacatctacctgagcatctgcgtgttcggccagtacaagaagacccagtgcgtgcccgccaccttccccctggtgttcaacgccagaatggtgttcgagaaggtgttccccgacgccgtggaccccggcgacgtggtgacccagctggagtacgacaccgccgtgttcgagctgatccagctggtgccccccgtgggcgagaccctgagcacctacgacgagaacaccagagacttcatgttccccggccccaaccagatgagcggccaccacgacagcaacagacaggtgaccatgagaagaatcagcggcctgagaggcaacgcccccagactggagttcagcaccaccagcgtgatcaccgagtgcctgatcagcagcagaaagtgccacacccaggacaagttcatctaccacctggcccccgtggagaagagccacggcagactgcagaacagaaccagcagaagccagaagaagaagagcaagagccccgagagaagcaagtactgcatcaacgccaagaactacgagcagcccaccatcagcagcaagagccacagccccagcccctacaccaagagaagaatgtgcgagctgagcgaggacaccagaagaagactggcccacctgaacctgggcccctacgagttcaagaaggagaccgacaagccccccttcgtgatcagacacgtggacccccccagccccagagccgacaccctgctgggcagcagcggcagagactgcgagagagacggctggagcagagtgcacaacgaccacagccacctgggctgctgcagacccaaggactacaaggtgatcagaaccccccacggcagagacttcgacgacagcctggagaagtgcgaggagtacctgagccccagaagctgcagcaagcccagacacagcgccagaaccctgctggtgcacagcgcccccagcaccatgcccaagcacagccccagccccgtgctgaacagagccagcctgagagagagattccacagcgactggtgcagccccagcaactgcgacgagatccacgacagagtgaagaacgtgctgaagagccaccaggcccaccagagacacctgtacgacgagagagacctggagaaggacgacgagctggagctgaagagaagcctgctgtgcagagacagcgcctacgacagcgaccccgagtacagcagctgccagcagcccagaggcaccttccacctggacgacggcgagtactggagcaacagagccgccagctacaagggcaagagccacagacccatcttcgagaacagcatggacaagatgtacagaaacctgtacaagaaggcctgcagcagcgccagccacacccaggagagcttctag

SEQ ID NO: 100612 - DNA, 1251 bp, synthetic construct
  misc_feature 1..1251: note = Description of Artificial Sequence: Synthetic coding sequence
  source 1..1251: mol_type = other DNA
atggtgttcgagaaggtgttccccgacgccgtggaccccggcgacgtggtgacccagctggagctgggcgagaccctgagcacctacgacgagaacaccagagacttcatgttccccggccccaaccagatgagcggccaccacgacagcaacagacaggtgaccatgagaagaatcagcggcctgagaggcaacgcccccagactggagttcagcaccaccagcgtgatcaccgagtgcctgatcagcagcagaaagtgccacacccaggacaagttcatctaccacctggcccccgtggagaagagccacggcagactgcagaacagaaccagcagaagccagaagaagaagagcaagagccccgagagaagcaagtactgcatcaacgccaagaactacgagcagcccaccatcagcagcaagagccacagccccagcccctacaccaagagaagaatgtgcgagctgagcgaggacaccagaagaagactggcccacctgaacctgggcccctacgagttcaagaaggagaccgacaagccccccttcgtgatcagacacgtggacccccccagccccagagccgacaccctgctgggcagcagcggcagagactgcgagagagacggctggagcagagtgcacaacgaccacagccacctgggctgctgcagacccaaggactacaaggtgatcagaaccccccacggcagagacttcgacgacagcctggagaagtgcgaggagtacctgagccccagaagctgcagcaagcccagacacagcgccagaaccctgctggtgcacagcgcccccagcaccatgcccaagcacagccccagccccgtgctgaacagagccagcctgagagagagattccacagcgactggtgcagccccagcaactgcgacgagatccacgacagagtgaagaacgtgctgaagagccaccaggcccaccagagacacctgtacgacgagagagacctggagaaggacgacgagctggagctgaagagaagcctgctgtgcagagacagcgcctacgacagcgaccccgagtacagcagctgccagcagcccagaggcaccttccacctggacgacggcgagtactggagcaacagagccgccagctacaagggcaagagccacagacccatcttcgagaacagcatggacaagatgtacagaaacctgtacaagaaggcctgcagcagcgccagccacacccaggagagcttctag

SEQ ID NO: 100613 - DNA, 1377 bp, synthetic construct
  misc_feature 1..1377: note = Description of Artificial Sequence: Synthetic coding sequence
  source 1..1377: mol_type = other DNA
atggacggcagcagaagagtgagagccaccagcgtgctgcccagatacggccccccctgcctgttcaagggccacctgagcaccaagagcaacgccttctgcaccgacagcagcagcctgagactgagcaccctgcagctggtgaagaaccacatggccgtgcactacaacaagatcctgagcgccaaggccgccgtggactgcagcgtgcccgtgagcgtgagcaccagcatcaagtacgccgaccagcagagaagagagaagctgaagaaggagctggcccagtgcgagaaggagttcaagctgaccaagaccgccatgagagccaactacaagaacaacagcaagagcctgttcaacaccctgcagaagcccagcggcgagccccagatcgaggacgacatgctgaaggaggagatgaacggcttcagcagcttcgccagaagcctggtgcccagcagcgagagactgcacctgagcctgcacaagagcagcaaggtgatcaccaacggccccgagaagaacagcagcagcagccccagcagcgtggactacgccgccagcggccccagaaagctgagcagcggcgccctgtacggcagaagacccagaagcaccttccccaacagccacagattccagctggtgatcagcaaggcccccagcggcgacctgctggacaagcacagcgagctgttcagcaacaagcagctgcccttcacccccagaaccctgaagaccgaggccaagagcttcctgagccagtacagatactacacccccgccaagagaaagaaggacttcaccgaccagagaatcgaggccgagacccagaccgagctgagcttcaagagcgagctgggcaccgccgagaccaagaacatgaccgacagcgagatgaacatcaagcaggccagcaactgcgtgacctacgacgccaaggagaagatcgcccccctgcccctggagggccacgacagcacctgggacgagatcaaggacgacgccctgcagcacagcagccccagagccatgtgccagtacagcctgaagccccccagcaccagaaagatctacagcgacgaggaggagctgctgtacctgagcttcatcgaggacgtgaccgacgagatcctgaagctgggcctgttcagcaacagattcctggagagactgttcgagagacacatcaagcagaacaagcacctggaggaggagaagatgagacacctgctgcacgtgctgaaggtggacctgggctgcaccagcgaggagaacagcttcagcagcgtgaagggcgacaacaaccacgacatggagctgagcaccctgaagatcatggagatgagcatcgaggactgccccctggacgtgtag

SEQ ID NO: 100614 - DNA, 1704 bp, synthetic construct
  misc_feature 1..1704: note = Description of Artificial Sequence: Synthetic coding sequence
  source 1..1704: mol_type = other DNA
atggacggcagcagaagagtgagagccaccagcgtgctgcccagatacggccccccctgcctgttcaagggccacctgagcaccaagagcaacgccgccgtggactgcagcgtgcccgtgagcgtgagcaccagcatcaagtacgccgaccagcagagaagagagaagctgaagaaggagctggcccagtgcgagaaggagttcaagctgaccaagaccgccatgagagccaactacaagaacaacagcaagagcctgttcaacaccctgcagaagcccagcggcgagccccagatcgaggacgacatgctgaaggaggagatgaacggcttcagcagcttcgccagaagcctggtgcccagcagcgagagactgcacctgagcctgcacaagagcagcaaggtgatcaccaacggccccgagaagaacagcagcagcagccccagcagcgtggactacgccgccagcggccccagaaagctgagcagcggcgccctgtacggcagaagacccagaagcaccttccccaacagccacagattccagctggtgatcagcaaggcccccagcggcgacctgctggacaagcacagcgagctgttcagcaacaagcagctgcccttcacccccagaaccctgaagaccgaggccaagagcttcctgagccagtacagatactacacccccgccaagagaaagaaggacttcaccgaccagagaatcgaggccgagacccagaccgagctgagcttcaagagcgagctgggcaccgccgagaccaagaacatgaccgacagcgagatgaacatcaagcaggccagcaactgcgtgacctacgacgccaaggagaagatcgcccccctgcccctggagggccacgacagcacctgggacgagatcaaggacgacgccctgcagcacagcagccccagagccatgtgccagtacagcctgaagccccccagcaccagaaagatctacagcgacgaggaggagctgctgtacctgagcttcatcgaggacgtgaccgacgagatcctgaagctgggcctgttcagcaacagattcctggagagactgttcgagagacacatcaagcagaacaagcacctggaggaggagaagatgagacacctgctgcacgtgctgaaggtggacctgggctgcaccagcgaggagaacagcgtgaagcagaacgacgtggacatgctgaacgtgttcgacttcgagaaggccggcaacagcgagcccaacgagctgaagaacgagagcgaggtgaccatccagcaggagagacagcagtaccagaaggccctggacatgctgctgagcgcccccaaggacgagaacgagatcttccccagccccaccgagttcttcatgcccatctacaagagcaagcacagcgagggcgtgatcatccagcaggtgaacgacgagaccaacctggagaccagcaccctggacgagaaccaccccagcatcagcgacagcctgaccgacagagagaccagcgtgaacgtgatcgagggcgacagcgaccccgagaaggtggagatcagcaacggcctgtgcggcctgaacaccagccccagccagagcgtgcagttcagcagcgtgaagggcgacaacaaccacgacatggagctgagcaccctgaagatcatggagatgagcatcgaggactgccccctggacgtgtag

SEQ ID NO: 100615 - DNA, 1800 bp, synthetic construct
  misc_feature 1..1800: note = Description of Artificial Sequence: Synthetic coding sequence
  source 1..1800: mol_type = other DNA
atggacggcagcagaagagtgagagccaccagcgtgctgcccagatacggccccccctgcctgttcaagggccacctgagcaccaagagcaacgccttctgcaccgacagcagcagcctgagactgagcaccctgcagctggtgaagaaccacatggccgtgcactacaacaagatcctgagcgccaaggccgccgtggactgcagcgtgcccgtgagcgtgagcaccagcatcaagtacgccgaccagcagagaagagagaagctgaagaaggagctggcccagtgcgagaaggagttcaagctgaccaagaccgccatgagagccaactacaagaacaacagcaagagcctgttcaacaccctgcagaagcccagcggcgagccccagatcgaggacgacatgctgaaggaggagatgaacggcttcagcagcttcgccagaagcctggtgcccagcagcgagagactgcacctgagcctgcacaagagcagcaaggtgatcaccaacggccccgagaagaacagcagcagcagccccagcagcgtggactacgccgccagcggccccagaaagctgagcagcggcgccctgtacggcagaagacccagaagcaccttccccaacagccacagattccagctggtgatcagcaaggcccccagcggcgacctgctggacaagcacagcgagctgttcagcaacaagcagctgcccttcacccccagaaccctgaagaccgaggccaagagcttcctgagccagtacagatactacacccccgccaagagaaagaaggacttcaccgaccagagaatcgaggccgagacccagaccgagctgagcttcaagagcgagctgggcaccgccgagaccaagaacatgaccgacagcgagatgaacatcaagcaggccagcaactgcgtgacctacgacgccaaggagaagatcgcccccctgcccctggagggccacgacagcacctgggacgagatcaaggacgacgccctgcagcacagcagccccagagccatgtgccagtacagcctgaagccccccagcaccagaaagatctacagcgacgaggaggagctgctgtacctgagcttcatcgaggacgtgaccgacgagatcctgaagctgggcctgttcagcaacagattcctggagagactgttcgagagacacatcaagcagaacaagcacctggaggaggagaagatgagacacctgctgcacgtgctgaaggtggacctgggctgcaccagcgaggagaacagcgtgaagcagaacgacgtggacatgctgaacgtgttcgacttcgagaaggccggcaacagcgagcccaacgagctgaagaacgagagcgaggtgaccatccagcaggagagacagcagtaccagaaggccctggacatgctgctgagcgcccccaaggacgagaacgagatcttccccagccccaccgagttcttcatgcccatctacaagagcaagcacagcgagggcgtgatcatccagcaggtgaacgacgagaccaacctggagaccagcaccctggacgagaaccaccccagcatcagcgacagcctgaccgacagagagaccagcgtgaacgtgatcgagggcgacagcgaccccgagaaggtggagatcagcaacggcctgtgcggcctgaacaccagccccagccagagcgtgcagttcagcagcgtgaagggcgacaacaaccacgacatggagctgagcaccctgaagatcatggagatgagcatcgaggactgccccctggacgtgtag

SEQ ID NO: 100616 - DNA, 1704 bp, synthetic construct; identical to SEQ ID NO: 100614
  misc_feature 1..1704: note = Description of Artificial Sequence: Synthetic coding sequence
  source 1..1704: mol_type = other DNA

SEQ ID NO: 100617 - DNA, 318 bp, synthetic construct
  misc_feature 1..318: note = Description of Artificial Sequence: Synthetic coding sequence
  source 1..318: mol_type = other DNA
atggcccccgccggcatgagcggcgcccaggacaacagctgcctgtaccaggagatcgcccccagcttccagagactgccctgccccagaaccagcagcagacacttcagcgaggccatgacctgcccctgcggctggagacccttcaagggcggccccggcggcctgaagggccccgtgtggcccgccaaggaggagaacagctgcagccacggcagaatccagagagtgcagagaagaagagtgcccagcgccagccccctgatccagaagatcaacagaagaagcgtgctgttccacccctactgctggagctag

SEQ ID NO: 100618 - DNA, 1638 bp, synthetic construct
  misc_feature 1..1638: note = Description of Artificial Sequence: Synthetic coding sequence
  source 1..1638: mol_type = other DNA
atgagcagaaagcagaaccagaaggacagcagcggcttcatcttcgacctgcagagcaacaccgtgctggcccagggcggcgccttcgagaacatgaaggagaagatcaacgccgtgagagccatcgtgcccaacaagagcaacaacgagatcatcctggtgctgcagcacttcgacaactgcgtggacaagaccgtgcaggccttcatggagggcagcgccagcgaggtgctgaaggagtggaccgtgaccggcaagaagaagaacaagaagaagaagaacaagcccaagcccgccgccgagcccagcaacggcatccccgacagcagcaagagcgtgagcatccaggaggagcagagcgcccccagcagcgagaagggcggcatgaacggctaccacgtgaacggcgccatcaacgacaccgagagcgtggacagcctgagcgagggcctggagaccctgagcatcgacgccagagagctggaggaccccgagagcgccatgctggacaccctggacagaaccggcagcatgctgcagaacggcgtgagcgacttcgagaccaagagcctgaccatgcacagcatccacaacagccagcagcccagaaacgccgccaagagcctgagcagacccaccaccgagacccagttcagcaacatgggcatggaggacgtgcccctggccaccagcaagaagctgagcagcaacatcgagaagagcgtgaaggacctgcagagatgcaccgtgagcctggccagatacagagtggtggtgaaggaggagatggacgccagcatcaagaagatgaagcaggccttcgccgagctggagagctgcctgatggacagagaggtggccctgctggccgagatggacaaggtgaaggccgaggccatggagatcctgctgagcagacagaagaaggccgagctgctgaagaagatgacccacgtggccgtgcagatgagcgagcagcagctggtggagctgagagccgacatcaagcacttcgtgagcgagagaaagtacgacgaggacctgggcagagtggccagattcacctgcgacgtggagaccctgaagaagagcatcgacagcttcggccaggtgagccaccccaagaacagctacagcaccagaagcagatgcagcagcgtgaccagcgtgagcctgagcagccccagcgacgccagcgccgccagcagcagcacctgcgccagcccccccagcctgaccagcgccaacaagaagaacttcgcccccggcgagacccccgccgccatcgccaacagcagcggccagccctaccagcccctgagagaggtgctgcccggcaacagaagaggcggccagggctacagaccccagggccagaagagcaacgaccccatgaaccagggcagacacgacagcatgggcagatacagaaacagcagctggtacagcagcggcagcagataccagagcgcccccagccaggcccccggcaacaccatcgagagaggccagacccacagcgccggcaccaacggcaccggcgtgagcatggagcccagcccccccacccccagcttcaagaagggcctgccccagagaaagcccagaaccagccagaccgaggccgtgaacagctag

SEQ ID NO: 100619 - DNA, 1638 bp, synthetic construct
  misc_feature 1..1638: note = Description of Artificial Sequence: Synthetic coding sequence
  source 1..1638: mol_type = other DNA
gtgagcaagaagaagaagaagaaggacagcagcggcttcatcttcgacctgcagagcaacaccgtgctggcccagggcggcgccttcgagaacatgaaggagaagatcaacgccgtgagagccatcgtgcccaacaagagcaacaacgagatcatcctggtgctgcagcacttcgacaactgcgtggacaagaccgtgcaggccttcatggagggcagcgccagcgaggtgctgaaggagtggaccgtgaccggcaagaagaagaacaagaagaagaagaacaagcccaagcccgccgccgagcccagcaacggcatccccgacagcagcaagagcgtgagcatccaggaggagcagagcgcccccagcagcgagaagggcggcatgaacggctaccacgtgaacggcgccatcaacgacaccgagagcgtggacagcctgagcgagggcctggagaccctgagcatcgacgccagagagctggaggaccccgagagcgccatgctggacaccctggacagaaccggcagcatgctgcagaacggcgtgagcgacttcgagaccaagagcctgaccatgcacagcatccacaacagccagcagcccagaaacgccgccaagagcctgagcagacccaccaccgagacccagttcagcaacatgggcatggaggacgtgcccctggccaccagcaagaagctgagcagcaacatcgagaagagcgtgaaggacctgcagagatgcaccgtgagcctggccagatacagagtggtggtgaaggaggagatggacgccagcatcaagaagatgaagcaggccttcgccgagctggagagctgcctgatggacagagaggtggccctgctggccgagatggacaaggtgaaggccgaggccatggagatcctgctgagcagacagaagaaggccgagctgctgaagaagatgacccacgtggccgtgcagatgagcgagcagcagctggtggagctgagagccgacatcaagcacttcgtgagcgagagaaagtacgacgaggacctgggcagagtggccagattcacctgcgacgtggagaccctgaagaagagcatcgacagcttcggccaggtgagccaccccaagaacagctacagcaccagaagcagatgcagcagcgtgaccagcgtgagcctgagcagccccagcgacgccagcgccgccagcagcagcacctgcgccagcccccccagcctgaccagcgccaacaagaagaacttcgcccccggcgagacccccgccgccatcgccaacagcagcggccagccctaccagcccctgagagaggtgctgcccggcaacagaagaggcggccagggctacagaccccagggccagaagagcaacgaccccatgaaccagggcagacacgacagcatgggcagatacagaaacagcagctggtacagcagcggcagcagataccagagcgcccccagccaggcccccggcaacaccatcgagagaggccagacccacagcgccggcaccaacggcaccggcgtgagcatggagcccagcccccccacccccagcttcaagaagggcctgccccagagaaagcccagaaccagccagaccgaggccgtgaacagctag

SEQ ID NO: 100620 - DNA, 27 bp, synthetic construct
  misc_feature 1..27: note = Description of Artificial Sequence: Synthetic coding sequence
  source 1..27: mol_type = other DNA
atgagcagaaagcagaaccagaagtag

SEQ ID NO: 100621 - DNA, 27 bp, synthetic construct
  misc_feature 1..27: note = Description of Artificial Sequence: Synthetic coding sequence
  source 1..27: mol_type = other DNA
atgagcagaaagcagaaccagaagtag

SEQ ID NO: 100622 - DNA, 204 bp, synthetic construct
  misc_feature 1..204: note = Description of Artificial Sequence: Synthetic coding sequence
  source 1..204: mol_type = other DNA
atgagcagaaagcagaaccagaaggacagcagcggcttcatcttcgacctgcagagcaacaccgtgctggcccagggcggcgccttcgagaacatgaaggagaagatcaacgccgtgagagccatcgtgcccaacaagagcaacaacgagatcatcctggtgctgcagcacttcgacaactgcgtggacaagaccgtgcagtag

SEQ ID NO: 100623 - DNA, 102 bp, synthetic construct
  misc_feature 1..102: note = Description of Artificial Sequence: Synthetic coding sequence
  source 1..102: mol_type = other DNA
atgagcagaaagcagaaccagaaggacagcagcggcttcatcttcgacctgcagagcaacaccgtgctggcccagggcggcgccttcgagaacatgaagtag

SEQ ID NO: 100624 - DNA, 18 bp, synthetic construct
  misc_feature 1..18: note = Description of Artificial Sequence: Synthetic coding sequence
  source 1..18: mol_type = other DNA
atgagcagaaagcagtag

SEQ ID NO: 100625 - DNA, 111 bp, synthetic construct
  misc_feature 1..111: note = Description of Artificial Sequence: Synthetic coding sequence
  source 1..111: mol_type = other DNA
atgagcagaaagcagaaccagaaggacagcagcggcttcatcttcgacctgcagagcaacaccgtgctggcccagggcggcgccttcgagaacatgaaggagaaggtgtag

SEQ ID NO: 100626 - DNA, 201 bp, synthetic construct
  misc_feature 1..201: note = Description of Artificial Sequence: Synthetic coding sequence
  source 1..201: mol_type = other DNA
atgagcagaaagcagaaccagaaggacagcagcggcttcatcttcgacctgcagagcaacaccgtgctggcccagggcggcgccttcgagaacatgaaggagaagatcaacgccgtgagagccatcgtgcccaacaagagcaacaacgagatcatcctggtgctgcagcacttcgacaactgcgtggacaagaccgtgtag

SEQ ID NO: 100627 - DNA, 105 bp, synthetic construct
  misc_feature 1..105: note = Description of Artificial Sequence: Synthetic coding sequence
  source 1..105: mol_type = other DNA
atgagcagaaagcagaaccagaaggacagcagcggcttcatcttcgacctgcagagcaacaccgtgctggcccagggcggcgccttcgagaacatgaaggagtag

SEQ ID NO: 100628 - DNA, 297 bp, synthetic construct
  misc_feature 1..297: note = Description of Artificial Sequence: Synthetic coding sequence
  source 1..297: mol_type = other DNA
atgagcagaaagcagaaccagaaggacagcagcggcttcatcttcgacctgcagagcaacaccgtgctggcccagggcggcgccttcgagaacatgaaggagaagatcaacgccgtgagagccatcgtgcccaacaagagcaacaacgagatcatcctggtgctgcagcacttcgacaactgcgtggacaagaccgtgcaggccttcatggagggcagcgccagcgaggtgctgaaggagtggaccgtgaccggcaagaagaagaacaagaagaagaagaacaagcccaagccctag

SEQ ID NO: 100629 - DNA, 225 bp, synthetic construct
  misc_feature 1..225: note = Description of Artificial Sequence: Synthetic coding sequence
  source 1..225: mol_type = other DNA
atgagcagaaagcagaaccagaaggacagcagcggcttcatcttcgacctgcagagcaacaccgtgctggcccagggcggcgccttcgagaacatgaaggagaagatcaacgccgtgagagccatcgtgcccaacaagagcaacaacgagatcatcctggtgctgcagcacttcgacaactgcgtggacaagaccgtgcaggccttcatggagggcagcgcctag

SEQ ID NO: 100630 - DNA, 33 bp, synthetic construct
  misc_feature 1..33: note = Description of Artificial Sequence: Synthetic coding sequence
  source 1..33: mol_type = other DNA
atgagcagaaagcagaaccagaaggacagctag

SEQ ID NO: 100631 - DNA, 1638 bp, synthetic construct; identical to SEQ ID NO: 100618
  misc_feature 1..1638: note = Description of Artificial Sequence: Synthetic coding sequence
  source 1..1638: mol_type = other DNA

SEQ ID NO: 100632 - DNA, 1638 bp, synthetic construct; identical to SEQ ID NO: 100618
  misc_feature 1..1638: note = Description of Artificial Sequence: Synthetic coding sequence
  source 1..1638: mol_type = other DNA

SEQ ID NO: 100633 - DNA, 1677 bp, synthetic construct
  misc_feature 1..1677: note = Description of Artificial Sequence: Synthetic coding sequence
  source 1..1677: mol_type = other DNA
atggccgagctgaacacccacgtgaacgtgaaggagaagatctacgccgtgagaagcgtggtgcccaacaagagcaacaacgagatcgtgctggtgctgcagcagttcgacttcaacgtggacaaggccgtgcaggccttcgtggacggcagcgccatccaggtgctgaaggagtggaacatgaccggcaagaagaagaacaacaagagaaagagaagcaagagcaagcagcaccagggcaacaaggacgccaaggacaaggtggagagacccgaggccggccccctgcagccccagcccccccagatccagaacggccccatgaacggctgcgagaaggacagcagcagcaccgacagcgccaacgagaagcccgccctgatccccagagagaagaagatcagcatcctggaggagcccagcaaggccctgagaggcgtgaccgagggcaacagactgctgcagcagaagctgagcctggacggcaaccccaagcccatccacggcaccaccgagagaagcgacggcctgcagtggagcgccgagcagccctgcaaccccagcaagcccaaggccaagaccagccccgtgaagagcaacacccccgccgcccacctggagatcaagcccgacgagctggccaagaagagaggccccaacatcgagaagagcgtgaaggacctgcagagatgcaccgtgagcctgaccagatacagagtgatgatcaaggaggaggtggacagcagcgtgaagaagatcaaggccgccttcgccgagctgcacaactgcatcatcgacaaggaggtgagcctgatggccgagatggacaaggtgaaggaggaggccatggagatcctgaccgccagacagaagaaggccgaggagctgaagagactgaccgacctggccagccagatggccgagatgcagctggccgagctgagagccgagatcaagcacttcgtgagcgagagaaagtacgacgaggagctgggcaaggccgccagattcagctgcgacatcgagcagctgaaggcccagatcatgctgtgcggcgagatcacccaccccaagaacaactacagcagcagaaccccctgcagcagcctgctgcccctgctgaacgcccacgccgccaccagcggcaagcagagcaacttcagcagaaagagcagcacccacaacaagcccagcgagggcaaggccgccaaccccaagatggtgagcagcctgcccagcaccgccgaccccagccaccagaccatgcccgccaacaagcagaacggcagcagcaaccagagaagaagattcaacccccagtaccacaacaacagactgaacggccccgccaagagccagggcagcggcaacgaggccgagcccctgggcaagggcaacagcagacacgagcacagaagacagccccacaacggcttcagacccaagaacaagggcggcgccaagaaccaggaggccagcctgggcatgaagacccccgaggcccccgcccacagcgagaagcccagaagaagacagcacgccgccgacaccagcgaggccagacccttcagaggcagcgtgggcagagtgagccagtgcaacctgtgccccaccagaatcgaggtgagcaccgacgccgccgtgctgagcgtgcccgccgtgaccctggtggcctag

SEQ ID NO: 100634 - DNA, 1470 bp, synthetic construct
  misc_feature 1..1470: note = Description of Artificial Sequence: Synthetic coding sequence
  source 1..1470: mol_type = other DNA
atggccgagctgaacacccacgtgaacgtgaaggagaagatctacgccgtgagaagcgtggtgcccaacaagagcaacaacgagatcgtgctggtgctgcagcagttcgacttcaacgtggacaaggccgtgcaggccttcgtggacggcagcgccatccaggtgctgaaggagtggaacatgaccggcaagaagaagaacaacaagagaaagagaagcaagagcaagcagcaccagggcaacaaggacgccaaggacaaggtggagagacccgaggccggccccctgcagccccagcccccccagatccagaacggccccatgaacggctgcgagaaggacagcagcagcaccgacagcgccaacgagaagcccgccctgatccccagagagaagaagatcagcatcctggaggagcccagcaaggccctgagaggcgtgaccggccccaacatcgagaagagcgtgaaggacctgcagagatgcaccgtgagcctgaccagatacagagtgatgatcaaggaggaggtggacagcagcgtgaagaagatcaaggccgccttcgccgagctgcacaactgcatcatcgacaaggaggtgagcctgatggccgagatggacaaggtgaaggaggaggccatggagatcctgaccgccagacagaagaaggccgaggagctgaagagactgaccgacctggccagccagatggccgagatgcagctggccgagctgagagccgagatcaagcacttcgtgagcgagagaaagtacgacgaggagctgggcaaggccgccagattcagctgcgacatcgagcagctgaaggcccagatcatgctgtgcggcgagatcacccaccccaagaacaactacagcagcagaaccccctgcagcagcctgctgcccctgctgaacgcccacgccgccaccagcggcaagcagagcaacttcagcagaaagagcagcacccacaacaagcccagcgagggcaaggccgccaaccccaagatggtgagcagcctgcccagcaccgccgaccccagccaccagaccatgcccgccaacaagcagaacggcagcagcaaccagagaagaagattcaacccccagtaccacaacaacagactgaacggccccgccaagagccagggcagcggcaacgaggccgagcccctgggcaagggcaacagcagacacgagcacagaagacagccccacaacggcttcagacccaagaacaagggcggcgccaagaaccaggaggccagcctgggcatgaagacccccgaggcccccgcccacagcgagaagcccagaagaagacagcacgccgccgacaccagcgaggccagacccttcagaggcagcgtgggcagagtgagccagtgcaacctgtgccccaccagaatcgaggtgagcaccgacgccgccgtgctgagcgtgcccgccgtgaccctggtggcctag

SEQ ID NO: 100635 - DNA, 1677 bp, synthetic construct; identical to SEQ ID NO: 100633
  misc_feature 1..1677: note = Description of Artificial Sequence: Synthetic coding sequence
  source 1..1677: mol_type = other DNA

SEQ ID NO: 100636 - DNA, 1701 bp, synthetic construct
  misc_feature 1..1701: note = Description of Artificial Sequence: Synthetic coding sequence
  source 1..1701: mol_type = other DNA
atggcctacagcaccagaagcaagatggccgagctgaacacccacgtgaacgtgaaggagaagatctacgccgtgagaagcgtggtgcccaacaagagcaacaacgagatcgtgctggtgctgcagcagttcgacttcaacgtggacaaggccgtgcaggccttcgtggacggcagcgccatccaggtgctgaaggagtggaacatgaccggcaagaagaagaacaacaagagaaagagaagcaagagcaagcagcaccagggcaacaaggacgccaaggacaaggtggagagacccgaggccggccccctgcagccccagcccccccagatccagaacggccccatgaacggctgcgagaaggacagcagcagcaccgacagcgccaacgagaagcccgccctgatccccagagagaagaagatcagcatcctggaggagcccagcaaggccctgagaggcgtgaccgagggcaacagactgctgcagcagaagctgagcctggacggcaaccccaagcccatccacggcaccaccgagagaagcgacggcctgcagtggagcgccgagcagccctgcaaccccagcaagcccaaggccaagaccagccccgtgaagagcaacacccccgccgcccacctggagatcaagcccgacgagctggccaagaagagaggccccaacatcgagaagagcgtgaaggacctgcagagatgcaccgtgagcctgaccagatacagagtgatgatcaaggaggaggtggacagcagcgtgaagaagatcaaggccgccttcgccgagctgcacaactgcatcatcgacaaggaggtgagcctgatggccgagatggacaaggtgaaggaggaggccatggagatcctgaccgccagacagaagaaggccgaggagctgaagagactgaccgacctggccagccagatggccgagatgcagctggccgagctgagagccgagatcaagcacttcgtgagcgagagaaagtacgacgaggagctgggcaaggccgccagattcagctgcgacatcgagcagctgaaggcccagatcatgctgtgcggcgagatcacccaccccaagaacaactacagcagcagaaccccctgcagcagcctgctgcccctgctgaacgcccacgccgccaccagcggcaagcagagcaacttcagcagaaagagcagcacccacaacaagcccagcgagggcaaggccgccaaccccaagatggtgagcagcctgcccagcaccgccgaccccagccaccagaccatgcccgccaacaagcagaacggcagcagcaaccagagaagaagattcaacccccagtaccacaacaacagactgaacggccccgccaagagccagggcagcggcaacgaggccgagcccctgggcaagggcaacagcagacacgagcacagaagacagccccacaacggcttcagacccaagaacaagggcggcgccaagaaccaggaggccagcctgggcatgaagacccccgaggcccccgcccacagcgagaagcccagaagaagacagcacgccgccgacaccagcgaggccagacccttcagaggcagcgtgggcagagtgagccagtgcaacctgtgccccaccagaatcgaggtgagcaccgacgccgccgtgctgagcgtgcccgccgtgaccctggtggcctag

SEQ ID NO: 100637 - DNA, 801 bp, synthetic construct
  misc_feature 1..801: note = Description of Artificial Sequence: Synthetic coding sequence
  source 1..801: mol_type = other DNA
atggccgagctgaacacccacgtgaacgtgaaggagaagatctacgccgtgagaagcgtggtgcccaacaagagcaacaacgagatcgtgctggtgctgcagcagttcgacttcaacgtggacaaggccgtgcaggccttcgtggacggcagcgccatccaggtgctgaaggagtggaacatgaccggcaagaagaagaacaacaagagaaagagaagcaagagcaagcagcaccagggcaacaaggacgccaaggacaaggtggagagacccgaggccggccccctgcagccccagcccccccagatccagaacggccccatgaacggctgcgagaaggacagcagcagcaccgacagcgccaacgagaagcccgccctgatccccagagagaagaagatcagcatcctggaggagcccagcaaggccctgagaggcgtgaccggccccaacatcgagaagagcgtgaaggacctgcagagatgcaccgtgagcctgaccagatacagagtgatgatcaaggaggaggtggacagcagcgtgaagaagatcaaggccgccttcgccgagctgcacaactgcatcatcgacaaggaggtgagcctgatggccgagatggacaaggtgaaggaggaggccatggagatcctgaccgccagacagaagaaggccgaggagctgaagagactgaccgacctggccagccagatggccgagatgcagctggccgagctgagagccgagatcaagcacttcgtgagcgagagaaagtacgacgaggagctgggcaaggccgcctag

SEQ ID NO: 100638 - DNA, 1677 bp, synthetic construct; identical to SEQ ID NO: 100633
  misc_feature 1..1677: note = Description of Artificial Sequence: Synthetic coding sequence
  source 1..1677: mol_type = other DNA

SEQ ID NO: 100639 - DNA, 1767 bp, synthetic construct
  misc_feature 1..1767: note = Description of Artificial Sequence: Synthetic coding sequence
  source 1..1767: mol_type = other DNA
atggaccccttctgccacagcagcagcgagaccagactgctgagcggcaccctgctgtggatccccagagcctacagcaccagaagcaagatggccgagctgaacacccacgtgaacgtgaaggagaagatctacgccgtgagaagcgtggtgcccaacaagagcaacaacgagatcgtgctggtgctgcagcagttcgacttcaacgtggacaaggccgtgcaggccttcgtggacggcagcgccatccaggtgctgaaggagtggaacatgaccggcaagaagaagaacaacaagagaaagagaagcaagagcaagcagcaccagggcaacaaggacgccaaggacaaggtggagagacccgaggccggccccctgcagccccagcccccccagatccagaacggccccatgaacggctgcgagaaggacagcagcagcaccgacagcgccaacgagaagcccgccctgatccccagagagaagaagatcagcatcctggaggagcccagcaaggccctgagaggcgtgaccgagggcaacagactgctgcagcagaagctgagcctggacggcaaccccaagcccatccacggcaccaccgagagaagcgacggcctgcagtggagcgccgagcagccctgcaaccccagcaagcccaaggccaagaccagccccgtgaagagcaacacccccgccgcccacctggagatcaagcccgacgagctggccaagaagagaggccccaacatcgagaagagcgtgaaggacctgcagagatgcaccgtgagcctgaccagatacagagtgatgatcaaggaggaggtggacagcagcgtgaagaagatcaaggccgccttcgccgagctgcacaactgcatcatcgacaaggaggtgagcctgatggccgagatggacaaggtgaaggaggaggccatggagatcctgaccgccagacagaagaaggccgaggagctgaagagactgaccgacctggccagccagatggccgagatgcagctggccgagctgagagccgagatcaagcacttcgtgagcgagagaaagtacgacgaggagctgggcaaggccgccagattcagctgcgacatcgagcagctgaaggcccagatcatgctgtgcggcgagatcacccaccccaagaacaactacagcagcagaaccccctgcagcagcctgctgcccctgctgaacgcccacgccgccaccagcggcaagcagagcaacttcagcagaaagagcagcacccacaacaagcccagcgagggcaaggccgccaaccccaagatggtgagcagcctgcccagcaccgccgaccccagccaccagaccatgcccgccaacaagcagaacggcagcagcaaccagagaagaagattcaacccccagtaccacaacaacagactgaacggccccgccaagagccagggcagcggcaacgaggccgagcccctgggcaagggcaacagcagacacgagcacagaagacagccccacaacggcttcagacccaagaacaagggcggcgccaagaaccaggaggccagcctgggcatgaagacccccgaggcccccgcccacagcgagaagcccagaagaagacagcacgccgccgacaccagcgaggccagacccttcagaggcagcgtgggcagagtgagccagtgcaacctgtgccccaccagaatcgaggtgagcaccgacgccgccgtgctgagcgtgcccgccgtgaccctggtggcctag

SEQ ID NO: 100640 - DNA, 1677 bp, synthetic construct; identical to SEQ ID NO: 100633
  misc_feature 1..1677: note = Description of Artificial Sequence: Synthetic coding sequence
  source 1..1677: mol_type = other DNA

SEQ ID NO: 100641 - DNA, 465 bp, synthetic construct
  misc_feature 1..465: note = Description of Artificial Sequence: Synthetic coding sequence
  source 1..465: mol_type = other DNA
atggccgagctgaacacccacgtgaacgtgaaggagaagatctacgccgtgagaagcgtggtgcccaacaagagcaacaacgagatcgtgctggtgctgcagcagttcgacttcaacgtggacaaggccgtgcaggccttcgtggacggcagcgccatccaggtgctgaaggagtggaacatgaccggcaagaagaagaacaacaagagaaagagaagcaagagcaagcagcaccagggcaacaaggacgccaaggacaaggtggagagacccgaggccggccccctgcagccccagcccccccagatccagaacggccccatgaacggctgcgagaaggacagcagcagcaccgacagcgccaacgagaagcccgccctgatccccagagagaagaagatcagcatcctggaggagcccagcaaggccctgagaggcgtgaccgagggcaacagactgctgtag

SEQ ID NO: 100642 - DNA, 423 bp, synthetic construct
  misc_feature 1..423: note = Description of Artificial Sequence: Synthetic coding sequence
  source 1..423: mol_type = other DNA
atggccgagctgaacacccacgtgaacgtgaaggagaagatctacgccgtgagaagcgtggtgcccaacaagagcaacaacgagatcgtgctggtgctgcagcagttcgacttcaacgtggacaaggccgtgcaggccttcgtggacggcagcgccatccaggtgctgaaggagtggaacatgaccggcaagaagaagaacaacaagagaaagagaagcaagagcaagcagcaccagggcaacaaggacgccaaggacaaggtggagagacccgaggccggccccctgcagccccagcccccccagatccagaacggccccatgaacggctgcgagaaggacagcagcagcaccgacagcgccaacgagaagcccgccctgatccccagagagaagaagatcagcatcctggaggagccctag

SEQ ID NO: 100643 - DNA, 42 bp, synthetic construct
  misc_feature 1..42: note = Description of Artificial Sequence: Synthetic coding sequence
  source 1..42: mol_type = other DNA
atggccgagctgaacacccacgtgaacgtgaaggagaagtag

SEQ ID NO: 100644 - DNA, 285 bp, synthetic construct
  misc_feature 1..285: note = Description of Artificial Sequence: Synthetic coding sequence
  source 1..285: mol_type = other DNA
atggccgagctgaacacccacgtgaacgtgaaggagaagatctacgccgtgagaagcgtggtgcccaacaagagcaacaacgagatcgtgctggtgctgcagcagttcgacttcaacgtggacaaggccgtgcaggccttcgtggacggcagcgccatccaggtgctgaaggagtggaacatgaccggcaagaagaagaacaacaagagaaagagaagcaagagcaagcagcaccagggcaacaaggacgccaaggacaaggtggagagacccgaggccggctag

SEQ ID NO: 100645 - DNA, 348 bp, synthetic construct
  misc_feature 1..348: note = Description of Artificial Sequence: Synthetic coding sequence
  source 1..348: mol_type = other DNA
atggccgagctgaacacccacgtgaacgtgaaggagaagatctacgccgtgagaagcgtggtgcccaacaagagcaacaacgagatcgtgctggtgctgcagcagttcgacttcaacgtggacaaggccgtgcaggccttcgtggacggcagcgccatccaggtgctgaaggagtggaacatgaccggcaagaagaagaacaacaagagaaagagaagcaagagcaagcagcaccagggcaacaaggacgccaaggacaaggtggagagacccgaggccggccccctgcagccccagcccccccagatccagaacggccccatgaacggctgcgagaaggacagctag

SEQ ID NO: 100646 - DNA, 72 bp, synthetic construct
  misc_feature 1..72: note = Description of Artificial Sequence: Synthetic coding sequence
  source 1..72: mol_type = other DNA
atggccgagctgaacacccacgtgaacgtgaaggagaagatctacgccgtgagaagcgtggtgcccaactag

SEQ ID NO: 100647 - DNA, 522 bp, synthetic construct
  misc_feature 1..522: note = Description of Artificial Sequence: Synthetic coding sequence
  source 1..522: mol_type = other DNA
atggccgagctgaacacccacgtgaacgtgaaggagaagatctacgccgtgagaagcgtggtgcccaacaagagcaacaacgagatcgtgctggtgctgcagcagttcgacttcaacgtggacaaggccgtgcaggccttcgtggacggcagcgccatccaggtgctgaaggagtggaacatgaccggcaagaagaagaacaacaagagaaagagaagcaagagcaagcagcaccagggcaacaaggacgccaaggacaaggtggagagacccgaggccggccccctgcagccccagcccccccagatccagaacggccccatgaacggctgcgagaaggacagcagcagcaccgacagcgccaacgagaagcccgccctgatccccagagagaagaagatcagcatcctggaggagcccagcaaggccctgagaggcgtgaccggccccaacatcgagaagagcgtgaaggacctgcagagatgcaccgtgagcctgaccagatacagagtgatgatctag

SEQ ID NO: 100648 - DNA, 1677 bp, synthetic construct; identical to SEQ ID NO: 100633
  misc_feature 1..1677: note = Description of Artificial Sequence: Synthetic coding sequence
  source 1..1677: mol_type = other DNA

SEQ ID NO: 100649 - DNA, 567 bp, synthetic construct
  misc_feature 1..567: note = Description of Artificial Sequence: Synthetic coding sequence
  source 1..567: mol_type = other DNA
atggccgagctgaacacccacgtgaacgtgaaggagaagatctacgccgtgagaagcgtggtgcccaacaagagcaacaacgagatcgtgctggtgctgcagcagttcgacttcaacgtggacaaggccgtgcaggccttcgtggacggcagcgccatccaggtgctgaaggagtggaacatgaccggcaagaagaagaacaacaagagaaagagaagcaagagcaagcagcaccagggcaacaaggacgccaaggacaaggtggagagacccgaggccggccccctgcagccccagcccccccagatccagaacggccccatgaacggctgcgagaaggacagcagcagcaccgacagcgccaacgagaagcccgccctgatccccagagagaagaagatcagcatcctggaggagcccagcaaggccctgagaggcgtgaccgagggcaacagactgctgcagcagaagctgagcctggacggcaaccccaagcccatccacggcaccaccgagagaagcgacggcctgcagtggagcgccgagcagccctgcaaccccagctag

SEQ ID NO: 100650 - DNA, 909 bp, synthetic construct
  misc_feature 1..909: note = Description of Artificial Sequence: Synthetic coding sequence
  source 1..909: mol_type = other DNA
atggagcccggccccgacggccccgccgccagcggccccgccgccatcagagagggctggttcagagagacctgcagcctgtggcccggccaggccctgagcctgcaggtggagcagctgctgcaccacagaagaagcagataccaggacatcctggtgttcagaagcaagacctacggcaacgtgctggtgctggacggcgtgatccagtgcaccgagagagacgagttcagctaccaggagatgatcgccaacctgcccctgtgcagccaccccaaccccagaaaggtgctgatcatcggcggcggcgacggcggcgtgctgagagaggtggtgaagcaccccagcgtggagagcgtggtgcagtgcgagatcgacgaggacgtgatccaggtgagcaagaagttcctgcccggcatggccatcggctacagcagcagcaagctgaccctgcacgtgggcgacggcttcgagttcatgaagcagaaccaggacgccttcgacgtgatcatcaccgacagcagcgaccccatgggccccgccgagagcctgttcaaggagagctactaccagctgatgaagaccgccctgaaggaggacggcgtgctgtgctgccagggcgagtgccagtggctgcacctggacctgatcaaggagatgagacagttctgccagagcctgttccccgtggtggcctacgcctactgcaccatccccacctaccccagcggccagatcggcttcatgctgtgcagcaagaaccccagcaccaacttccaggagcccgtgcagcccctgacccagcagcaggtggcccagatgcagctgaagtactacaacagcgacgtgcacagagccgccttcgtgctgcccgagttcgccagaaaggccctgaacgacgtgagctag

SEQ ID NO: 100651 - DNA, 600 bp, synthetic construct
  misc_feature 1..600: note = Description of Artificial Sequence: Synthetic coding sequence
  source 1..600: mol_type = other DNA
gaggagccccccccccccaccgtgcaggtgcagggccccggcccccagagagaggagaagcagaagaccaagatggccaagttcgtgatcagacccgccaccgccgccgactgcagcgacatcctgagactgatcaaggagctggccaagtacgagtacatggaggagcaggtgatcctgaccgagaaggacctgctggaggacggcttcggcgagcaccccttctaccactgcctggtggccgaggtgcccaaggagcactggacccccgagggcaaccccagccccttccccgaggccagagagaccaagtgctactacttcacctacgacccctggatcggcaagctgctgtacctggaggacttcttcgtgatgagcgactacagaggcctgtggcacagaatcagaaacagcgaggagagcaagcccggctgcaacgaggtgagcctggccgcctgcaccagctgggccgagtggaacgagcccagcatcaacttctacaagagaagaggcgccagcgacctgagcagcgaggagggctggagactgttcaagatcgacaaggagtacctgctgaagatggccaccgaggagtag

SEQ ID NO: 100652 - DNA, 453 bp, synthetic construct
  misc_feature 1..453: note = Description of Artificial Sequence: Synthetic coding sequence
  source 1..453: mol_type = other DNA
atggccaagttcgtgatcagacccgccaccgccgccgactgcagcgacatcctgagactgatcaaggagctggccaagtacgagtacatggaggagcaggtgatcctgaccgagaagggcaacagcaccgtggccggcagaggcaccagcgtgagatgcctgagccccagccccagacccctgccccccctgctgcccctgctggccgacctgctggaggacggcttcggcgagcaccccttctaccactgcctggtggccgaggtgcccaaggagcactggacccccgagggcaaccccagccccttccccgaggccagagagaccaagtgctacgtgagaagcagcgtgggctgcgtggagcccctgaccacccaggccgaggtgaccgagaacctggacagaaagaacagccagcaggtgttcaagctgctgagaaagaagaagaactag

SEQ ID NO: 100653 - DNA, 363 bp, synthetic construct
  misc_feature 1..363: note = Description of Artificial Sequence: Synthetic coding sequence
  source 1..363: mol_type = other DNA
atggccaagttcgtgatcagacccgccaccgccgccgactgcagcgacatcctgagactgatcaaggagctggccaagtacgagtacatggaggagcaggtgatcctgaccgagaaggacctgctggaggacggcttcggcgagcaccccttctaccactgcctggtggccgaggtgcccaaggagcactggacccccgagggcaaccccagccccttccccgaggccagagagaccaagtgctacgtgagaagcagcgtgggctgcgtggagcccctgaccacccaggccgaggtgaccgagaacctggacagaaagaacagccagcaggtgttcaagctgctgagaaagaagaagaactag

SEQ ID NO: 100654 - DNA, 432 bp, synthetic construct
  misc_feature 1..432: note = Description of Artificial Sequence: Synthetic coding sequence
  source 1..432: mol_type = other DNA
atggccaagttcgtgatcagacccgccaccgccgccgactgcagcgacatcctgagactgatcaaggagctggccaagtacgagtacatggaggagcaggtgatcctgaccgagaagggccacagcatcgtgggcttcgccatgtactacttcacctacgacccctggatcggcaagctgctgtacctggaggacttcttcgtgatgagcgactacagaggcttcggcatcggcagcgagatcctgaagaacctgagccaggtggccatgagatgcagatgcagcagcatgcacttcctggtggccgagtggaacgagcccagcatcaacttctacaagagaagaggcgccagcgacctgagcagcgaggagggctggagactgttcaagatcgacaaggagtacctgctgaagatggccaccgaggagtag

SEQ ID NO: 100655 - DNA, 516 bp, synthetic construct
  misc_feature 1..516: note = Description of Artificial Sequence: Synthetic coding sequence
  source 1..516: mol_type = other DNA
atggccaagttcgtgatcagacccgccaccgccgccgactgcagcgacatcctgagactgatcaaggagctggccaagtacgagtacatggaggagcaggtgatcctgaccgagaaggacctgctggaggacggcttcggcgagcaccccttctaccactgcctggtggccgaggtgcccaaggagcactggacccccgagggccacagcatcgtgggcttcgccatgtactacttcacctacgacccctggatcggcaagctgctgtacctggaggacttcttcgtgatgagcgactacagaggcttcggcatcggcagcgagatcctgaagaacctgagccaggtggccatgagatgcagatgcagcagcatgcacttcctggtggccgagtggaacgagcccagcatcaacttctacaagagaagaggcgccagcgacctgagcagcgaggagggctggagactgttcaagatcgacaaggagtacctgctgaagatggccaccgaggagtag

SEQ ID NO: 100656 - DNA, 513 bp, synthetic construct
  misc_feature 1..513: note = Description of Artificial Sequence: Synthetic coding sequence
  source 1..513: mol_type = other DNA
atggccagcgtgagaatcagagaggccaaggagggcgactgcggcgacatcctgagactgatcagagagctggccgagttcgagaagctgagcgaccaggtgaagatcagcgaggaggccctgagagccgacggcttcggcgacaaccccttctaccactgcctggtggccgagatcctgcccgcccccggcaagctgctgggcccctgcgtggtgggctacggcatctactacttcatctacagcacctggaagggcagaaccatctacctggaggacatctacgtgatgcccgagtacagaggccagggcatcggcagcaagatcatcaagaaggtggccgaggtggccctggacaagggctgcagccagttcagactggccgtgctggactggaaccagagagccatggacctgtacaaggccctgggcgcccaggacctgaccgaggccgagggctggcacttcttctgcttccagggcgaggccaccagaaagctggccggcaagtag

SEQ ID NO: 100657 - DNA, 750 bp, synthetic construct
  misc_feature 1..750: note = Description of Artificial Sequence: Synthetic coding sequence
  source 1..750: mol_type = other DNA
atgcccggccagagaatcgccagcctggcctacagcctgctgccctacggcgccggcatccccgcccccctgaccagacccagactgcccagaagaccccccagactgcccccccccagaagcctgagactgttcagaatccaggtgagaagacccttcaagggcagcagctgcagactgagaggccccggcaccctggtgcccgacagcggcgaccccgacggcttcagagccgaccccagaggccagggcggcagactgtggagataccccgaggccgacagcggcgaggactgcagacccgagctggccgagttcgagaagctgagcgaccaggtgaagatcagcgaggaggccctgagagccgacggcttcggcgacaaccccttctaccactgcctggtggccgagatcctgcccgcccccggcaagctgctgggcccctgcgtggtgggctacggcatctactacttcatctacagcacctggaagggcagaaccatctacctggaggacatctacgtgatgcccgagtacagaggccagggcatcggcagcaagatcatcaagaaggtggccgaggtggccctggacaagggctgcagccagttcagactggccgtgctggactggaaccagagagccatggacctgtacaaggccctgggcgcccaggacctgaccgaggccgagggctggcacttcttctgcttccagggcgaggccaccagaaagctggccggcaagtag

SEQ ID NO: 100658 - DNA, 942 bp, synthetic construct
  misc_feature 1..942: note = Description of Artificial Sequence: Synthetic coding sequence
  source 1..942: mol_type = other DNA
atggccgccgccagacacagcaccctggacttcatgctgggcgccaaggccgacggcgagaccatcctgaagggcctgcagagcatcttccaggagcagggcatggccgagagcgtgcacacctggcaggaccacggctacctggccacctacaccaacaagaacggcagactgccccccatcgtgagaggcggcgccatcgacagatactggcccaccgccgacggcagactggtggagtacgacatcgacgaggtggtgtacgacgaggacagcccctaccagaacatcaagatcctgcacagcaagcagttcggcaacatcctgatcctgagcggcgacgtgaacctggccgagagcgacctggcctacaccagagccatcatgggcagcggcaaggaggactacaccggcaaggacgtgctgatcctgggcggcggcgacggcggcatcctgtgcgagatcgtgaagctgaagcccaagatggtgaccatggtggagatcgaccagatggtgatcgacggctgcaagaagtacatgagaaagacctgcggcgacgtgctggacaacctgaagggcgactgctaccaggtgctgatcgaggactgcatccccgtgctgaagagatacgccaaggagggcagagagttcgactacgtgatcaacgacctgaccgccgtgcccatcagcaccagccccgaggaggacagcacctgggagttcctgagactgatcctggacctgagcatgaaggtgctgaagcaggacggcaagtacttcacccagggcaactgcgtgaacctgaccgaggccctgagcctgtacgaggagcagctgggcagactgtactgccccgtggagttcagcaaggagatcgtgtgcgtgcccagctacctggagctgtgggtgttctacaccgtgtggaagaaggccaagccctag

SEQ ID NO: 100659 - DNA, 1101 bp, synthetic construct
  misc_feature 1..1101: note = Description of Artificial Sequence: Synthetic coding sequence
  source 1..1101: mol_type = other DNA
atggccgccgccagacacagcaccctggacttcatgctgggcgccaaggccgacggcgagaccatcctgaagggcctgcagagcatcttccaggagcagggcatggccgagagcgtgcacacctggcaggaccacggctacctggccacctacaccaacaagaacggcagcttcgccaacctgagaatctacccccacggcctggtgctgctggacctgcagagctacgacggcgacgcccagggcaaggaggagatcgacagcatcctgaacaaggtggaggagagaatgaaggagctgagccaggacagcaccggcagagtgaagagactgccccccatcgtgagaggcggcgccatcgacagatactggcccaccgccgacggcagactggtggagtacgacatcgacgaggtggtgtacgacgaggacagcccctaccagaacatcaagatcctgcacagcaagcagttcggcaacatcctgatcctgagcggcgacgtgaacctggccgagagcgacctggcctacaccagagccatcatgggcagcggcaaggaggactacaccggcaaggacgtgctgatcctgggcggcggcgacggcggcatcctgtgcgagatcgtgaagctgaagcccaagatggtgaccatggtggagatcgaccagatggtgatcgacggctgcaagaagtacatgagaaagacctgcggcgacgtgctggacaacctgaagggcgactgctaccaggtgctgatcgaggactgcatccccgtgctgaagagatacgccaaggagggcagagagttcgactacgtgatcaacgacctgaccgccgtgcccatcagcaccagccccgaggaggacagcacctgggagttcctgagactgatcctggacctgagcatgaaggtgctgaagcaggacggcaagtacttcacccagggcaactgcgtgaacctgaccgaggccctgagcctgtacgaggagcagctgggcagactgtactgccccgtggagttcagcaaggagatcgtgtgcgtgcccagctacctggagctgtgggtgttctacaccgtgtggaagaaggccaagccctag

SEQ ID NO: 100660 - DNA, 828 bp, synthetic construct
  misc_feature 1..828: note = Description of Artificial Sequence: Synthetic coding sequence
  source 1..828: mol_type = other DNA
atgaaggagctgagccaggacagcaccggcagagtgaagagactgccccccatcgtgagaggcggcgccatcgacagatactggcccaccgccgacggcagactggtggagtacgacatcgacgaggtggtgtacgacgaggacagcccctaccagaacatcaagatcctgcacagcaagcagttcggcaacatcctgatcctgagcggcgacgtgaacctggccgagagcgacctggcctacaccagagccatcatgggcagcggcaaggaggactacaccggcaaggacgtgctgatcctgggcggcggcgacggcggcatcctgtgcgagatcgtgaagctgaagcccaagatggtgaccatggtggagatcgaccagatggtgatcgacggctgcaagaagtacatgagaaagacctgcggcgacgtgctggacaacctgaagggcgactgctaccaggtgctgatcgaggactgcatccccgtgctgaagagatacgccaaggagggcagagagttcgactacgtgatcaacgacctgaccgccgtgcccatcagcaccagccccgaggaggacagcacctgggagttcctgagactgatcctggacctgagcatgaaggtgctgaagcaggacggcaagtacttcacccagggcaactgcgtgaacctgaccgaggccctgagcctgtacgaggagcagctgggcagactgtactgccccgtggagttcagcaaggagatcgtgtgcgtgcccagctacctggagctgttcctgctgcagttctggagagtgagaagcagcaagtgcgccctggagggctag

SEQ ID NO: 100661 - DNA, 936 bp, synthetic construct
  misc_feature 1..936: note = Description of Artificial Sequence: Synthetic coding sequence
  source 1..936: mol_type = other DNA
tgaggcggcagagccgaggccgccctgctgctggcccccagaagcgtgcccgccgccgccagaggcctgcagggccagagcagagtgcccgccggcagagccgccctgcccggccccggcagaccccccgccctgcccagaggcctggccgccttcgccctgcccctgggcgagagccccggctgcagagccagagccgaccccccctgggacgagggctgcagagactgcggcggcgccagaagagaccccagaggcgagcccggcctgggcgcctgcgccgagagaggctgccccagagacctgttcctgttcctgcaggccgccgacggcgagaccatcctgaagggcctgcagagcatcttccaggagcagggcatggccgagagcgtgcacacctggcaggaccacggctacctggccacctacaccaacaagaacggcagcttcgccaacctgagaatctacccccacggcctggtgctgctggacctgcagagctacgacggcgacgcccagggcaaggaggagatcgacagcatcctgaacaaggtggaggagagaatgaaggagctgagccaggacagcaccggcagagtgaagagactgccccccatcgtgagaggcggcgccatcgacagatactggcccaccgccgacggcagactggtggagtacgacatcgacgaggtggtgtacgacgaggacagcccctaccagaacatcaagatcctgcacagcaagcagttcggcaacatcctgatcctgagcggcgacgtgaacctggccgagagcgacctggcctacaccagagccatcatgggcagcggcaaggaggactacaccggcaaggacgtgctgatcctgggcggcggcgacggcggcatcctgtgcgagatcgtgaagctgaagcccaagatggtgaccatggtgtag

SEQ ID NO: 100662 - DNA, 3801 bp, synthetic construct
  misc_feature 1..3801: note = Description of Artificial Sequence: Synthetic coding sequence
  source 1..3801: mol_type = other DNA
agagaggccaccccccccctgagaggcctgcccgccccccccagacacgcccccttccccgccggcagattcgagccccccagaaccaagcagggcggcagaggcagccacaccccctgggtgtacgtgatcaacgacctgggcatcgaggagaacctgaagaacgacggcaagcccaagtgccagaccggcggcaagagcaagagaaccatccagggcacccacaagaccaccaagcagcagagcaccgccgtggactgcaagatcaccagcagcaccaccggcgacaagcacttcgacaagagccccaccaagaccagacaccccagaaagatcgacctgagagccagatactgggccttcctgttcgacaacctgagaagagccgtggacgagatctacgtgacctgcgagagcgaccagagcgtggtggagtgcaaggaggtgctgatgatgctggacaactacgtgagagacttcaaggccctgatcgactggatccagctgcaggagaagctggagaagaccgacgcccagagcagacccaccagcctggcctgggaggtgaagaagatgagccccggcagacacgtgatccccagccccagcaccgacagaatcaacgtgaccagcaacgccagaagaagcctgaacttcggcggcagcaccggcaccgtgcccgcccccagactggcccccaccggcgtgagctgggccgacaaggtgaaggcccaccacaccggcagcaccgccagcagcgagatcacccccgcccagagctgcccccccatgaccgtgcagaaggccagcagaaagaacgagagaaaggacgccgagggctgggagaccgtgcagagaggcagacccatcagaagcagaagcaccgccgtgatgcccaaggtgagcctggccaccgaggccaccagaagcaaggacgacagcgacaaggagaacgtgtgcctgctgcccgacgagagcatccagaagggccagttcgtgggcgacggcaccagcaacaccatcgagagccaccccaaggacagcctgcacagctgcgaccaccccctggccgagaagacccagttcaccgtgagcaccctggacgacgtgaagaacagcggcagcatcagagacaactacgtgagaaccagcgagatcagcgccgtgcacatcgacaccgagtgcgtgagcgtgatgctgcaggccggcaccccccccctgcaggtgaacgaggagaagttccccgccgagaaggccagaatcgagaacgagatggaccccagcgacatcagcaacgtgagcgccgccaacctgagcatggccgaggtgctggccaagaaggaggagctggccgacagactggagaaggccaacgaggaggccatcgccagcgccatcgccgaggaggagcagctgaccagagagatcgaggccgaggagaacaacgacatcaacatcgagaccgacaacgacagcgacttcagcgccagcatgggcagcggcagcgtgagcttctgcggcatgagcatggactggaacgacgtgctggccgactacgaggccagagagagctggagacagaacaccagctggggcgacatcgtggaggaggagcccgccagaccccccggccacggcatccacatgcacgagaagctgagcagccccagcagaaagagaaccatcgccgagagcaagaagaagcacgaggagaagcagatgaaggcccagcagctgagagagaagctgagagaggagaagaccctgaagctgcagaagctgctggagagagagaaggacgtgagaaagtggaaggaggagctgctggaccagagaagaagaatgatggaggagaagctgctgcacgccgagttcaagagagaggtgcagctgcaggccatcgtgaagaaggcccaggaggaggaggccaaggtgaacgagatcgccttcatcaacaccctggaggcccagaacaagagacacgacgtgctgagcaagctgaaggagtacgagcagagactgaacgagctgcaggaggagagacagagaagacaggaggagaagcaggccagagacgaggccgtgcaggagagaaagagagccctggaggccgagagacaggccagagtggaggagctgctgatgaagagaaaggagcaggaggccagaatcgagcagcagagacaggagaaggagaaggccagagaggacgccgccagagagagagccagagacagagaggagagactggccgccctgaccgccgcccagcaggaggccatggaggagctgcagaagaagatccagctgaagcacgacgagagcatcagaagacacatggagcagatcgagcagagaaaggagaaggccgccgagctgagcagcggcagacacgccaacaccgactacgcccccaagctgaccccctacgagagaaagaagcagtgcagcctgtgcaacgtgctgatcagcagcgaggtgtacctgttcagccacgtgaagggcagaaagcaccagcaggccgtgagagagaacaccagcatccagggcagagagctgagcgacgaggaggtggagcacctgagcctgaagaagtacatcatcgacatcgtggtggagagcaccgcccccgccgaggccctgaaggacggcgaggagagacagaagaacaagaagaaggccaagaagatcaaggccagaatgaacttcagagccaaggagtacgagagcctgatggagaccaagaacagcggcagcgacagcccctacaaggccaagctgcagagactggccaaggacctgctgaagcaggtgcaggtgcaggacagcggcagctgggccaacaacaaggtgagcgccctggacagaaccctgggcgagatcaccagaatcctggagaaggagaacgtggccgaccagatcgccttccaggccgccggcggcctgaccgccctggagcacatcctgcaggccgtggtgcccgccaccaacgtgaacaccgtgctgagaatcccccccaagagcctgtgcaacgccatcaacgtgtacaacctgacctgcaacaactgcagcgagaactgcagcgacgtgctgttcagcaacaagatcaccttcctgatggacctgctgatccaccagctgaccgtgtacgtgcccgacgagaacaacaccatcctgggcagaaacaccaacaagcaggtgttcgagggcctgaccaccggcctgctgaaggtgagcgccgtggtgctgggctgcctgatcgccaacagacccgacggcaactgccagcccgccacccccaagatccccacccaggagatgaagaacaagcccagccagggcgaccccttcaacaacagagtgcaggacctgatcagctacgtggtgaacatgggcctgatcgacaagctgtgcgcctgcttcctgagcgtgcagggccccgtggacgagaaccccaagatggccatcttcctgcagcacgccgccggcctgctgcacgccatgtgcaccctgtgcttcgccgtgaccggcagaagctacagcatcttcgacaacaacagacaggaccccaccggcctgaccgccgccctgcaggccaccgacctggccggcgtgctgcacatgctgtactgcgtgctgttccacggcaccatcctggaccccagcaccgccagccccaaggagaactacacccagaacaccatccaggtggccatccagagcctgagattcttcaacagcttcgccgccctgcacctgcccgccttccaggtgcccagcatcggcctgtacagatgctag

SEQ ID NO: 100663 - DNA, 4203 bp, synthetic construct
  misc_feature 1..4203: note = Description of Artificial Sequence: Synthetic coding sequence
  source 1..4203: mol_type = other DNA
atgatggccagcttccagagaagcaacagccacgacaaggtgagaagaatcgtggccgaggagggcagaaccgccagaaacctgatcgcctggagcgtgcccctggagagcaaggacgacgacggcaagcccaagtgccagaccggcggcaagagcaagagaaccatccagggcacccacaagaccaccaagcagagcaccgccgtggactgcaagatcaccagcagcaccaccggcgacaagcacttcgacaagagccccaccaagaccagacaccccagaaagatcgacctgagagccagatactgggccttcctgttcgacaacctgagaagagccgtggacgagatctacgtgacctgcgagagcgaccagagcgtggtggagtgcaaggaggtgctgatgatgctggacaactacgtgagagacttcaaggccctgatcgactggatccagctgcaggagaagctggagaagaccgacgcccagagcagacccaccagcctggcctgggaggtgaagaagatgagccccggcagacacgtgatccccagccccagcaccgacagaatcaacgtgaccagcaacgccagaagaagcctgaacttcggcggcagcaccggcaccgtgcccgcccccagactggcccccaccggcgtgagctgggccgacaaggtgaaggcccaccacaccggcagcaccgccagcagcgagatcacccccgcccagagctgcccccccatgaccgtgcagaaggccagcagaaagaacgagagaaaggacgccgagggctgggagaccgtgcagagaggcagacccatcagaagcagaagcaccgccgtgatgcccaaggtgagcctggccaccgaggccaccagaagcaaggacgacagcgacaaggagaacgtgtgcctgctgcccgacgagagcatccagaagggccagttcgtgggcgacggcaccagcaacaccatcgagagccaccccaaggacagcctgcacagctgcgaccaccccctggccgagaagacccagttcaccgtgagcaccctggacgacgtgaagaacagcggcagcatcagagacaactacgtgagaaccagcgagatcagcgccgtgcacatcgacaccgagtgcgtgagcgtgatgctgcaggccggcaccccccccctgcaggtgaacgaggagaagttccccgccgagaaggccagaatcgagaacgagatggaccccagcgacatcagcaacagcatggccgaggtgctggccaagaaggaggagctggccgacagactggagaaggccaacgaggaggccatcgccagcgccatcgccgaggaggagcagctgaccagagagatcgaggccgaggagaacaacgacatcaacatcgagaccgacaacgacagcgacttcagcgccagcatgggcagcggcagcgtgagcttctgcggcatgagcatggactggaacgacgtgctggccgactacgaggccagagagagctggagacagaacaccagctggggcgacatcgtggaggaggagcccgccagaccccccggccacggcatccacatgcacgagaagctgagcagccccagcagaaagagaaccatcgccgagagcaagaagaagcacgaggagaagcagatgaaggcccagcagctgagagagaagctgagagaggagaagaccctgaagctgcagaagctgctggagagagagaaggacgtgagaaagtggaaggaggagctgctggaccagagaagaagaatgatggaggagaagctgctgcacgccgagttcaagagagaggtgcagctgcaggccatcgtgaagaaggcccaggaggaggaggccaaggtgaacgagatcgccttcatcaacaccctggaggcccagaacaagagacacgacgtgctgagcaagctgaaggagtacgagcagagactgaacgagctgcaggaggagagacagagaagacaggaggagaagcaggccagagacgaggccgtgcaggagagaaagagagccctggaggccgagagacaggccagagtggaggagctgctgatgaagagaaaggagcaggaggccagaatcgagcagcagagacaggagaaggagaaggccagagaggacgccgccagagagagagccagagacagagaggagagactggccgccctgaccgccgcccagcaggaggccatggaggagctgcagaagaagatccagctgaagcacgacgagagcatcagaagacacatggagcagatcgagcagagaaaggagaaggccgccgagctgagcagcggcagacacgccaacaccgactacgcccccaagctgaccccctacgagagaaagaagcagtgcagcctgtgcaacgtgctgatcagcagcgaggtgtacctgttcagccacgtgaagggcagaaagcaccagcaggccgtgagagagaacaccagcatccagggcagagagctgagcgacgaggaggtggagcacctgagcctgaagaagtacatcatcgacatcgtggtggagagcaccgcccccgccgaggccctgaaggacggcgaggagagacagaagaacaagaagaaggccaagaagatcaaggccagaatgaacttcagagccaaggagtacgagagcctgatggagaccaagaacagcggcagcgacagcccctacaaggccaagctgcagagactggccaaggacctgctgaagcaggtgcaggtgcaggacagcggcagctgggccaacaacaaggtgagcgccctggacagaaccctgggcgagatcaccagaatcctggagaaggagaacgtggccgaccagatcgccttccaggccgccggcggcctgaccgccctggagcacatcctgcaggccgtggtgcccgccaccaacgtgaacaccgtgctgagaatcccccccaagagcctgtgcaacgccatcaacgtgtacaacctgacctgcaacaactgcagcgagaactgcagcgacgtgctgttcagcaacaagatcaccttcctgatggacctgctgatccaccagctgaccgtgtacgtgcccgacgagaacaacaccatcctgggcagaaacaccaacaagcaggtgttcgagggcctgaccaccggcctgctgaaggtgagcgccgtggtgctgggctgcctgatcgccaacagacccgacggcaactgccagcccgccacccccaagatccccacccaggagatgaagaacaagcccagccagggcgaccccttcaacaacagagtgcaggacctgatcagctacgtggtgaacatgggcctgatcgacaagctgtgcgcctgcttcctgagcgtgcagggccccgtggacgagaaccccaagatggccatcttcctgcagcacgccgccggcctgctgcacgccatgtgcaccctgtgcttcgccgtgaccggcagaagctacagcatcttcgacaacaacagacaggaccccaccggcctgaccgccgccctgcaggccaccgacctggccggcgtgctgcacatgctgtactgcgtgctgttccacggcaccatcctggaccccagcaccgccagccccaaggagaactacacccagaacaccatccaggtggccatccagagcctgagattcttcaacagcttcgccgccctgcacctgcccgccttccagagcatcgtgggcgccgagggcctgagcctggccttcagacacatggccagcagcctgctgggccactgcagccaggtgagctgcgagagcctgctgcacgaggtgatcgtgtgcgtgggctacttcaccgtgaaccaccccgacaaccaggtgatcgtgcagagcggcagacaccccaccgtgctgcagaagctgtgccagctgcccttccagtacttcagcgaccccagactgatcaaggtgctgttccccagcctgatcgccgcctgctacaacaaccaccagaacaagatcatcctggagcaggagatgagctgcgtgctgctggccaccttcatccaggacctggcccagacccccggccaggccgagaaccagccctaccagcccaagggcaagtgcctgggcagccaggactacctggagctggccaacagattcccccagcaggcctgggaggaggccagacagttcttcctgaagaaggagaagaagtag

SEQ ID NO: 100664 - DNA, 3465 bp, synthetic construct
  misc_feature 1..3465: note = Description of Artificial Sequence: Synthetic coding sequence
  source 1..3465: mol_type = other DNA
atgaagaccaagtacatcttctgcaacatcaccgagagaaaggacgccgagggctgggagaccgtgcagagaggcagacccatcagaagcagaagcaccgccgtgatgcccaaggtgagcctggccaccgaggccaccagaagcaaggacgacagcgacaaggagaacgtgtgcctgctgcccgacgagagcatccagaagggccagttcgtgggcgacggcaccagcaacaccatcgagagccaccccaaggacagcctgcacagctgcgaccaccccctggccgagaagacccagttcaccgtgagcaccctggacgacgtgaagaacagcggcagcatcagagacaactacgtgagaaccagcgagatcagcgccgtgcacatcgacaccgagtgcgtgagcgtgatgctgcaggccggcaccccccccctgcaggtgaacgaggagaagttccccgccgagaaggccagaatcgagaacgagatggaccccagcgacatcagcaacagcatggccgaggtgctggccaagaaggaggagctggccgacagactggagaaggccaacgaggaggccatcgccagcgccatcgccgaggaggagcagctgaccagagagatcgaggccgaggagaacaacgacatcaacatcgagaccgacaacgacagcgacttcagcgccagcatgggcagcggcagcgtgagcttctgcggcatgagcatggactggaacgacgtgctggccgactacgaggccagagagagctggagacagaacaccagctggggcgacatcgtggaggaggagcccgccagaccccccggccacggcatccacatgcacgagaagctgagcagccccagcagaaagagaaccatcgccgagagcaagaagaagcacgaggagaagcagatgaaggcccagcagctgagagagaagctgagagaggagaagaccctgaagctgcagaagctgctggagagagagaaggacgtgagaaagtggaaggaggagctgctggaccagagaagaagaatgatggaggagaagctgctgcacgccgagttcaagagagaggtgcagctgcaggccatcgtgaagaaggcccaggaggaggaggccaaggtgaacgagatcgccttcatcaacaccctggaggcccagaacaagagacacgacgtgctgagcaagctgaaggagtacgagcagagactgaacgagctgcaggaggagagacagagaagacaggaggagaagcaggccagagacgaggccgtgcaggagagaaagagagccctggaggccgagagacaggccagagtggaggagctgctgatgaagagaaaggagcaggaggccagaatcgagcagcagagacaggagaaggagaaggccagagaggacgccgccagagagagagccagagacagagaggagagactggccgccctgaccgccgcccagcaggaggccatggaggagctgcagaagaagatccagctgaagcacgacgagagcatcagaagacacatggagcagatcgagcagagaaaggagaaggccgccgagctgagcagcggcagacacgccaacaccgactacgcccccaagctgaccccctacgagagaaagaagcagtgcagcctgtgcaacgtgctgatcagcagcgaggtgtacctgttcagccacgtgaagggcagaaagcaccagcaggccgtgagagagaacaccagcatccagggcagagagctgagcgacgaggaggtggagcacctgagcctgaagaagtacatcatcgacatcgtggtggagagcaccgcccccgccgaggccctgaaggacggcgaggagagacagaagaacaagaagaaggccaagaagatcaaggccagaatgaacttcagagccaaggagtacgagagcctgatggagaccaagaacagcggcagcgacagcccctacaaggccaagctgcagagactggccaaggacctgctgaagcaggtgcaggtgcaggacagcggcagctgggccaacaacaaggtgagcgccctggacagaaccctgggcgagatcaccagaatcctggagaaggagaacgtggccgaccagatcgccttccaggccgccggcggcctgaccgccctggagcacatcctgcaggccgtggtgcccgccaccaacgtgaacaccgtgctgagaatcccccccaagagcctgtgcaacgccatcaacgtgtacaacctgacctgcaacaactgcagcgagaactgcagcgacgtgctgttcagcaacaagatcaccttcctgatggacctgctgatccaccagctgaccgtgtacgtgcccgacgagaacaacaccatcctgggcagaaacaccaacaagcaggtgttcgagggcctgaccaccggcctgctgaaggtgagcgccgtggtgctgggctgcctgatcgccaacagacccgacggcaactgccagcccgccacccccaagatccccacccaggagatgaagaacaagcccagccagggcgaccccttcaacaacagagtgcaggacctgatcagctacgtggtgaacatgggcctgatcgacaagctgtgcgcctgcttcctgagcgtgcagggccccgtggacgagaaccccaagatggccatcttcctgcagcacgccgccggcctgctgcacgccatgtgcaccctgtgcttcgccgtgaccggcagaagctacagcatcttcgacaacaacagacaggaccccaccggcctgaccgccgccctgcaggccaccgacctggccggcgtgctgcacatgctgtactgcgtgctgttccacggcaccatcctggaccccagcaccgccagccccaaggagaactacacccagaacaccatccaggtggccatccagagcctgagattcttcaacagcttcgccgccctgcacctgcccgccttccagagcatcgtgggcgccgagggcctgagcctggccttcagacacatggccagcagcctgctgggccactgcagccaggtgagctgcgagagcctgctgcacgaggtgatcgtgtgcgtgggctacttcaccgtgaaccaccccgacaaccaggtgatcgtgcagagcggcagacaccccaccgtgctgcagaagctgtgccagctgcccttccagtacttcagcgaccccagactgatcaaggtgctgttccccagcctgatcgccgcctgctacaacaaccaccagaacaagatcatcctggagcaggagatgagctgcgtgctgctggccaccttcatccaggacctggcccagacccccggccaggccgagaaccagccctaccagcccaagggcaagtgcctgggcagccaggactacctggagctggccaacagattcccccagcaggcctgggaggaggccagacagttcttcctgaagaaggagaagaagtag

SEQ ID NO: 100665 - DNA, 4203 bp, synthetic construct; identical to SEQ ID NO: 100663
  misc_feature 1..4203: note = Description of Artificial Sequence: Synthetic coding sequence
  source 1..4203: mol_type = other DNA

SEQ ID NO: 100666 - DNA, 1233 bp, synthetic construct
  misc_feature 1..1233: note = Description of Artificial Sequence: Synthetic coding sequence
  source 1..1233: mol_type = other DNA
atgcacagaaagcacctgcaggagatccccgacctgagcagcaacgtggccaccagcttcacctggggctgggacagcagcaagaccagcgagctgctgagcggcatgggcgtgagcgccctggagaaggaggagcccgacagcgagaacatcccccaggagctgctgagcaacctgggccaccccgagagcccccccagaaagagactgaagagcaagggcagcgacaaggacttcgtgatcgtgagaagacccaagctgaacagagagaacttccccggcgtgagctgggacagcctgcccgacgagctgctgctgggcatcttcagctgcctgtgcctgcccgagctgctgaaggtgagcggcgtgtgcaagagatggtacagactggccagcgacgagagcctgtggcagaccctggacctgaccggcaagaacctgcaccccgacgtgaccggcagactgctgagccagggcgtgatcgccttcagatgccccagaagcttcatggaccagcccctggccgagcacttcagccccttcagagtgcagcacatggacctgagcaacagcgtgatcgaggtgagcaccctgcacggcatcctgagccagtgcagcaagctgcagaacctgagcctggagggcctgagactgagcgaccccatcgtgaacaccctggccaagaacagcaacctggtgagactgaacctgagcggctgcagcggcttcagcgagttcgccctgcagaccctgctgagcagctgcagcagactggacgagctgaacctgagctggtgcttcgacttcaccgagaagcacgtgcaggtggccgtggcccacgtgagcgagaccatcacccagctgaacctgagcggctacagaaagaacctgcagaagagcgacctgagcaccctggtgagaagatgccccaacctggtgcacctggacctgagcgacagcgtgatgctgaagaacgactgcttccaggagttcttccagctgaactacctgcagcacctgagcctgagcagatgctacgacatcatccccgagaccctgctgctggtgaccagagccggcgtgagaatcagactggacagcgacatcggctgcccccagacctacagaaccagcaagctgaagagcagccacaagctgttctgccagcacgtgagagtgatctgcatcttcgtgtgcgacttctacttctacagactggtgctgaagcagtag

SEQ ID NO: 100667 - DNA, 1275 bp, synthetic construct
  misc_feature 1..1275: note = Description of Artificial Sequence: Synthetic coding sequence
  source 1..1275: mol_type = other DNA
atgcacagaaagcacctgcaggagatccccgacctgagcagcaacgtggccaccagcttcacctggggctgggacagcagcaagaccagcgagctgctgagcggcatgggcgtgagcgccctggagaaggaggagcccgacagcgagaacatcccccaggagctgctgagcaacctgggccaccccgagagcccccccagaaagagactgaagagcaagggcagcgacaaggacttcgtgatcgtgagaagacccaagctgaacagagagaacttccccggcgtgagctgggacagcctgcccgacgagctgctgctgggcatcttcagctgcctgtgcctgcccgagctgctgaaggtgagcggcgtgtgcaagagatggtacagactggccagcgacgagagcctgtggcagaccctggacctgaccggcaagaacctgcaccccgacgtgaccggcagactgctgagccagggcgtgatcgccttcagatgccccagaagcttcatggaccagcccctggccgagcacttcagccccttcagagtgcagcacatggacctgagcaacagcgtgatcgaggtgagcaccctgcacggcatcctgagccagtgcagcaagctgcagaacctgagcctggagggcctgagactgagcgaccccatcgtgaacaccctggccaagaacagcaacctggtgagactgaacctgagcggctgcagcggcttcagcgagttcgccctgcagaccctgctgagcagctgcagcagactggacgagctgaacctgagctggtgcttcgacttcaccgagaagcacgtgcaggtggccgtggcccacgtgagcgagaccatcacccagctgaacctgagcggctacagaaagaacctgcagaagagcgacctgagcaccctggtgagaagatgccccaacctggtgcacctggacctgagcgacagcgtgatgctgaagaacgactgcttccaggagttcttccagctgaactacctgcagcacctgagcctgagcagatgctacgacatcatccccgagaccctgctggagctgggcgagatccccaccctgaagaccctgcaggtgttcggcatcgtgcccgacggcaccctgcagctgctgaaggaggccctgccccacctgcagatcaactgcagccacttcaccaccatcgccagacccaccatcggcaacaagaagaaccaggagatctggggcatcaagtgcagactgaccctgcagaagcccagctgcctgtag

SEQ ID NO: 100668 - DNA, 1173 bp, synthetic construct
  misc_feature 1..1173: note = Description of Artificial Sequence: Synthetic coding sequence
  source 1..1173: mol_type = other DNA
atgcacagaaagcacctgcaggagaaggaggagcccgacagcgagaacatcccccaggagctgctgagcaacctgggccaccccgagagcccccccagaaagagactgaagagcaagggcagcgacaaggacttcgtgatcgtgagaagacccaagctgaacagagagaacttccccggcgtgagctgggacagcctgcccgacgagctgctgctgggcatcttcagctgcctgtgcctgcccgagctgctgaaggtgagcggcgtgtgcaagagatggtacagactggccagcgacgagagcctgtggcagaccctggacctgaccggcaagaacctgcaccccgacgtgaccggcagactgctgagccagggcgtgatcgccttcagatgccccagaagcttcatggaccagcccctggccgagcacttcagccccttcagagtgcagcacatggacctgagcaacagcgtgatcgaggtgagcaccctgcacggcatcctgagccagtgcagcaagctgcagaacctgagcctggagggcctgagactgagcgaccccatcgtgaacaccctggccaagaacagcaacctggtgagactgaacctgagcggctgcagcggcttcagcgagttcgccctgcagaccctgctgagcagctgcagcagactggacgagctgaacctgagctggtgcttcgacttcaccgagaagcacgtgcaggtggccgtggcccacgtgagcgagaccatcacccagctgaacctgagcggctacagaaagaacctgcagaagagcgacctgagcaccctggtgagaagatgccccaacctggtgcacctggacctgagcgacagcgtgatgctgaagaacgactgcttccaggagttcttccagctgaactacctgcagcacctgagcctgagcagatgctacgacatcatccccgagaccctgctggagctgggcgagatccccaccctgaagaccctgcaggtgttcggcatcgtgcccgacggcaccctgcagctgctgaaggaggccctgccccacctgcagatcaactgcagccacttcaccaccatcgccagacccaccatcggcaacaagaagaaccaggagatctggggcatcaagtgcagactgaccctgcagaagcccagctgcctgtag

SEQ ID NO: 100669 - DNA, 633 bp, synthetic construct
  misc_feature 1..633: note = Description of Artificial Sequence: Synthetic coding sequence
  source 1..633: mol_type = other DNA
atggaccagcccctggccgagcacttcagcaccctggccaagaacagcaacctggtgagactgaacctgagcggctgcagcggcttcagcgagttcgccctgcagaccctgctgagcagctgcagcagactggacgagctgaacctgagctggtgcttcgacttcaccgagaagcacgtgcaggtggccgtggcccacgtgagcgagaccatcacccagctgaacctgagcggctacagaaagaacctgcagaagagcgacctgagcaccctggtgagaagatgccccaacctggtgcacctggacctgagcgacagcgtgatgctgaagaacgactgcttccaggagttcttccagctgaactacctgcagcacctgagcctgagcagatgctacgacatcatccccgagaccctgctggagctgggcgagatccccaccctgaagaccctgcaggtgttcggcatcgtgcccgacggcaccctgcagctgctgaaggaggccctgccccacctgcagatcaactgcagccacttcaccaccatcgccagacccaccatcggcaacaagaagaaccaggagatctggggcatcaagtgcagactgaccctgcagaagcccagctgcctgtag

SEQ ID NO: 100670 - DNA, 1362 bp, synthetic construct
  misc_feature 1..1362: note = Description of Artificial Sequence: Synthetic coding sequence
  source 1..1362: mol_type = other DNA
atggccctggtgagagccctggtgtgctgcctgctgaccgcctggcactgcagaagcggcctgggcctgcccgtggcccccgccggcggcagaaaccccccccccgccatcggccagttctggcacgtgaccgacctgcacctggaccccacctaccacatcaccgacgaccacaccaaggtgtgcgccagcagcaagggcgccaacgccagcaaccccggccccttcggcgacgtgctgtgcgacagcccctaccagctgatcctgagcgccttcgacttcatcaagaacagcggccaggaggccagcttcatgatctggaccggcgacagccccccccacgtgcccgtgcccgagctgagcaccgacaccgtgatcaacgtgatcaccaacatgaccaccaccatccagagcctgttccccaacctgcaggtgttccccgccctgggcaaccacgactactggccccaggaccagctgcccgtggtgaccagcaaggtgtacaacgccgtggccaacctgtggaagccctggctggacgaggaggccatcagcaccctgagaaagggcggcttctacagccagaaggtgaccaccaaccccaacctgagaatcatcagcctgaacaccaacctgtactacggccccaacatcatgaccctgaacaagaccgaccccgccaaccagttcgagtggctggagagcaccctgaacaacagccagcagaacaaggagaaggtgtacatcatcgcccacgtgcccgtgggctacctgcccagcagccagaacatcaccgccatgagagagtactacaacgagaagctgatcgacatcttccagaagtacagcgacgtgatcgccggccagttctacggccacacccacagagacagcatcatggtgctgagcgacaagaagggcagccccgtgaacagcctgttcgtggcccccgccgtgacccccgtgaagagcgtgctggagaagcagaccaacaaccccggcatcagactgttccagtacgaccccagagactacaagctgctggacatgctgcagtactacctgaacctgaccgaggccaacctgaagggcgagagcatctggaagctggagtacatcctgacccagacctacgacatcgaggacctgcagcccgagagcctgtacggcctggccaagcagttcaccatcctggacagcaagcagttcatcaagtactacaactacttcttcgtgagctacgacagcagcgtgacctgcgacaagacctgcaaggccttccagatctgcgccatcatgaacctggacaacatcagctacgccgactgcctgaagcagctgtacatcaagcacaactactag

SEQ ID NO: 100671 - DNA, 969 bp, synthetic construct
  misc_feature 1..969: note = Description of Artificial Sequence: Synthetic coding sequence
  source 1..969: mol_type = other DNA
atgaccaccaccatccagagcctgttccccaacctgcaggtgttccccgccctgggcaaccacgactactggccccaggaccagctgcccgtggtgaccagcaaggtgtacaacgccgtggccaacctgtggaagccctggctggacgaggaggccatcagcaccctgagaaagggcggcttctacagccagaaggtgaccaccaaccccaacctgagaatcatcagcctgaacaccaacctgtactacggccccaacatcatgaccctgaacaagaccgaccccgccaaccagttcgagtggctggagagcaccctgaacaacagccagcagaacaaggagaaggtgtacatcatcgcccacgtgcccgtgggctacctgcccagcagccagaacatcaccgccatgagagagtactacaacgagaagctgatcgacatcttccagaagtacagcgacgtgatcgccggccagttctacggccacacccacagagacagcatcatggtgctgagcgacaagaagggcagccccgtgaacagcctgttcgtggcccccgccgtgacccccgtgaagagcgtgctggagaagcagaccaacaaccccggcatcagactgttccagtacgaccccagagactacaagctgctggacatgctgcagtactacctgaacctgaccgaggccaacctgaagggcgagagcatctggaagctggagtacatcctgacccagacctacgacatcgaggacctgcagcccgagagcctgtacggcctggccaagcagttcaccatcctggacagcaagcagttcatcaagtactacaactacttcttcgtgagctacgacagcagcgtgacctgcgacaagacctgcaaggccttccagatctgcgccatcatgaacctggacaacatcagctacgccgactgcctgaagcagctgtacatcaagcacaactactag

SEQ ID NO: 100672 - DNA, 726 bp, synthetic construct
  misc_feature 1..726: note = Description of Artificial Sequence: Synthetic coding sequence
  source 1..726: mol_type = other DNA
atgaaggaggtggtgtactggagccccaagaaggtggccgactggctgctggagaacgccatgcccgagtactgcgagcccctggagcacttcaccggccaggacctgatcaacctgacccaggaggacttcaagaagccccccctgtgcagagtgagcagcgacaacggccagagactgctggacatgatcgagaccctgaagatggagcaccacctggaggcccacaagaacggccacgccaacggccacctgaacatcggcgtggacatccccacccccgacggcagcttcagcatcaagatcaagcccaacggcatgcccaacggctacagaaaggagatgatcaagatccccatgcccgagctggagagaagccagtaccccatggagtggggcaagaccttcctggccttcctgtacgccctgagctgcttcgtgctgaccaccgtgatgatcagcgtggtgcacgagagagtgccccccaaggaggtgcagccccccctgcccgacaccttcttcgaccacttcaacagagtgcagtgggccttcagcatctgcgagatcaacggcatgatcctggtgggcctgtggctgatccagtggctgctgctgaagtacaaggacgtgggcaacgagagcagagtggtgatgatcttcctgagcatcgtgcaccccgtgctgctgctgggcagcatcgccggcttcctgagcctgagcctgtag

SEQ ID NO: 100673 - DNA, 1242 bp, synthetic construct
  misc_feature 1..1242: note = Description of Artificial Sequence: Synthetic coding sequence
  source 1..1242: mol_type = other DNA
atgaaggaggtggtgtactggagccccaagaaggtggccgactggctgctggagaacgccatgcccgagtactgcgagcccctggagcacttcaccggccaggacctgatcaacctgacccaggaggacttcaagaagccccccctgtgcagagtgagcagcgacaacggccagagactgctggacatgatcgagaccctgaagatggagcaccacctggaggcccacaagaacggccacgccaacggccacctgaacatcggcgtggacatccccacccccgacggcagcttcagcatcaagatcaagcccaacggcatgcccaacggctacagaaaggagatgatcaagatccccatgcccgagctggagagaagccagtaccccatggagtggggcaagaccttcctggccttcctgtacgccctgagctgcttcgtgctgaccaccgtgatgatcagcgtggtgcacgagagagtgccccccaaggaggtgcagccccccctgcccgacaccttcttcgaccacttcaacagagtgcagtgggccttcagcatctgcgagatcaacggcatgatcctggtgggcctgtggctgatccagtggctgctgctgaagtacaagagcatcatcagcagaagattcttctgcatcgtgggcaccctgtacctgtacagatgcatcaccatgtacgtgaccaccctgcccgtgcccggcatgcacttcaactgcagccccaagctgttcggcgactgggaggcccagctgagaagaatcatgaagctgatcgccggcggcggcctgagcatcaccggcagccacaacatgtgcggcgactacctgtacagcggccacaccgtgatgctgaccctgacctacctgttcatcaaggagtacagccccagaagactgtggtggtaccactggatctgctggctgctgagcgtggtgggcatcttctgcatcctgctggcccacgaccactacaccgtggacgtggtggtggcctactacatcaccaccagactgttctggtggtaccacaccatggccaaccagcaggtgctgaaggaggccagccagatgaacctgctggccagagtgtggtggtacagacccttccagtacttcgagaagaacgtgcagggcatcgtgcccagaagctaccactggcccttcccctggcccgtggtgcacctgagcagacaggtgaagtacagcagactggtgaacgacacctag

SEQ ID NO: 100674 - DNA, 642 bp, synthetic construct
  misc_feature 1..642: note = Description of Artificial Sequence: Synthetic coding sequence
  source 1..642: mol_type = other DNA
acctacatgtacatcagcaacaagagcatcatcagcagaagattcttctgcatcgtgggcaccctgtacctgtacagatgcatcaccatgtacgtgaccaccctgcccgtgcccggcatgcacttcaactgcagccccaagctgttcggcgactgggaggcccagctgagaagaatcatgaagctgatcgccggcggcggcctgagcatcaccggcagccacaacatgtgcggcgactacctgtacagcggccacaccgtgatgctgaccctgacctacctgttcatcaaggagtacagccccagaagactgtggtggtaccactggatctgctggctgctgagcgtggtgggcatcttctgcatcctgctggcccacgaccactacaccgtggacgtggtggtggcctactacatcaccaccagactgttctggtggtaccacaccatggccaaccagcaggtgctgaaggaggccagccagatgaacctgctggccagagtgtggtggtacagacccttccagtacttcgagaagaacgtgcagggcatcgtgcccagaagctaccactggcccttcccctggcccgtggtgcacctgagcagacaggtgaagtacagcagactggtgaacgacacctag

SEQ ID NO: 100675 - DNA, 735 bp, synthetic construct
  misc_feature 1..735: note = Description of Artificial Sequence: Synthetic coding sequence
  source 1..735: mol_type = other DNA
atgggcggcagaggcggcggcggcagaagcagacagctgcccggcagattcagagcccccgccgccagatggcccggcggcagatggctgcccggcgcccccagaaccgtgacctggagcatcatcagcagaagattcttctgcatcgtgggcaccctgtacctgtacagatgcatcaccatgtacgtgaccaccctgcccgtgcccggcatgcacttcaactgcagccccaagctgttcggcgactgggaggcccagctgagaagaatcatgaagctgatcgccggcggcggcctgagcatcaccggcagccacaacatgtgcggcgactacctgtacagcggccacaccgtgatgctgaccctgacctacctgttcatcaaggagtacagccccagaagactgtggtggtaccactggatctgctggctgctgagcgtggtgggcatcttctgcatcctgctggcccacgaccactacaccgtggacgtggtggtggcctactacatcaccaccagactgttctggtggtaccacaccatggccaaccagcaggtgctgaaggaggccagccagatgaacctgctggccagagtgtggtggtacagacccttccagtacttcgagaagaacgtgcagggcatcgtgcccagaagctaccactggcccttcccctggcccgtggtgcacctgagcagacaggtgaagtacagcagactggtgaacgacacctag

SEQ ID NO: 100676 - DNA, 1098 bp, synthetic construct
  misc_feature 1..1098: note = Description of Artificial Sequence: Synthetic coding sequence
  source 1..1098: mol_type = other DNA
atggacatcatcgagaccgccaagctggaggagcacctggagaaccagcccagcgaccccaccaacacctacgccagacccgccgagcccgtggaggaggagaacaagaacggcaacggcaagcccaagagcctgagcagcggcctgagaaagggcaccaagaagtaccccgactacatccagatcgccatgcccaccgagagcagaaacaagttccccctggagtggtggaagaccggcatcgccttcatctacgccgtgttcaacctggtgctgaccaccgtgatgatcaccgtggtgcacgagagagtgccccccaaggagctgagcccccccctgcccgacaagttcttcgactacatcgacagagtgaagtgggccttcagcgtgagcgagatcaacggcatcatcctggtgggcctgtggatcacccagtggctgttcctgagatacaagagcatcgtgggcagaagattctgcttcatcatcggcaccctgtacctgtacagatgcatcaccatgtacgtgaccaccctgcccgtgcccggcatgcacttccagtgcgcccccaagctgaacggcgacagccaggccaaggtgcagagaatcctgagactgatcagcggcggcggcctgagcatcaccggcagccacatcctgtgcggcgacttcctgttcagcggccacaccgtgaccctgaccctgacctacctgttcatcaaggagtacagccccagacacttctggtggtaccacctgatctgctggctgctgagcgccgccggcatcatctgcatcctggtggcccacgagcactacaccatcgacgtgatcatcgcctactacatcaccaccagactgttctggtggtaccacagcatggccaacgagaagaacctgaaggtgagcagccagaccaacttcctgagcagagcctggtggttccccatcttctacttcttcgagaagaacgtgcagggcagcatcccctgctgcttcagctggcccctgagctggccccccggctgcttcaagagcagctgcaagaagtacagcagagtgcagaagatcggcgaggacaacgagaagagcacctag

SEQ ID NO: 100677 - DNA, 1098 bp, synthetic construct; identical to SEQ ID NO: 100676
  misc_feature 1..1098: note = Description of Artificial Sequence: Synthetic coding sequence
  source 1..1098: mol_type = other DNA

SEQ ID NO: 100678 - DNA, 1098 bp, synthetic construct; identical to SEQ ID NO: 100676
  misc_feature 1..1098: note = Description of Artificial Sequence: Synthetic coding sequence
  source 1..1098: mol_type = other DNA

SEQ ID NO: 100679 - DNA, 135 bp, synthetic construct
  misc_feature 1..135: note = Description of Artificial Sequence: Synthetic coding sequence
  source 1..135: mol_type = other DNA
atggacatcatcgagaccgccaagctggaggagcacctggagaaccagcccagcgaccccaccaacacctacgccagacccgccgagcccgtggaggaggagaacaagaacggcaacggcaagcccaagagctag

SEQ ID NO: 100680 - DNA, 105 bp, synthetic construct
  misc_feature 1..105: note = Description of Artificial Sequence: Synthetic coding sequence
  source 1..105: mol_type = other DNA
atggacatcatcgagaccgccaagctggaggagcacctggagaaccagcccagcgaccccaccaacacctacgccagacccgccgagcccgtggaggaggagtag

SEQ ID NO: 100681 - DNA, 1326 bp, synthetic construct
  misc_feature 1..1326: note = Description of Artificial Sequence: Synthetic coding sequence
  source 1..1326: mol_type = other DNA
atgagcctgagacagagactggcccagctggtgggcagactgcaggacccccagaaggtggccagattccagagactgtgcggcgtggaggccccccccagaagaagcgccgacagaagagaggacgagaaggccgaggcccccctggccggcgaccccagactgagaggcagacagcccggcgcccccggcggcccccagccccccggcagcgacagaaaccagtgccccgccaagcccgacggcggcggcgcccccaacggcgtgagaaacggcctggccgccgagctgggccccgccagccccagaagagccggcgccctgagaagaaacagcctgaccggcgaggagggccagctggccagagtgagcaactggcccctgtactgcctgttctgcttcggcaccgagctgggcaacgagctgttctacatcctgttcttccccttctggatctggaacctggaccccctggtgggcagaagactggtggtgatctgggtgctggtgatgtacctgggccagtgcaccaaggacatcatcagatggcccagacccgccagcccccccgtggtgaagctggaggtgttctacaacagcgagtacagcatgcccagcacccacgccatgagcggcaccgccatccccatcagcatggtgctgctgacctacggcagatggcagtaccccctgatctacggcctgatcctgatcccctgctggtgcagcctggtgtgcctgagcagaatctacatgggcatgcacagcatcctggacatcatcgccggcttcctgtacaccatcctgatcctggccgtgttctaccccttcgtggacctgatcgacaacttcaaccagacccacaagtacgcccccttcatcatcatcggcctgcacctggccctgggcatcttcagcttcaccctggacacctggagcaccagcagaggcgacaccgccgagatcctgggcagcggcgccggcatcgcctgcggcagccacgtgacctacaacatgggcctggtgctggaccccagcctggacaccctgcccctggccggcccccccatcaccgtgaccctgttcggcaaggccatcctgagaatcctgatcggcatggtgttcgtgctgatcatcagagacgtgatgaagaagatcaccatccccctggcctgcaagatcttcaacatcccctgcgacgacatcagaaaggccagacagcacatggaggtggagctgccctacagatacatcacctacggcatggtgggcttcagcatcaccttcttcgtgccctacatcttcttcttcatcggcatcagctag

SEQ ID NO: 100682 - DNA, 1200 bp, synthetic construct
  misc_feature 1..1200: note = Description of Artificial Sequence: Synthetic coding sequence
  source 1..1200: mol_type = other DNA
atggccgagctgctgagaagcctgcaggacagccagctggtggccagattccagagaagatgcggcctgttccccgcccccgacgagggccccagagagaacggcgccgaccccaccgagagagccgccagagtgcccggcgtggagcacctgcccgccgccaacggcaagggcggcgaggcccccgccaacggcctgagaagagccgccgcccccgaggcctacgtgcagaagtacgtggtgaagaactacttctactactacctgttccagttcagcgccgccctgggccaggaggtgttctacatcaccttcctgcccttcacccactggaacatcgacccctacctgagcagaagactgatcatcatctgggtgctggtgatgtacatcggccaggtggccaaggacgtgctgaagtggcccagacccagcagcccccccgtggtgaagctggagaagagactgatcgccgagtacggcatgcccagcacccacgccatggccgccaccgccatcgccttcaccctgctgatcagcaccatggacagataccagtaccccttcgtgctgggcctggtgatggccgtggtgttcagcaccctggtgtgcctgagcagactgtacaccggcatgcacaccgtgctggacgtgctgggcggcgtgctgatcaccgccctgctgatcgtgctgacctaccccgcctggaccttcatcgactgcctggacagcgccagccccctgttccccgtgtgcgtgatcgtggtgcccttcttcctgtgctacaactaccccgtgagcgactactacagccccaccagagccgacaccaccaccatcctggccgccggcgccggcgtgaccatcggcttctggatcaaccacttcttccagctggtgagcaagcccgccgagagcctgcccgtgatccagaacatcccccccctgaccacctacatgctggtgctgggcctgaccaagttcgccgtgggcatcgtgctgatcctgctggtgagacagctggtgcagaacctgagcctgcaggtgctgtacagctggttcaaggtggtgaccagaaacaaggaggccagaagaagactggagatcgaggtgccctacaagttcgtgacctacaccagcgtgggcatctgcgccaccaccttcgtgcccatgctgcacagattcctgggcctgccctag

SEQ ID NO: 100683 - DNA, 1062 bp, synthetic construct
  misc_feature 1..1062: note = Description of Artificial Sequence: Synthetic coding sequence
  source 1..1062: mol_type = other DNA
atgggcagcctgtacagcgagtacctgaaccccaacaaggtgcaggagcactacaactacaccaaggagaccctggagacccaggagaccaccagcagacaggtggccagcgccttcatcgtgatcctgtgctgcgccatcgtggtggagaacctgctggtgctgatcgccgtggccagaaacagcaagttccacagcgccatgtacctgttcctgggcaacctggccgccagcgacctgctggccggcgtggccttcgtggccaacaccctgctgagcggcagcgtgaccctgagactgacccccgtgcagtggttcgccagagagggcagcgccttcatcaccctgagcgccagcgtgttcagcctgctggccatcgccatcgagagacacgtggccatcgccaaggtgaagctgtacggcagcgacaagagctgcagaatgctgctgctgatcggcgccagctggctgatcagcctggtgctgggcggcctgcccatcctgggctggaactgcctgggccacctggaggcctgcagcaccgtgctgcccctgtacgccaagcactacgtgctgtgcgtggtgaccatcttcagcatcatcctgctggccatcgtggccctgtacgtgagaatctactgcgtggtgagaagcagccacgccgacatggccgccccccagaccctggccctgctgaagaccgtgaccatcgtgctgggcgtgttcatcgtgtgctggctgcccgccttcagcatcctgctgctggactacgcctgccccgtgcacagctgccccatcctgtacaaggcccactacttcttcgccgtgagcaccctgaacagcctgctgaaccccgtgatctacacctggagaagcagagacctgagaagagaggtgctgagacccctgcagtgctggagacccggcgtgggcgtgcagggcagaagaagaggcggcacccccggccaccacctgctgcccctgagaagcagcagcagcctggagagaggcatgcacatgcccaccagccccaccttcctggagggcaacaccgtggtgtag

SEQ ID NO: 100684 - DNA, 1137 bp, synthetic construct
  misc_feature 1..1137: note = Description of Artificial Sequence: Synthetic coding sequence
  source 1..1137: mol_type = other DNA
atggccaccgccctgccccccagactgcagcccgtgagaggcaacgagaccctgagagagcactaccagtacgtgggcaagctggccggcagactgaaggaggccagcgagggcagcaccctgaccaccgtgctgttcctggtgatctgcagcttcatcgtgctggagaacctgatggtgctgatcgccatctggaagaacaacaagttccacaacagaatgtacttcttcatcggcaacctggccctgtgcgacctgctggccggcatcgcctacaaggtgaacatcctgatgagcggcaagaagaccttcagcctgagccccaccgtgtggttcctgagagagggcagcatgttcgtggccctgggcgccagcacctgcagcctgctggccatcgccatcgagagacacctgaccatgatcaagatgagaccctacgacgccaacaagagacacagagtgttcctgctgatcggcatgtgctggctgatcgccttcaccctgggcgccctgcccatcctgggctggaactgcctgcacaacctgcccgactgcagcaccatcctgcccctgtacagcaagaagtacatcgccttctgcatcagcatcttcaccgccatcctggtgaccatcgtgatcctgtacgccagaatctacttcctggtgaagagcagcagcagaaaggtggccaaccacaacaacagcgagagaagcatggccctgctgagaaccgtggtgatcgtggtgagcgtgttcatcgcctgctggagccccctgttcatcctgttcctgatcgacgtggcctgcagagtgcaggcctgccccatcctgttcaaggcccagtggttcatcgtgctggccgtgctgaacagcgccatgaaccccgtgatctacaccctggccagcaaggagatgagaagagccttcttcagactggtgtgcaactgcctggtgagaggcagaggcgccagagccagccccatccagcccgccctggaccccagcagaagcaagagcagcagcagcaacaacagcagccacagccccaaggtgaaggaggacctgccccacaccgcccccagcagctgcatcatggacaagaacgccgccctgcagaacggcatcttctgcaactag

SEQ ID NO: 100685 - DNA, 1137 bp, synthetic construct; identical to SEQ ID NO: 100684
  misc_feature 1..1137: note = Description of Artificial Sequence: Synthetic coding sequence
  source 1..1137: mol_type = other DNA

SEQ ID NO: 100686 - DNA, 1155 bp, synthetic construct
  misc_feature 1..1155: note = Description of Artificial Sequence: Synthetic coding sequence
  source 1..1155: mol_type = other DNA
atgaacgccaccggcacccccgtggcccccgagagctgccagcagctggccgccggcggccacagcagactgatcgtgctgcactacaaccacagcggcagactggccggcagaggcggccccgaggacggcggcctgggcgccctgagaggcctgagcgtggccgccagctgcctggtggtgctggagaacctgctggtgctggccgccatcaccagccacatgagaagcagaagatgggtgtactactgcctggtgaacatcaccctgagcgacctgctgaccggcgccgcctacctggccaacgtgctgctgagcggcgccagaaccttcagactggcccccgcccagtggttcctgagagagggcctgctgttcaccgccctggccgccagcaccttcagcctgctgttcaccgccggcgagagattcgccaccatggtgagacccgtggccgagagcggcgccaccaagaccagcagagtgtacggcttcatcggcctgtgctggctgctggccgccctgctgggcatgctgcccctgctgggctggaactgcctgtgcgccttcgacagatgcagcagcctgctgcccctgtacagcaagagatacatcctgttctgcctggtgatcttcgccggcgtgctggccaccatcatgggcctgtacggcgccatcttcagactggtgcaggccagcggccagaaggcccccagacccgccgccagaagaaaggccagaagactgctgaagaccgtgctgatgatcctgctggccttcctggtgtgctggggccccctgttcggcctgctgctggccgacgtgttcggcagcaacctgtgggcccaggagtacctgagaggcatggactggatcctggccctggccgtgctgaacagcgccgtgaaccccatcatctacagcttcagaagcagagaggtgtgcagagccgtgctgagcttcctgtgctgcggctgcctgagactgggcatgagaggccccggcgactgcctggccagagccgtggaggcccacagcggcgccagcaccaccgacagcagcctgagacccagagacagcttcagaggcagcagaagcctgagcttcagaatgagagagcccctgagcagcatcagcagcgtgagaagcatctag

SEQ ID NO: 100687 - DNA, 1197 bp, synthetic construct
  misc_feature 1..1197: note = Description of Artificial Sequence: Synthetic coding sequence
  source 1..1197: mol_type = other DNA
atggagagcggcctgctgagacccgcccccgtgagcgaggtgatcgtgctgcactacaactacaccggcaagctgagaggcgccagataccagcccggcgccggcctgagagccgacgccgtggtgtgcctggccgtgtgcgccttcatcgtgctggagaacctggccgtgctgctggtgctgggcagacaccccagattccacgcccccatgttcctgctgctgggcagcctgaccctgagcgacctgctggccggcgccgcctacgccgccaacatcctgctgagcggccccctgaccctgaagctgagccccgccctgtggttcgccagagagggcggcgtgttcgtggccctgaccgccagcgtgctgagcctgctggccatcgccctggagagaagcctgaccatggccagaagaggccccgcccccgtgagcagcagaggcagaaccctggccatggccgccgccgcctggggcgtgagcctgctgctgggcctgctgcccgccctgggctggaactgcctgggcagactggacgcctgcagcaccgtgctgcccctgtacgccaaggcctacgtgctgttctgcgtgctggccttcgtgggcatcctggccgccatctgcgccctgtacgccagaatctactgccaggtgagagccaacgccagaagactgcccgccagacccggcaccgccggcaccaccagcaccagagccagaagaaagcccagaagcctggccctgctgagaaccctgagcgtggtgctgctggccttcgtggcctgctggggccccctgttcctgctgctgctgctggacgtggcctgccccgccagaacctgccccgtgctgctgcaggccgaccccttcctgggcctggccatggccaacagcctgctgaaccccatcatctacaccctgaccaacagagacctgagacacgccctgctgagactggtgtgctgcggcagacacagctgcggcagagaccccagcggcagccagcagagcgccagcgccgccgaggccagcggcggcctgagaagatgcctgccccccggcctggacggcagcttcagcggcagcgagagaagcagcccccagagagacggcctggacaccagcggcagcaccggcagccccggcgcccccaccgccgccagaaccctggtgagcgagcccgccgccgactag

SEQ ID NO: 100688 - DNA, 933 bp, synthetic construct
  misc_feature 1..933: note = Description of Artificial Sequence: Synthetic coding sequence
  source 1..933: mol_type = other DNA
atggagagcggcctgctgagacccgcccccgtgagcgaggtgatcgtgctgcactacaactacaccggcaagctgagaggcgccagataccagcccggcgccggcctgagagccgacgccgtggtgtgcctggccgtgtgcgccttcatcgtgctggagaacctggccgtgctgctggtgctgggcagacaccccagattccacgcccccatgttcctgctgctgggcagcctgaccctgagcgacctgctggccggcgccgcctacgccgccaacatcctgctgagcggccccctgaccctgaagctgagccccgccctgtggttcgccagagagggcggcgtgttcgtggccctgaccgccagcgtgctgagcctgctggccatcgccctggagagaagcctgaccatggccagaagaggccccgcccccgtgagcagcagaggcagaaccctggccatggccgccgccgcctggggcgtgagcctgctgctgggcctgctgcccgccctgggctggaactgcctgggcagactggacgcctgcagcaccgtgctgcccctgtacgccaaggcctacgtgctgttctgcgtgctggccttcgtgggcatcctggccgccatctgcgccctgtacgccctggccggcctggccgcccacgcccagagaggcgcccccggcctgtgcggcatgctgggcccccccctgcccgccgccgtggccagaagaggcgtgcccggcgcccacctgagctgcacccccgccggcagaagcctgcccggcaccggccacggccagctgaccagcgagccccaccacctgcacgcccaccagcccagacccgcccccagagcccccgcccccggcctgctgagaacccccctgctgagacagagacccgagtggctgcccgccgtgggcgagagaggctag

SEQ ID NO: 100689 - DNA, 1197 bp, synthetic construct; identical to SEQ ID NO: 100687
  misc_feature 1..1197: note = Description of Artificial Sequence: Synthetic coding sequence
  source 1..1197: mol_type = other DNA

SEQ ID NO: 100690 - DNA, 5016 bp, synthetic construct
  misc_feature 1..5016: note = Description of Artificial Sequence: Synthetic coding sequence
  source 1..5016: mol_type = other DNA
atggacggcaacagcctgctgagcgtgcccagcaacctggagagcagcagaatgtacgacgtgctggagccccagcagggcagaggctgcggcagcagcggcagcggccccggcaacagcatcaccgcctgcaagaaggtgctgagaagcaacagcctgctggagagcaccgactactggctgcagaaccagagaatgccctgccagatcggcttcgtggaggacaagagcgagaactgcgccagcgtgtgcttcgtgaacctggacgtgaacaaggacgagtgcagcaccgagcacctgcagcagaagctggtgaacgtgagccccgacctgcccaagctgatcagcagcatgaacgtgcagcagcccaaggagaacgagatcgtggtgctgagcggcctggccagcggcaacctgcaggccgacttcgaggtgagccagtgcccctggctgcccgacatctgcctggtgcagtgcgccagaggcaacagacccaacagcaccaactgcatcatcttcgagatcaacaagttcctgatcggcctggagctggtgcaggagagacagctgcacctggagaccaacatcctgaagctggaggacgacaccaactgcagcctgagcagcatcgaggaggacttcctgaccgccagcgagcacctggaggaggagagcgaggtggacgagagcagaaacgactacgagaacatcaacgtgagcgccaacgtgctggagagcaagcagctgaagggcgccacccaggtggagtggaactgcaacaaggagaagtggctgtacgccctggaggacaagtacatcaacaagtaccccacccccctgatcaagaccgagagaagccccgagaacctgaccaagaacaccgccctgcagagcctggaccccagcgccaagcccagccagtggaagagagaggccgtgggcaacggcagacaggccacccactactaccacagcgaggccttcaagggccagatggagaagagccaggccctgtacatccccaaggacgcctacttcagcatgatggacaaggacgtgcccagcgcctgcgccgtggccgagcagagaagcaacctgaaccccggcgaccacgaggacaccagaaacgccctgccccccagacaggacggcgaggtgaccaccggcaagtacgccaccaacctggccgagagcgtgctgcaggacgccttcatcagactgagccagagccagagcaccctgccccaggagagcgccgtgagcgtgagcgtgggcagcagcctgctgcccagctgctacagcaccaaggacaccgtggtgagcagaagctggaacgagctgcccaagatcgtggtggtgcagagccccgacggcagcgacgccgccccccagcccggcatcagcagctggcccgagatggaggtgagcgtggagaccagcagcatcctgagcggcgagaacagcagcagacagccccagagcgccctggaggtggccctggcctgcgccgccaccgtgatcggcaccatcagcagcccccaggccaccgagagactgaagatggagcaggtggtgagcaacttcccccccggcagcagcggcgccctgcagacccaggccccccagggcctgaaggagcccagcatcaacgagtacagcttccccagcgccctgtgcggcatgacccaggtggccagcgccgtggccgtgtgcggcctgggcgagagagaggaggtgacctgcagcgtggcccccagcggcagcctgccccccgccgccgaggccagcgaggccatgccccccctgtgcggcctggccagcatggagctgggcaaggaggccatcgccaagggcctgctgaaggaggccgccctggtgctgaccagacccaacacctacagcagcatcggcgacttcctggacagcatgaacagaagaatcatggagaccgccagcaagagccagaccctgtgcagcgagaacgtggtgagaaacgagctggcccacaccctgagcaacgtgatcctgagacacagcatcgacgaggtgcaccacaagaacatgatcatcgaccccaacgacaacagacacagcagcgagatcctggacaccctgatggagagcaccaaccagctgctgctggacgtgatctgcttcaccttcaagaagatgagccacatcgtgagactgggcgagtgccccgccgtgctgagcaaggagaccatcagaagaagagagaccgagcccagctgccagcccagcgaccccggcgccagccaggcctggaccaaggccaccgagagcagcagcagcagccccctgagcaacagccacaacaccagcctggtgatcaacaacctggtggacggcatgtacagcaagcaggacaagggcggcgtgagacccggcctgttcaagaaccccaccctgcagagccagctgagcagaagccacagagtgcccgacagcagcaccgccaccaccagcagcaaggagatctacctgaagggcatcgccggcgaggacaccaagagcccccaccacagcgagaacgagtgcagagccagcagcgagggccagagaagccccaccgtgagccagagcagaagcggcagccaggaggccgaggagagcatccaccccaacacccaggagaagtacaactgcgccaccagcagaatcaacgaggtgcaggtgaacctgagcctgctgggcgacgacctgctgctgcccgcccagagcaccctgcagaccaagcaccccgacatctactgcatcaccgacttcgccgaggagctggccgacaccgtggtgagcatggccaccgagatcgccgccatctgcctggacaacagcagcggcaagcagccctggttctgcgcctggaagagaggcagcgagttcctgatgacccccaacgtgccctgcagaagcctgaagagaaagaaggagagccagggcagcggcaccgccgtgagaaagcacaagccccccagactgagcgagatcaagagaaagaccgacgagcaccccgagctgaaggagaagctgatgaacagagtggtggacgagagcatgaacctggaggacgtgcccgacagcgtgaacctgttcgccaacgaggtggccgccaagatcatgaacctgaccgagttcagcatggtggacggcatgtggcaggcccagggctaccccagaaacagactgctgagcggcgacagatggagcagactgaaggccagcagctgcgagagcatccccgaggaggacagcgaggccagagcctacgtgaacagcctgggcctgatgagcaccctgagccagcccgtgagcagagccagcagcgtgagcaagcagagcagctgcgagagcatcaccgacgagttcagcagattcatggtgaaccagatggagaacgagggcagaggcttcgagctgctgctggactactacgccggcaagaacgccagcagcatcctgaacagcgccatgcagcaggcctgcagaaagagcgaccacctgagcgtgagacccagctgccccagcaagcagagcagcaccgagagcatcaccgaggagttctacagatacatgctgagagacatcgagagagacagcagagagagcgccagcagcagaagaagcagccaggactggaccgccggcctgctgagccccagcctgagaagccccgtgtgccacagacagagcagcatgcccgacagcagaagcccctgcagcagactgaccgtgaacgtgcccatcaaggccaacagcctggacggcttcgcccagaactgcccccaggacttcctgagcgtgcagcccgtgagcagcgccagcagcagcggcctgtgcaagagcgacagctgcctgtacagaagaggcggcaccgaccacatcaccaacatgctgatccacgagacctgggccagcagcatcgaggccctgatgagaaagaacaagatcatcgtggacgacgccgaggaggccgacaccgagcccgtgagcggcggcagccccagccaggccgagaagtgcgccaacagactggccgccagcagaatgtgcagcggccccaccctgctggtgcaggagagcctggactgccccagaaaggacagcgtgaccgagtgcaagcagccccccgtgagcagcctgagcaagaccgccagcctgaccaaccacagccccctggacagcaagaaggagaccagcagctgccaggaccccgtgcccatcaaccacaagagaagaagcctgtgcagcagagaggtgcccctgatccagatcgagaccgaccagagagaggcctgcgccggcgagcccgagcccttcctgagcaagagcagcctgctggaggaggccgagggccacagcaacgacaagaacatccccgacgtggtgagaggcggcgacaccgccgtgagcgcctgccagatccacagcgacagcctggacaccagagacgtgcccgaggccgaggccagcaccgaggccagagcccccgacgaggcccccaacccccccagcagcagcgaggagagcaccggcagctggacccagctggccaacgaggaggacaaccccgacgacaccagcagcttcctgcagctgagcgagagaagcatgagcgagctggtggaggagaagaagatcctgaagggccagagcgagagcaccgaggcccccgccagcggcccccccaccggcaccgccagcccccagagaagcctgctggtgatcaacttcgacctggagcccgagtgccccgacgccgagctgagagccaccctgcagtggatcgccgccagcgagctgggcatccccaccatctacttcaagaagagccaggagaacagaatcgagaagttcctggacgtggtgcagctggtgcacagaaagagctggaaggtgggcgacatcttccacgccgtggtgcagtactgcaagatgcacgaggagcagaaggacggcagactgagcctgttcgactggctgctggagctgggctag

SEQ ID NO: 100691 - DNA, 5103 bp, synthetic construct
  misc_feature 1..5103: note = Description of Artificial Sequence: Synthetic coding sequence
  source 1..5103: mol_type = other DNA
atggacggcaacagcctgctgagcgtgcccagcaacctggagagcagcagaatgtacgacgtgctggagccccagcagggcagaggctgcggcagcagcggcagcggccccggcaacagcatcaccgcctgcaagaaggtgctgagaagcaacagcctgctggagagcaccgactactggctgcagaaccagagaatgccctgccagatcggcttcgtggaggacaagagcgagaactgcgccagcgtgtgcttcgtgaacctggacgtgaacaaggacgagtgcagcaccgagcacctgcagcagaagctggtgaacgtgagccccgacctgcccaagctgatcagcagcatgaacgtgcagcagcccaaggagaacgagatcgtggtgctgagcggcctggccagcggcaacctgcaggccgacttcgaggtgagccagtgcccctggctgcccgacatctgcctggtgcagtgcgccagaggcaacagacccaacagcaccaactgcatcatcttcgagatcaacaagttcctgatcggcctggagctggtgcaggagagacagctgcacctggagaccaacatcctgaagctggaggacgacaccaactgcagcctgagcagcatcgaggaggacttcctgaccgccagcgagcacctggaggaggagagcgaggtggacgagagcagaaacgactacgagaacatcaacgtgagcgccaacgtgctggagagcaagcagctgaagggcgccacccaggtggagtggaactgcaacaaggagaagtggctgtacgccctggaggacaagtacatcaacaagtaccccacccccctgatcaagaccgagagaagccccgagaacctgaccaagaacaccgccctgcagagcctggaccccagcgccaagcccagccagtggaagagagaggccgtgggcaacggcagacaggccacccactactaccacagcgaggccttcaagggccagatggagaagagccaggccctgtacatccccaaggacgcctacttcagcatgatggacaaggacgtgcccagcgcctgcgccgtggccgagcagagaagcaacctgaaccccggcgaccacgaggacaccagaaacgccctgccccccagacaggacggcgaggtgaccaccggcaagtacgccaccaacctggccgagagcgtgctgcaggacgccttcatcagactgagccagagccagagcaccctgccccaggagagcgccgtgagcgtgagcgtgggcagcagcctgctgcccagctgctacagcaccaaggacaccgtggtgagcagaagctggaacgagctgcccaagatcgtggtggtgcagagccccgacggcagcgacgccgccccccagcccggcatcagcagctggcccgagatggaggtgagcgtggagaccagcagcatcctgagcggcgagaacagcagcagacagccccagagcgccctggaggtggccctggcctgcgccgccaccgtgatcggcaccatcagcagcccccaggccaccgagagactgaagatggagcaggtggtgagcaacttcccccccggcagcagcggcgccctgcagacccaggccccccagggcctgaaggagcccagcatcaacgagtacagcttccccagcgccctgtgcggcatgacccaggtggccagcgccgtggccgtgtgcggcctgggcgagagagaggaggtgacctgcagcgtggcccccagcggcagcctgccccccgccgccgaggccagcgaggccatgccccccctgtgcggcctggccagcatggagctgggcaaggaggccatcgccaagggcctgctgaaggaggccgccctggtgctgaccagacccaacacctacagcagcatcggcgacttcctggacagcatgaacagaagaatcatggagaccgccagcaagagccagaccctgtgcagcgagaacgtggtgagaaacgagctggcccacaccctgagcaacgtgatcctgagacacagcatcgacgaggtgcaccacaagaacatgatcatcgaccccaacgacaacagacacagcagcgagatcctggacaccctgatggagagcaccaaccagctgctgctggacgtgatctgcttcaccttcaagaagatgagccacatcgtgagactgggcgagtgccccgccgtgctgagcaaggagaccatcagaagaagagagaccgagcccagctgccagcccagcgaccccggcgccagccaggcctggaccaaggccaccgagagcagcagcagcagccccctgagcaacagccacaacaccagcctggtgatcaacaacctggtggacggcatgtacagcaagcaggacaagggcggcgtgagacccggcctgttcaagaaccccaccctgcagagccagctgagcagaagccacagagtgcccgacagcagcaccgccaccaccagcagcaaggagatctacctgaagggcatcgccggcgaggacaccaagagcccccaccacagcgagaacgagtgcagagccagcagcgagggccagagaagccccaccgtgagccagagcagaagcggcagccaggaggccgaggagagcatccaccccaacacccaggagaagtacaactgcgccaccagcagaatcaacgaggtgcaggtgaacctgagcctgctgggcgacgacctgctgctgcccgcccagagcaccctgcagaccaagcaccccgacatctactgcatcaccgacttcgccgaggagctggccgacaccgtggtgagcatggccaccgagatcgccgccatctgcctggacaacagcagcggcaagcagccctggttctgcgcctggaagagaggcagcgagttcctgatgacccccaacgtgccctgcagaagcctgaagagaaagaaggagagccagggcagcggcaccgccgtgagaaagcacaagccccccagactgagcgagatcaagagaaagaccgacgagcaccccgagctgaaggagaagctgatgaacagagtggtggacgagagcatgaacctggaggacgtgcccgacagcgtgaacctgttcgccaacgaggtggccgccaagatcatgaacctgaccgagttcagcatggtggacggcatgtggcaggcccagggctaccccagaaacagactgctgagcggcgacagatggagcagactgaaggccagcagctgcgagagcatccccgaggaggacagcgaggccagagcctacgtgaacagcctgggcctgatgagcaccctgagccagcccgtgagcagagccagcagcgtgagcaagcagagcagctgcgagagcatcaccgacgagttcagcagattcatggtgaaccagatggagaacgagggcagaggcttcgagctgctgctggactactacgccggcaagaacgccagcagcatcctgaacagcgccatgcagcaggcctgcagaaagagcgaccacctgagcgtgagacccagctgccccagcaagcagagcagcaccgagagcatcaccgaggagttctacagatacatgctgagagacatcgagagagacagcagagagagcgccagcagcagaagaagcagccaggactggaccgccggcctgctgagccccagcctgagaagccccgtgtgccacagacagagcagcatgcccgacagcagaagcccctgcagcagactgaccgtgaacgtgcccatcaaggccaacagcctggacggcttcgcccagaactgcccccaggacttcctgagcgtgcagcccgtgagcagcgccagcagcagcggcctgtgcaagagcgacagctgcctgtacagaagaggcggcaccgaccacatcaccaacatgctgatccacgagacctgggccagcagcatcgaggccctgatgagaaagaacaagatcatcgtggacgacgccgaggaggccgacaccgagcccgtgagcggcggcagccccagccaggccgagaagtgcgccaacagactggccgccagcagaatgtgcagcggccccaccctgctggtgcaggagagcctggactgccccagaaaggacagcgtgaccgagtgcaagcagccccccgtgagcagcctgagcaagaccgccagcctgaccaaccacagccccctggacagcaagaaggagaccagcagctgccaggaccccgtgcccatcaaccacaagagaagaagcctgtgcagcagagaggtgcccctgatccagatcgagaccgaccagagagaggcctgcgccggcgagcccgagcccttcctgagcaagagcagcctgctggaggaggccgagggccacagcaacgacaagaacatccccgacgtggtgagaggcggcgacaccgccgtgagcgcctgccagatccacagcgacagcctggacaccagagacgtgcccgaggccgaggccagcaccgaggccagagcccccgacgaggcccccaacccccccagcagcagcgaggagagcaccggcagctggacccagctggccaacgaggaggacaaccccgacgacaccagcagcttcctgcagctgagcgagagaagcatgagcaacggcaacagcagcgccaccagcagcctgggcatcatggacctggacatctaccaggagagcatgcccagcagccccatgatcaacgagctggtggaggagaagaagatcctgaagggccagagcgagagcaccgaggcccccgccagcggcccccccaccggcaccgccagcccccagagaagcctgctggtgatcaacttcgacctggagcccgagtgccccgacgccgagctgagagccaccctgcagtggatcgccgccagcgagctgggcatccccaccatctacttcaagaagagccaggagaacagaatcgagaagttcctggacgtggtgcagctggtgcacagaaagagctggaaggtgggcgacatcttccacgccgtggtgcagtactgcaagatgcacgaggagcagaaggacggcagactgagcctgttcgactggctgctggagctgggctag

SEQ ID NO: 100692 - DNA, 789 bp, synthetic construct
  misc_feature 1..789: note = Description of Artificial Sequence: Synthetic coding sequence
  source 1..789: mol_type = other DNA
atgctggccctggaggccgcccagctggacggcccccacttcagctgcctgtaccccgacggcgtgttctacgacctggacagctgcaagcacagcagctaccccgacagcgagggcgcccccgacagcctgtgggactggaccgtggccccccccgtgcccgccaccccctacgaggccttcgaccccgccgccgccgccttcagccacccccaggccgcccagctgtgctacgagccccccacctacagccccgccggcaacctggagctggcccccagcctggaggcccccggccccggcctgcccgcctaccccaccgagaacttcgccagccagaccctggtgccccccgcctacgccccctaccccagccccgtgctgagcgaggaggaggacctgcccctggacagccccgccctggaggtgagcgacagcgagagcgacgaggccctggtggccggccccgagggcaagggcagcgaggccggcaccagaaagaagctgagactgtaccagttcctgctgggcctgctgaccagaggcgacatgagagagtgcgtgtggtgggtggagcccggcgccggcgtgttccagttcagcagcaagcacaaggagctgctggccagaagatggggccagcagaagggcaacagaaagagaatgacctaccagaagctggccagagccctgagaaactacgccaagaccggcgagatcagaaaggtgaagagaaagctgacctaccagttcgacagcgccctgctgcccgccgtgagaagagcctag

SEQ ID NO: 100693 - DNA, 516 bp, synthetic construct
  misc_feature 1..516: note = Description of Artificial Sequence: Synthetic coding sequence
  source 1..516: mol_type = other DNA
atggccagcagcatgacctggaccgccgccagcatccccgccaccctgatccagagaggcctgctgaccctggtgccccccgcctacgccccctaccccagccccgtgctgagcgaggaggaggacctgcccctggacagccccgccctggaggtgagcgacagcgagagcgacgaggccctggtggccggccccgagggcaagggcagcgaggccggcaccagaaagaagctgagactgtaccagttcctgctgggcctgctgaccagaggcgacatgagagagtgcgtgtggtgggtggagcccggcgccggcgtgttccagttcagcagcaagcacaaggagctgctggccagaagatggggccagcagaagggcaacagaaagagaatgacctaccagaagctggccagagccctgagaaactacgccaagaccggcgagatcagaaaggtgaagagaaagctgacctaccagttcgacagcgccctgctgcccgccgtgagaagagcctag

SEQ ID NO: 100694 - DNA, 747 bp, synthetic construct
  misc_feature 1..747: note = Description of Artificial Sequence: Synthetic coding sequence
  source 1..747: mol_type = other DNA
atgacctgcgtggagcaggacaagctgggccaggccttcgaggacgccttcgaggtgctgagacagcacagcaccggcgacctgcagtacagccccgactacagaaactacctggccctgatcaaccacagaccccacgtgaagggcaacagcagctgctacggcgtgctgcccaccgaggagcccgtgtacaactggagaaccgtgatcaacagcgccgccgacttctacttcgagggcaacatccaccagagcctgcagaacatcaccgagaaccagctggtgcagcccaccctgctgcagcagaagggcggcaagggcagaaagaagctgagactgttcgagtacctgcacgagagcctgtacaaccccgagatggccagctgcatccagtgggtggacaagaccaagggcatcttccagttcgtgagcaagaacaaggagaagctggccgagctgtggggcaagagaaagggcaacagaaagaccatgacctaccagaagatggccagagccctgagaaactacggcagaagcggcgagatcaccaagatcagaagaaagctgacctaccagttcagcgaggccatcctgcagagactgagccccagctacttcctgggcaaggagatcttctacagccagtgcgtgcagcccgaccaggagtacctgagcctgaacaactggaacgccaactacaactacacctacgccaactaccacgagctgaaccaccacgactgctag

SEQ ID NO: 100695 - DNA, 747 bp, synthetic construct; identical to SEQ ID NO: 100694
  misc_feature 1..747: note = Description of Artificial Sequence: Synthetic coding sequence
  source 1..747: mol_type = other DNA

SEQ ID NO: 100696 - DNA, 2568 bp, synthetic construct
  misc_feature 1..2568: note = Description of Artificial Sequence: Synthetic coding sequence
  source 1..2568: mol_type = other DNA
atgagcttcgtgagagtgaacagatgcggccccagagtgggcgtgagaaagacccccaaggtgaagaagaagaagaccagcgtgaagcaggagtgggacaacaccgtgaccgacctgaccgtgcacagagccacccccgaggacctggtgagaagacacgagatccacaagagcaagaacagagccctggtgcactgggagctgcaggagaaggccctgaagagaaagtggagaaagcagaagcccgagaccctgaacctggagaagagaagactgagcatcatgaaggagatcctgagcgaccagtaccagatgcaggacgtgctggagaagagcgaccacctgatcgccgccgccaaggagctgttccccagaagaagaaccggcttccccaacgtgaccgtggcccccgacagcagccagggccccatcgtggtgaaccaggaccccatcacccagagcatcttcaacgagagcgtgatcgagccccaggccctgaacgacgtggacggcgaggaggagggcaccgtgaacagccagagcggcgagagcgagaacgagaacgagctggacaacagcctgaacagccagagcaacaccaacaccgacagattcctgcagcagctgaccgaggagaacttcgagctgatcagcaagctgtggaccgacatccagcagaagatcgccacccagagccagatcaccccccccggcacccccagcagcgccctgagcagcggcgagcagagagccgccctgaacgccaccaacgccgtgaagagactgcagaccagactgcagcccgaggagagcaccgagaccctggacagcagctacgtggtgggccacgtgctgaacagcagaaagcagaagcagctgctgaacaaggtgaagagaaagcccaacctgcacgccctgagcaagcccaagaagaacatcagcagcggcagcaccaccagcgccgacctgcccaacagaaccaacagcaacctggacgtgctgaagcacatgatccacgaggtggagcacgagatggaggagtacgagagatggaccggcagagaggtgaagggcctgcagagcagccagggcctgaccggcttcaccctgagcctggtgagcagcctgtgcagactggtgagatacctgaaggagagcgagatccagctgagaaaggaggtggagaccagacagcagctggagcaggtgctgggcgaccacagagagctgatcgacgccctgaccgccgagatcctgagactgagagaggagaacgccgccacccaggccagactgcagcagtacatggtgaccaccgacgagcagctgatcagcctgacccacgccatcaagaactgccccgtgatcaacaacagacaggagatccaggccagcgagagcggcgccaccggcagaagagtgatggacagccccgagagacccgtggtgaacgccaacgtgagcgtgcccctgatgttcagagaggaggtggccgagttcccccaggaggagctgcccgtgaagctgagccaggtgcccgacccccccgacaacatgaacctggccaagaacttccccgcccacatcttcgagcccgccgtgctgctgaccccccccagacagaagagcaacctgaagttcagccccctgcaggacgtgctgagaagaaccgtgcagaccagacccgcccccagactgccccccaccgtggagatcatcgagaaggagcagaactgggaggagaagaccctgcccatcgacaccgacatccagaacagcagcgaggagaacagactgttcacccagagatggagagtgagccacatgggcgaggacctggagaacaagacccaggcccccttcgtgaacctgagccagcccctgtgcaacagccacagcaacacccagcagagcagaagccccaccttcagcgaggagctgcccgtgctgggcgacggccagcagctgagaaccaacgagagcctgatccagagaaaggacatcatgaccagaatcgccgacctgaccctgcagaacagcgccatcaaggcccacatgaacaacatcatcgagcccagaggcgagcagggcgacggcctgagagagctgaacaagcaggagagcgccagcgacatgaccagcaccttccccgtggcccagagcctgacccccggcagcatggaggagagaatcgccgagctgaacagacagagcatggaggccagaggcaagctgctgcagctgatcgagcagcagaagctggtgggcctgaacctgagcccccccatgagccccgtgcagctgcccctgagagcctggaccgagggcgccaagagaaccatcgaggtgagcatccccggcgccgaggcccccgagagcagcaagtgcagcaccgtgagccccgtgagcggcatcaacaccagaagaagcagcggcgccaccggcaacagctgcagccccctgaacgccaccagcggcagcggcagattcacccccctgaaccccagagccaagatcgagaagcagaacgaggagggctggttcgccctgagcacccacgtgagctag

SEQ ID NO: 100697 - DNA, 483 bp, synthetic construct
  misc_feature 1..483: note = Description of Artificial Sequence: Synthetic coding sequence
  source 1..483: mol_type = other DNA
atgagcttcgtgagagtgaacagatgcggccccagagtgggcgtgagaaagacccccaaggtgaagaagaagaagaccagcgtgaagcaggagtgggacaacaccgtgaccgacctgaccgtgcacagagccacccccgaggacctggtgagaagacacgagatccacaagagcaagaacagagccctggtgcactgggagctgcaggagaaggccctgaagagaaagtggagaaagcagaagcccgagaccctgaacctggagaagagaagactgagcatcatgaaggagatcctgagcgaccagtaccagatgcaggacgtgctggagaagagcgaccacctgatcgccgccgccaaggagctgttccccagaagaagaaccggcttccccaacgtgaccgtggcccccgacagcagccagggccccatcgtggtgaaccaggaccccatcacccagagcatcttcaacgagagcgtgtag

SEQ ID NO: 100698 - DNA, 522 bp, synthetic construct
  misc_feature 1..522: note = Description of Artificial Sequence: Synthetic coding sequence
  source 1..522: mol_type = other DNA
atgagcttcgtgagagtgaacagatgcggccccagagtgggcgtgagaaagacccccaaggtgaagaagaagaagaccagcgtgaagcaggagtgggacaacaccgtgaccgacctgaccgtgcacagagccacccccgaggacctggtgagaagacacgagatccacaagagcaagaacagagccctggtgcactgggagctgcaggagaaggccctgaagagaaagtggagaaagcagaagcccgagaccctgaacctggagaagagaagactgagcatcatgaaggagatcctgagcgaccagtaccagatgcaggacgtgctggagaagagcgaccacctgatcgccgccgccaaggagctgttccccagaagaagaaccggcttccccaacgtgaccgtggcccccgacagcagccagggccccatcgtggtgaaccaggaccccatcacccagagcatcttcaacgagagcgtgatcgagccccaggccctgaacgacgtggacggcgaggagtag

SEQ ID NO: 100699 - DNA, 60 bp, synthetic construct
  misc_feature 1..60: note = Description of Artificial Sequence: Synthetic coding sequence
  source 1..60: mol_type = other DNA
atgagcttcgtgagagtgaacagatgcggccccagagtgggcgtgagaaagaccccctag

SEQ ID NO: 100700 - DNA, 789 bp, synthetic construct
  misc_feature 1..789: note = Description of Artificial Sequence: Synthetic coding sequence
  source 1..789: mol_type = other DNA
atgaagacccccttcggcaagacccccggccagagaagcagagccgacgccggccacgccggcgtgagcgccaacatgatgaagaagagaaccagccacaagaagcacagaagcagcgtgggccccagcaagcccgtgagccagcccagaagaaacatcgtgggctgcagaatccagcacggctggaaggagggcaacggccccgtgacccagtggaagggcaccgtgctggaccaggtgcccgtgaaccccagcctgtacctgatcaagtacgacggcttcgactgcgtgtacggcctggagctgaacaaggacgagagagtgagcgccctggaggtgctgcccgacagagtggccaccagcagaatcagcgacgcccacctggccgacaccatgatcggcaaggccgtggagcacatgttcgagaccgaggacggcagcaaggacgagtggagaggcatggtgctggccagagcccccgtgatgaacacctggttctacatcacctacgagaaggaccccgtgctgtacatgtaccagctgctggacgactacaaggagggcgacctgagaatcatgcccgacagcaacgacagcccccccgccgagagagagcccggcgaggtggtggacagcctggtgggcaagcaggtggagtacgccaaggaggacggcagcaagagaaccggcatggtgatccaccaggtggaggccaagcccagcgtgtacttcatcaagttcgacgacgacttccacatctacgtgtacgacctggtgaagaccagctag

SEQ ID NO: 100701 - DNA, 789 bp, synthetic construct; identical to SEQ ID NO: 100700
  misc_feature 1..789: note = Description of Artificial Sequence: Synthetic coding sequence
  source 1..789: mol_type = other DNA

SEQ ID NO: 100702 - DNA, 1587 bp, synthetic construct
  misc_feature 1..1587: note = Description of Artificial Sequence: Synthetic coding sequence
  source 1..1587: mol_type = other DNA
atggccggcagcgacaccgcccccttcctgagccaggccgacgaccccgacgacggccccgtgcccggcacccccggcctgcccggcagcaccggcaaccccaagagcgaggagcccgaggtgcccgaccaggagggcctgcagagaatcaccggcctgagccccggcagaagcgccctgatcgtggccgtgctgtgctacatcaacctgctgaactacatggacagattcaccgtggccggcgtgctgcccgacatcgagcagttcttcaacatcggcgacagcagcagcggcctgatccagaccgtgttcatcagcagctacatggtgctggcccccgtgttcggctacctgggcgacagatacaacagaaagtacctgatgtgcggcggcatcgccttctggagcctggtgaccctgggcagcagcttcatccccggcgagcacttctggctgctgctgctgaccagaggcctggtgggcgtgggcgaggccagctacagcaccatcgcccccaccctgatcgccgacctgttcgtggccgaccagagaagcagaatgctgagcatcttctacttcgccatccccgtgggcagcggcctgggctacatcgccggcagcaaggtgaaggacatggccggcgactggcactgggccctgagagtgacccccggcctgggcgtggtggccgtgctgctgctgttcctggtggtgagagagccccccagaggcgccgtggagagacacagcgacctgccccccctgaaccccaccagctggtgggccgacctgagagccctggccagaaaccccagcttcgtgctgagcagcctgggcttcaccgccgtggccttcgtgaccggcagcctggccctgtgggcccccgccttcctgctgagaagcagagtggtgctgggcgagacccccccctgcctgcccggcgacagctgcagcagcagcgacagcctgatcttcggcctgatcacctgcctgaccggcgtgctgggcgtgggcctgggcgtggagatcagcagaagactgagacacagcaaccccagagccgaccccctggtgtgcgccaccggcctgctgggcagcgcccccttcctgttcctgagcctggcctgcgccagaggcagcatcgtggccacctacatcttcatcttcatcggcgagaccctgctgagcatgaactgggccatcgtggccgacatcctgctgtacgtggtgatccccaccagaagaagcaccgccgaggccttccagatcgtgctgagccacctgctgggcgacgccggcagcccctacctgatcggcctgatcagcgacagactgagaagaaactggccccccagcttcctgagcgagttcagagccctgcagttcagcctgatgctgtgcgccttcgtgggcgccctgggcggcgccgccttcctgggcaccgccatcttcatcgaggccgacagaagaagagcccagctgcacgtgcagggcctgctgcacgaggccggcagcaccgacgacagaatcgtggtgccccagagaggcagaagcaccagagtgcccgtggccagcgtgctgatctag

SEQ ID NO: 100703 - DNA, 1368 bp, synthetic construct
  misc_feature 1..1368: note = Description of Artificial Sequence: Synthetic coding sequence
  source 1..1368: mol_type = other DNA
atggacagattcaccgtggccggcgtgctgcccgacatcgagcagttcttcaacatcggcgacagcagcagcggcctgatccagaccgtgttcatcagcagctacatggtgctggcccccgtgttcggctacctgggcgacagatacaacagaaagtacctgatgtgcggcggcatcgccttctggagcctggtgaccctgggcagcagcttcatccccggcgagcacttctggctgctgctgctgaccagaggcctggtgggcgtgggcgaggccagctacagcaccatcgcccccaccctgatcgccgacctgttcgtggccgaccagagaagcagaatgctgagcatcttctacttcgccatccccgtgggcagcggcctgggctacatcgccggcagcaaggtgaaggacatggccggcgactggcactgggccctgagagtgacccccggcctgggcgtggtggccgtgctgctgctgttcctggtggtgagagagccccccagaggcgccgtggagagacacagcgacctgccccccctgaaccccaccagctggtgggccgacctgagagccctggccagaaaccccagcttcgtgctgagcagcctgggcttcaccgccgtggccttcgtgaccggcagcctggccctgtgggcccccgccttcctgctgagaagcagagtggtgctgggcgagacccccccctgcctgcccggcgacagctgcagcagcagcgacagcctgatcttcggcctgatcacctgcctgaccggcgtgctgggcgtgggcctgggcgtggagatcagcagaagactgagacacagcaaccccagagccgaccccctggtgtgcgccaccggcctgctgggcagcgcccccttcctgttcctgagcctggcctgcgccagaggcagcatcgtggccacctacatcttcatcttcatcggcgagaccctgctgagcatgaactgggccatcgtggccgacatcctgctgtacgtggtgatccccaccagaagaagcaccgccgaggccttccagatcgtgctgagccacctgctgggcgacgccggcagcccctacctgatcggcctgatcagcgacagactgagaagaaactggccccccagcttcctgagcgagttcagagccctgcagttcagcctgatgctgtgcgccttcgtgggcgccctgggcggcgccgccttcctgggcaccgccatcttcatcgaggccgacagaagaagagcccagctgcacgtgcagggcctgctgcacgaggccggcagcaccgacgacagaatcgtggtgccccagagaggcagaagcaccagagtgcccgtggccagcgtgctgatctag

SEQ ID NO: 100704 - DNA, 1431 bp, synthetic construct
  misc_feature 1..1431: note = Description of Artificial Sequence: Synthetic coding sequence
  source 1..1431: mol_type = other DNA
atggccggcagcgacaccgcccccttcctgagccaggccgacgaccccgacgacggccccgtgcccggcacccccggcctgcccggcagcaccggcaaccccaagagcgaggagcccgaggtgcccgaccaggagggcctgcagagaatcaccggcctgagccccggcagaagcgccctgatcgtggccgtgctgtgctacatcaacctgctgaactacatggacagattcaccgtggccggcgtgctgcccgacatcgagcagttcttcaacatcggcgacagcagcagcggcctgatccagaccgtgttcatcagcagctacatggtgctggcccccgtgttcggctacctgggcgacagatacaacagaaagtacctgatgtgcggcggcatcgccttctggagcctggtgaccctgggcagcagcttcatccccggcgagcacttctggctgctgctgctgaccagaggcctggtgggcgtgggcgaggccagctacagcaccatcgcccccaccctgatcgccgacctgttcgtggccgaccagagaagcagaatgctgagcatcttctacttcgccatccccgtgggcagcggcctgggctacatcgccggcagcaaggtgaaggacatggccggcgactggcactgggccctgagagtgacccccggcctgggcgtggtggccgtgctgctgctgttcctggtggtgagagagccccccagaggcgccgtggagagacacagcgacctgccccccctgaaccccaccagctggtgggccgacctgagagccctggccagaaacctgatcttcggcctgatcacctgcctgaccggcgtgctgggcgtgggcctgggcgtggagatcagcagaagactgagacacagcaaccccagagccgaccccctggtgtgcgccaccggcctgctgggcagcgcccccttcctgttcctgagcctggcctgcgccagaggcagcatcgtggccacctacatcttcatcttcatcggcgagaccctgctgagcatgaactgggccatcgtggccgacatcctgctgtacgtggtgatccccaccagaagaagcaccgccgaggccttccagatcgtgctgagccacctgctgggcgacgccggcagcccctacctgatcggcctgatcagcgacagactgagaagaaactggccccccagcttcctgagcgagttcagagccctgcagttcagcctgatgctgtgcgccttcgtgggcgccctgggcggcgccgccttcctgggcaccgccatcttcatcgaggccgacagaagaagagcccagctgcacgtgcagggcctgctgcacgaggccggcagcaccgacgacagaatcgtggtgccccagagaggcagaagcaccagagtgcccgtggccagcgtgctgatctag

SEQ ID NO: 100705 - DNA, 1365 bp, synthetic construct
  misc_feature 1..1365: note = Description of Artificial Sequence: Synthetic coding sequence
  source 1..1365: mol_type = other DNA
atggccggcagcgacaccgcccccttcctgagccaggccgacgaccccgacgacggccccgtgcccggcacccccggcctgcccggcagcaccggcaaccccaagagcgaggagcccgaggtgcccgaccaggagggcctgcagagaatcaccggcctgagccccggcagaagcgccctgatcgtggccgtgctgtgctacatcaacctgctgaactacatggacagattcaccgtggccgtgttcatcagcagctacatggtgctggcccccgtgttcggctacctgggcgacagatacaacagaaagtacctgatgtgcggcggcatcgccttctggagcctggtgaccctgggcagcagcttcatccccggcgagcacttctggctgctgctgctgaccagaggcctggtgggcgtgggcgaggccagctacagcaccatcgcccccaccctgatcgccgacctgttcgtggccgaccagagaagcagaatgctgagcatcttctacttcgccatccccgtgggcagcggcctgggctacatcgccggcagcaaggtgaaggacatggccggcgactggcactgggccctgagagtgacccccggcctgggcgtggtggccgtgctgctgctgttcctggtggtgagagagccccccagaggcgccgtggagagacacagcgacctgccccccctgaaccccaccagctggtgggccgacctgagagccctggccagaaacctgatcttcggcctgatcacctgcctgaccggcgtgctgggcgtgggcctgggcgtggagatcagcagaagactgagacacagcaaccccagagccgaccccctggtgtgcgccaccggcctgctgggcagcgcccccttcctgttcctgagcctggcctgcgccagaggcagcatcgtggccacctacatcttcatcttcatcggcgagaccctgctgagcatgaactgggccatcgtggccgacatcctgctgtacgtggtgatccccaccagaagaagcaccgccgaggccttccagatcgtgctgagccacctgctgggcgacgccggcagcccctacctgatcggcctgatcagcgacagactgagaagaaactggccccccagcttcctgagcgagttcagagccctgcagttcagcctgatgctgtgcgccttcgtgggcgccctgggcggcgccgccttcctgggcaccgccatcttcatcgaggccgacagaagaagagcccagctgcacgtgcagggcctgctgcacgaggccggcagcaccgacgacagaatcgtggtgccccagagaggcagaagcaccagagtgcccgtggccagcgtgctgatctag

SEQ ID NO: 100706 - DNA, 1650 bp, synthetic construct
  misc_feature 1..1650: note = Description of Artificial Sequence: Synthetic coding sequence
  source 1..1650: mol_type = other DNA
atgatgtgcctggagtgcgccagcgccgccgccggcggcgccgaggaggaggaggccgacgccgagagaagaagaagaagaagaggcgcccagagaggcgccggcggcagcggctgctgcggcgccagaggcgccggcggcgccggcgtgagcgccgccggcgacgaggtgcagaccctgagcggcagcgtgagaagagcccccaccggcccccccggcacccccggcacccccggctgcgccgccaccgccaagggccccggcgcccagcagcccaagcccgccagcctgggcagaggcagaggcgccgccgccgccatcctgagcctgggcaacgtgctgaactacctggacagatacaccgtggccggcgtgctgctggacatccagcagcacttcggcgtgaaggacagaggcgccggcctgctgcagagcgtgttcatctgcagcttcatggtggccgcccccatcttcggctacctgggcgacagattcaacagaaaggtgatcctgagctgcggcatcttcttctggagcgccgtgaccttcagcagcagcttcatcccccagcagtacttctggctgctggtgctgagcagaggcctggtgggcatcggcgaggccagctacagcaccatcgcccccaccatcatcggcgacctgttcaccaagaacaccagaaccctgatgctgagcgtgttctacttcgccatccccctgggcagcggcctgggctacatcaccggcagcagcgtgaagcaggccgccggcgactggcactgggccctgagagtgagccccgtgctgggcatgatcaccggcaccctgatcctgatcctggtgcccgccaccaagagaggccacgccgaccagctgggcgaccagctgaaggccagaaccagctggctgagagacatgaaggccctgatcagaaacagaagctacgtgttcagcagcctggccaccagcgccgtgagcttcgccaccggcgccctgggcatgtggatccccctgtacctgcacagagcccaggtggtgcagaagaccgccgagacctgcaacagccccccctgcggcgccaaggacagcctgatcttcggcgccatcacctgcttcaccggcttcctgggcgtggtgaccggcgccggcgccaccagatggtgcagactgaagacccagagagccgaccccctggtgtgcgccgtgggcatgctgggcagcgccatcttcatctgcctgatcttcgtggccgccaagagcagcatcgtgggcgcctacatctgcatcttcgtgggcgagaccctgctgttcagcaactgggccatcaccgccgacatcctgatgtacgtggtgatccccaccagaagagccaccgccgtggccctgcagagcttcaccagccacctgctgggcgacgccggcagcccctacctgatcggcttcatcagcgacctgatcagacagagcaccaaggacagccccctgtgggagttcctgagcctgggctacgccctgatgctgtgccccttcgtggtggtgctgggcggcatgttcttcctggccaccgccctgttcttcgtgagcgacagagccagagccgagcagcaggtgaaccagctggccatgccccccgccagcgtgaaggtgtag

SEQ ID NO: 100707 - DNA, 1158 bp, synthetic construct
  misc_feature 1..1158: note = Description of Artificial Sequence: Synthetic coding sequence
  source 1..1158: mol_type = other DNA
atgctggtgtgcttcagactgtacagctggctgttcttcctgagcagaggcatcgtgggcaccggcagcgccagctacagcaccatcgcccccaccgtgctgggcgacctgttcgtgagagaccagagaaccagagtgctggccgtgttctacatcttcatccccgtgggcagcggcctgggctacgtgctgggcagcgccgtgaccatgctgaccggcaactggagatgggccctgagagtgatgccctgcctggaggccgtggccctgatcctgctgatcctgctggtgcccgacccccccagaggcgccgccgagacccagggcgagggcgccgtgggcggcttcagaagcagctggtgcgaggacgtgagatacctgggcaagaactggagcttcgtgtggagcaccctgggcgtgaccgccatggccttcgtgaccggcgccctgggcttctgggcccccaagttcctgctggaggccagagtggtgcacggcctgcagcccccctgcttccaggagccctgcagcaaccccgacagcctgatcttcggcgccctgaccatcatgaccggcgtgatcggcgtgatcctgggcgccgaggccgccagaagatacaagaaggtgatccccggcgccgagcccctgatctgcgccagcagcctgctggccaccgccccctgcctgtacctggccctggtgctggcccccaccaccctgctggccagctacgtgttcctgggcctgggcgagctgctgctgagctgcaactgggccgtggtggccgacatcctgctgagcgtggtggtgcccagatgcagaggcaccgccgaggccctgcagatcaccgtgggccacatcctgggcgacgccggcagcccctacctgaccggcctgatcagcagcgtgctgagagccagaagacccgacagctacctgcagagattcagaagcctgcagcagagcttcctgtgctgcgccttcgtgatcgccctgggcggcggctgcttcctgctgaccgccctgtacctggagagagacgagaccagagcctggcagcccgtgaccggcacccccgacagcaacgacgtggacagcaacgacctggagagacagggcctgctgagcggcgccggcgccagcaccgaggagccctag

SEQ ID NO: 100708 - DNA, 1539 bp, synthetic construct
  misc_feature 1..1539: note = Description of Artificial Sequence: Synthetic coding sequence
  source 1..1539: mol_type = other DNA
atggccggcggcatgagcgccgagtgccccgagcccggccccggcggcctgcagggccagagccccggccccggcagacagtgccccccccccatcacccccaccagctggagcctgcccccctggagagcctacgtggccgccgccgtgctgtgctacatcaacctgctgaactacatgaactggttcatcatcgccggcgtgctgctggacatccaggaggtgttccagatcagcgacaaccacgccggcctgctgcagaccgtgttcgtgagctgcctgctgctgagcgcccccgtgttcggctacctgggcgacagacacagcagaaaggccaccatgagcttcggcatcctgctgtggagcggcgccggcctgagcagcagcttcatcagccccagatacagctggctgttcttcctgagcagaggcatcgtgggcaccggcagcgccagctacagcaccatcgcccccaccgtgctgggcgacctgttcgtgagagaccagagaaccagagtgctggccgtgttctacatcttcatccccgtgggcagcggcctgggctacgtgctgggcagcgccgtgaccatgctgaccggcaactggagatgggccctgagagtgatgccctgcctggaggccgtggccctgatcctgctgatcctgctggtgcccgacccccccagaggcgccgccgagacccagggcgagggcgccgtgggcggcttcagaagcagctggtgcgaggacgtgagatacctgggcaagaactggagcttcgtgtggagcaccctgggcgtgaccgccatggccttcgtgaccggcgccctgggcttctgggcccccaagttcctgctggaggccagagtggtgcacggcctgcagcccccctgcttccaggagccctgcagcaaccccgacagcctgatcttcggcgccctgaccatcatgaccggcgtgatcggcgtgatcctgggcgccgaggccgccagaagatacaagaaggtgatccccggcgccgagcccctgatctgcgccagcagcctgctggccaccgccccctgcctgtacctggccctggtgctggcccccaccaccctgctggccagctacgtgttcctgggcctgggcgagctgctgctgagctgcaactgggccgtggtggccgacatcctgctgagcgtggtggtgcccagatgcagaggcaccgccgaggccctgcagatcaccgtgggccacatcctgggcgacgccggcagcccctacctgaccggcctgatcagcagcgtgctgagagccagaagacccgacagctacctgcagagattcagaagcctgcagcagagcttcctgtgctgcgccttcgtgatcgccctgggcggcggctgcttcctgctgaccgccctgtacctggagagagacgagaccagagcctggcagcccgtgaccggcacccccgacagcaacgacgtggacagcaacgacctggagagacagggcctgctgagcggcgccggcgccagcaccgaggagccctag

SEQ ID NO: 100709 - DNA, 249 bp, synthetic construct
  misc_feature 1..249: note = Description of Artificial Sequence: Synthetic coding sequence
  source 1..249: mol_type = other DNA
atgggccagaccgccctggccggcggcagcagcagcacccccaccccccaggccctgtaccccgacctgagctgccccgagggcctggaggagctgctgagcgcccccccccccgacctgggcgcccagagaagacacggctggaaccccaaggactgcagcgagaacatcgaggtgaaggagggcggcctgtacttcgagagaagacccgtggcccagagcaccgacggcgccagaggcaagagatag

SEQ ID NO: 100710 - DNA, 792 bp, synthetic construct
  misc_feature 1..792: note = Description of Artificial Sequence: Synthetic coding sequence
  source 1..792: mol_type = other DNA
atgggccagaccgccctggccggcggcagcagcagcacccccaccccccaggccctgtaccccgacctgagctgccccgagggcctggaggagctgctgagcgcccccccccccgacctgggcgcccagagaagacacggctggaaccccaaggactgcagcgagaacatcgaggtgaaggagggcggcctgtacttcgagagaagacccgtggcccagagcaccgacggcgccagaggcaagagaggctacagcagaggcctgcacgcctgggagatcagctggcccctggagcagagaggcacccacgccgtggtgggcgtggccaccgccctggcccccctgcagaccgaccactacgccgccctgctgggcagcaacagcgagagctggggctgggacatcggcagaggcaagctgtaccaccagagcaagggccccggcgccccccagtaccccgccggcacccagggcgagcagctggaggtgcccgagagactgctggtggtgctggacatggaggagggcaccctgggctacgccatcggcggcacctacctgggccccgccttcagaggcctgaagggcagaaccctgtaccccgccgtgagcgccgtgtggggccagtgccaggtgagaatcagatacctgggcgagagaagagccgagccccacagcctgctgcacctgagcagactgtgcgtgagacacaacctgggcgacaccagactgggccaggtgagcgccctgcccctgccccccgccatgaagagatacctgctgtaccagtag

SEQ ID NO: 100711 - DNA, 792 bp, synthetic construct; identical to SEQ ID NO: 100710
  misc_feature 1..792: note = Description of Artificial Sequence: Synthetic coding sequence
  source 1..792: mol_type = other DNA

SEQ ID NO: 100712 - DNA, 1068 bp, synthetic construct
  misc_feature 1..1068: note = Description of Artificial Sequence: Synthetic coding sequence
  source 1..1068: mol_type = other DNA
atggccagaagacccagaaacagcagagcctggcacttcgtgctgagcgccgccagaagagacgccgacgccagagccgtggccctggccggcagcaccaactggggctacgacagcgacggccagcacagcgacagcgacagcgaccccgagtacagcaccctgccccccagcatccccagcgccgtgcccgtgaccggcgagagcttctgcgactgcgccggccagagcgaggccagcttctgcagcagcctgcacagcgcccacagaggcagagactgcagatgcggcgaggaggacgagtacttcgactgggtgtgggacgacctgaacaagagcagcgccaccctgctgagctgcgacaacagaaaggtgagcttccacatggagtacagctgcggcaccgccgccatcagaggcaccaaggagctgggcgagggccagcacttctgggagatcaagatgaccagccccgtgtacggcaccgacatgatggtgggcatcggcaccagcgacgtggacctggacaagtacagacacaccttctgcagcctgctgggcagagacgaggacagctggggcctgagctacaccggcctgctgcaccacaagggcgacaagaccagcttcagcagcagattcggccagggcagcatcatcggcgtgcacctggacacctggcacggcaccctgaccttcttcaagaacagaaagtgcatcggcgtggccgccaccaagctgcagaacaagagattctaccccatggtgtgcagcaccgccgccagaagcagcatgaaggtgaccagaagctgcgccagcgccaccagcctgcagtacctgtgctgccacagactgagacagctgagacccgacagcggcgacaccctggagggcctgcccctgccccccggcctgaagcaggtgctgcacaacaagctgggctgggtgctgagcatgagctgcagcagaagaaaggcccccgtgagcgacccccaggccgccaccagcgcccaccccagcagcagagagcccagaccctgccagagaaagagatgcagaagaacctag

SEQ ID NO: 100713 - DNA, 480 bp, synthetic construct
  misc_feature 1..480: note = Description of Artificial Sequence: Synthetic coding sequence
  source 1..480: mol_type = other DNA
atggagtacagctgcggcaccgccgccatcagaggcaccaaggagctgggcgagggccagcacttctgggagatcaagatgaccagccccgtgtacggcaccctgaccttcttcaagaacagaaagtgcatcggcgtggccgccaccaagctgcagaacaagagattctaccccatggtgtgcagcaccgccgccagaagcagcatgaaggtgaccagaagctgcgccagcgccaccagcctgcagtacctgtgctgccacagactgagacagctgagacccgacagcggcgacaccctggagggcctgcccctgccccccggcctgaagcaggtgctgcacaacaagctgggctgggtgctgagcatgagctgcagcagaagaaaggcccccgtgagcgacccccaggccgccaccagcgcccaccccagcagcagagagcccagaccctgccagagaaagagatgcagaagaacctag

SEQ ID NO: 100714 - DNA, 1068 bp, synthetic construct; identical to SEQ ID NO: 100712
  misc_feature 1..1068: note = Description of Artificial Sequence: Synthetic coding sequence
  source 1..1068: mol_type = other DNA

SEQ ID NO: 100715 - DNA, 822 bp, synthetic construct
  misc_feature 1..822: note = Description of Artificial Sequence: Synthetic coding sequence
  source 1..822: mol_type = other DNA
atgggccagaagctgagcggcagcctgaagagcgtggaggtgagagagcccgccctgagacccgccaagagagagctgagaggcgccgagcccggcagacccgccagactggaccagctgctggacatgcccgccgccggcctggccgtgcagctgagacacgcctggaaccccgaggacagaagcctgaacgtgttcgtgaaggacgacgacagactgaccttccacagacaccccgtggcccagagcaccgacggcatcagaggcaaggtgggccacgccagaggcctgcacgcctggcagatcaactggcccgccagacagagaggcacccacgccgtggtgggcgtggccaccgccagagcccccctgcacagcgtgggctacaccgccctggtgggcagcgacgccgagagctggggctgggacctgggcagaagcagactgtaccacgacggcaagaaccagcccggcgtggcctaccccgccttcctgggccccgacgaggccttcgccctgcccgacagcctgctggtggtgctggacatggacgagggcaccctgagcttcatcgtggacggccagtacctgggcgtggccttcagaggcctgaagggcaagaagctgtaccccgtggtgagcgccgtgtggggccactgcgaggtgaccatgagatacatcaacggcctggaccccgagcccctgcccctgatggacctgtgcagaagaagcatcagaagcgccctgggcagacagagactgcaggacatcagcagcctgcccctgccccagagcctgaagaactacctgcagtaccagtag

SEQ ID NO: 100716 - DNA, 1908 bp, synthetic construct
  misc_feature 1..1908: note = Description of Artificial Sequence: Synthetic coding sequence
  source 1..1908: mol_type = other DNA
atggccagcagcggcatggccgacagcgccaaccacctgcccttcttcttcggcaacatcaccagagaggaggccgaggactacctggtgcagggcggcatgagcgacggcctgtacctgctgagacagagcagaaactacctgggcggcttcgccctgagcgtggcccacggcagaaaggcccaccactacaccatcgagagagagctgaacggcacctacgccatcgccggcggcagaacccacgccagccccgccgacctgtgccactaccacagccaggagagcgacggcctggtgtgcctgctgaagaagcccttcaacagaccccagggcgtgcagcccaagaccggccccttcgaggacctgaaggagaacctgatcagagagtacgtgaagcagacctggaacctgcagggccaggccctggagcaggccatcatcagccagaagccccagctggagaagctgatcgccaccaccgcccacgagaagatgccctggttccacggcaagatcagcagagaggagagcgagcagatcgtgctgatcggcagcaagaccaacggcaagttcctgatcagagccagagacaacaacggcagctacgccctgtgcctgctgcacgagggcaaggtgctgcactacagaatcgacaaggacaagaccggcaagctgagcatccccgagggcaagaagttcgacaccctgtggcagctggtggagcactacagctacaaggccgacggcctgctgagagtgctgaccgtgccctgccagaagatcggcacccagggcaacgtgaacttcggcggcagaccccagctgcccggcagccaccccgccacctggagcgccggcggcatcatcagcagaatcaagagctacagcttccccaagcccggccacagaaagagcagccccgcccagggcaacagacaggagagcaccgtgagcttcaacccctacgagcccgagctggccccctgggccgccgacaagggcccccagagagaggccctgcccatggacaccgaggtgtacgagagcccctacgccgaccccgaggagatcagacccaaggaggtgtacctggacagaaagctgctgaccctggaggacaaggagctgggcagcggcaacttcggcaccgtgaagaagggctactaccagatgaagaaggtggtgaagaccgtggccgtgaagatcctgaagaacgaggccaacgaccccgccctgaaggacgagctgctggccgaggccaacgtgatgcagcagctggacaacccctacatcgtgagaatgatcggcatctgcgaggccgagagctggatgctggtgatggagatggccgagctgggccccctgaacaagtacctgcagcagaacagacacgtgaaggacaagaacatcatcgagctggtgcaccaggtgagcatgggcatgaagtacctggaggagagcaacttcgtgcacagagacctggccgccagaaacgtgctgctggtgacccagcactacgccaagatcagcgacttcggcctgagcaaggccctgagagccgacgagaactactacaaggcccagacccacggcaagtggcccgtgaagtggtacgcccccgagtgcatcaactactacaagttcagcagcaagagcgacgtgtggagcttcggcgtgctgatgtgggaggccttcagctacggccagaagccctacagaggcatgaagggcagcgaggtgaccgccatgctggagaagggcgagagaatgggctgccccgccggctgccccagagagatgtacgacctgatgaacctgtgctggacctacgacgtggagaacagacccggcttcgccgccgtggagctgagactgagaaactactactacgacgtggtgaactag

SEQ ID NO: 100717 - DNA, 1839 bp, synthetic construct
  misc_feature 1..1839: note = Description of Artificial Sequence: Synthetic coding sequence
  source 1..1839: mol_type = other DNA
atggccagcagcggcatggccgacagcgccaaccacctgcccttcttcttcggcaacatcaccagagaggaggccgaggactacctggtgcagggcggcatgagcgacggcctgtacctgctgagacagagcagaaactacctgggcggcttcgccctgagcgtggcccacggcagaaaggcccaccactacaccatcgagagagagctgaacggcacctacgccatcgccggcggcagaacccacgccagccccgccgacctgtgccactaccacagccaggagagcgacggcctggtgtgcctgctgaagaagcccttcaacagaccccagggcgtgcagcccaagaccggccccttcgaggacctgaaggagaacctgatcagagagtacgtgaagcagacctggaacctgcagggccaggccctggagcaggccatcatcagccagaagccccagctggagaagctgatcgccaccaccgcccacgagaagatgccctggttccacggcaagatcagcagagaggagagcgagcagatcgtgctgatcggcagcaagaccaacggcaagttcctgatcagagccagagacaacaacggcagctacgccctgtgcctgctgcacgagggcaaggtgctgcactacagaatcgacaaggacaagaccggcaagctgagcatccccgagggcaagaagttcgacaccctgtggcagctggtggagcactacagctacaaggccgacggcctgctgagagtgctgaccgtgccctgccagaagatcggcacccagggcaacgtgaacttcggcggcagaccccagctgcccggcagccaccccgccagcagccccgcccagggcaacagacaggagagcaccgtgagcttcaacccctacgagcccgagctggccccctgggccgccgacaagggcccccagagagaggccctgcccatggacaccgaggtgtacgagagcccctacgccgaccccgaggagatcagacccaaggaggtgtacctggacagaaagctgctgaccctggaggacaaggagctgggcagcggcaacttcggcaccgtgaagaagggctactaccagatgaagaaggtggtgaagaccgtggccgtgaagatcctgaagaacgaggccaacgaccccgccctgaaggacgagctgctggccgaggccaacgtgatgcagcagctggacaacccctacatcgtgagaatgatcggcatctgcgaggccgagagctggatgctggtgatggagatggccgagctgggccccctgaacaagtacctgcagcagaacagacacgtgaaggacaagaacatcatcgagctggtgcaccaggtgagcatgggcatgaagtacctggaggagagcaacttcgtgcacagagacctggccgccagaaacgtgctgctggtgacccagcactacgccaagatcagcgacttcggcctgagcaaggccctgagagccgacgagaactactacaaggcccagacccacggcaagtggcccgtgaagtggtacgcccccgagtgcatcaactactacaagttcagcagcaagagcgacgtgtggagcttcggcgtgctgatgtgggaggccttcagctacggccagaagccctacagaggcatgaagggcagcgaggtgaccgccatgctggagaagggcgagagaatgggctgccccgccggctgccccagagagatgtacgacctgatgaacctgtgctggacctacgacgtggagaacagacccggcttcgccgccgtggagctgagactgagaaactactactacgacgtggtgaactag

SEQ ID NO: 100718 - DNA, 1839 bp, synthetic construct; identical to SEQ ID NO: 100717
  misc_feature 1..1839: note = Description of Artificial Sequence: Synthetic coding sequence
  source 1..1839: mol_type = other DNA

SEQ ID NO: 100719 - DNA, 1908 bp, synthetic construct; identical to SEQ ID NO: 100716
  misc_feature 1..1908: note = Description of Artificial Sequence: Synthetic coding sequence
  source 1..1908: mol_type = other DNA

SEQ ID NO: 100720 - DNA, 990 bp, synthetic construct
  misc_feature 1..990: note = Description of Artificial Sequence: Synthetic coding sequence
  source 1..990: mol_type = other DNA
atggtgagcaagagcagatggaagctgctggccatgctggccctggtgctggtggtgatggtgtggtacagcatcagcagagaggacagcttctacttccccatccccgagaagaaggagccctgcctgcagggcgaggccgagagcaaggccagcaagctgttcggcaactacagcagagaccagcccatcttcctgagactggaggactacttctgggtgaagacccccagcgcctacgagctgccctacggcaccaagggcagcgaggacctgctgctgagagtgctggccatcaccagcagcagcatccccaagaacatccagagcctgagatgcagaagatgcgtggtggtgggcaacggccacagactgagaaacagcagcctgggcgacgccatcaacaagtacgacgtggtgatcagactgaacaacgcccccgtggccggctacgagggcgacgtgggcagcaagaccaccatgagactgttctaccccgagagcgcccacttcgaccccaaggtggagaacaaccccgacaccctgctggtgctggtggccttcaaggccatggacttccactggatcgagaccatcctgagcgacaagaagagagtgagaaagggcttctggaagcagccccccctgatctgggacgtgaaccccaagcagatcagaatcctgaaccccttcttcatggagatcgccgccgacaagctgctgagcctgcccatgcagcagcccagaaagatcaagcagaagcccaccaccggcctgctggccatcaccctggccctgcacctgtgcgacctggtgcacatcgccggcttcggctaccccgacgcctacaacaagaagcagaccatccactactacgagcagatcaccctgaagagcatggccggcagcggccacaacgtgagccaggaggccctggccatcaagagaatgctggagatgggcgccatcaagaacctgaccagcttctag

SEQ ID NO: 100721 - DNA, 1917 bp, synthetic construct
  misc_feature 1..1917: note = Description of Artificial Sequence: Synthetic coding sequence
  source 1..1917: mol_type = other DNA
atggccaccggcgccaacgccacccccctggacttccccagcaagaagagaaagagaagcagatggaaccaggacaccatggagcagaagaccgtgatccccggcatgcccaccgtgatcccccccggcctgaccagagagcaggagagagcctacatcgtgcagctgcagatcgaggacctgaccagaaagctgagaaccggcgacctgggcatcccccccaaccccgaggacagaagccccagccccgagcccatctacaacagcgagggcaagagactgaacaccagagagttcagaaccagaaagaagctggaggaggagagacacaacctgatcaccgagatggtggccctgaaccccgacttcaagccccccgccgactacaagccccccgccaccagagtgagcgacaaggtgatgatcccccaggacgagtaccccgagatcaacttcgtgggcctgctgatcggccccagaggcaacaccctgaagaacatcgagaaggagtgcaacgccaagatcatgatcagaggcaagggcagcgtgaaggagggcaaggtgggcagaaaggacggccagatgctgcccggcgaggacgagcccctgcacgccctggtgaccgccaacaccatggagaacgtgaagaaggccgtggagcagatcagaaacatcctgaagcagggcatcgagacccccgaggaccagaacgacctgagaaagatgcagctgagagagctggccagactgaacggcaccctgagagaggacgacaacagaatcctgagaccctggcagagcagcgagaccagaagcatcaccaacaccaccgtgtgcaccaagtgcggcggcgccggccacatcgccagcgactgcaagttccagagacccggcgacccccagagcgcccaggacaaggccagaatggacaaggagtacctgagcctgatggccgagctgggcgaggcccccgtgcccgccagcgtgggcagcaccagcggccccgccaccacccccctggccagcgcccccagacccgccgcccccgccaacaacccccccccccccagcctgatgagcaccacccagagcagacccccctggatgaacagcggccccagcgagagcagaccctaccacggcatgcacggcggcggccccggcggccccggcggcggcccccacagcttcccccaccccctgcccagcctgaccggcggccacggcggccaccccatgcagcacaaccccaacggccccccccccccctggatgcagcccccccccccccccatgaaccagggcccccacccccccggccaccacggccccccccccatggaccagtacctgggcagcacccccgtgggcagcggcgtgtacagactgcaccagggcaagggcatgatgccccccccccccatgggcatgatgcccccccccccccccccccccagcggccagcccccccccccccccagcggccccctgcccccctggcagcagcagcagcagcagcccccccccccccccccccccagcagcagcatggccagcagcacccccctgccctggcagcagaacaccaccaccaccaccaccagcgccggcaccggcagcatccccccctggcagcagcagcaggccgccgccgccgccagccccggcgccccccagatgcagggcaaccccaccatggtgcccctgccccccggcgtgcagccccccctgccccccggcgcccccccccccccccccccccccccccccggcagcgccggcatgatgatcccccccagaggcggcgacggccccagccacgagagcgaggacttccccagacccctggtgaccctgcccggcagacagccccagcagagaccctggtggaccggctggttcggcaaggccgcctag

SEQ ID NO: 100722 - DNA, 1920 bp, synthetic construct
  misc_feature 1..1920: note = Description of Artificial Sequence: Synthetic coding sequence
  source 1..1920: mol_type = other DNA
atggccaccggcgccaacgccacccccctggacttccccagcaagaagagaaagagaagcagatggaaccaggacaccatggagcagaagaccgtgatccccggcatgcccaccgtgatcccccccggcctgaccagagagcaggagagagcctacatcgtgcagctgcagatcgaggacctgaccagaaagctgagaaccggcgacctgggcatcccccccaaccccgaggacagaagccccagccccgagcccatctacaacagcgagggcaagagactgaacaccagagagttcagaaccagaaagaagctggaggaggagagacacaacctgatcaccgagatggtggccctgaaccccgacttcaagccccccgccgactacaagccccccgccaccagagtgagcgacaaggtgatgatcccccaggacgagtaccccgagatcaacttcgtgggcctgctgatcggccccagaggcaacaccctgaagaacatcgagaaggagtgcaacgccaagatcatgatcagaggcaagggcagcgtgaaggagggcaaggtgggcagaaaggacggccagatgctgcccggcgaggacgagcccctgcacgccctggtgaccgccaacaccatggagaacgtgaagaaggccgtggagcagatcagaaacatcctgaagcagggcatcgagacccccgaggaccagaacgacctgagaaagatgcagctgagagagctggccagactgaacggcaccctgagagaggacgacaacagaatcctgagaccctggcagagcagcgagaccagaagcatcaccaacaccaccgtgtgcaccaagtgcggcggcgccggccacatcgccagcgactgcaagttccagagacccggcgacccccagagcgcccaggacaaggccagaatggacaaggagtacctgagcctgatggccgagctgggcgaggcccccgtgcccgccagcgtgggcagcaccagcggccccgccaccacccccctggccagcgcccccagacccgccgcccccgccaacaacccccccccccccagcctgatgagcaccacccagagcagacccccctggatgaacagcggccccagcgagagcagaccctaccacggcatgcacggcggcggccccggcggccccggcggcggcccccacagcttcccccaccccctgcccagcctgaccggcggccacggcggccaccccatgcagcacaaccccaacggccccccccccccctggatgcagcccccccccccccccatgaaccagggcccccacccccccggccaccacggccccccccccatggaccagtacctgggcagcacccccgtgggcagcggcgtgtacagactgcaccagggcaagggcatgatgccccccccccccatgggcatgatgcccccccccccccccccccccagcggccagcccccccccccccccagcggccccctgcccccctggcagcagcagcagcagcagcccccccccccccccccccccagcagcagcatggccagcagcacccccctgccctggcagcagaacaccaccaccaccaccaccagcgccggcaccggcagcatccccccctggcagcagcagcaggccgccgccgccgccagccccggcgccccccagatgcagggcaaccccaccatggtgcccctgccccccggcgtgcagccccccctgccccccggcgcccccccccccccccccccccccccccccggcagcgccggcatgatgtacgccccccccccccccccccccccccccatggaccccagcaacttcgtgaccatgatgggcatgggcgtggccggcatgccccccttcggcatgccccccgcccccccccccccccccccccagaactag

SEQ ID NO: 100723 - DNA, 1716 bp, synthetic construct
  misc_feature 1..1716: note = Description of Artificial Sequence: Synthetic coding sequence
  source 1..1716: mol_type = other DNA
atggccaccggcgccaacgccacccccctggacttccccagcaagaagagaaagagaagcagatggaaccaggacaccatggagcagaagaccgtgatccccggcatgcccaccgtgatcccccccggcctgaccagagagcaggagagagcctacatcgtgcagctgcagatcgaggacctgaccagaaagctgagaaccggcgacctgggcatcccccccaaccccgaggacagaagccccagccccgagcccatctacaacagcgagggcaagagactgaacaccagagagttcagaaccagaaagaagctggaggaggagagacacaacctgatcaccgagatggtggccctgaaccccgacttcaagccccccgccgactacaagccccccgccaccagagtgagcgacaaggtgatgatcccccaggacgagtaccccgagatcaacttcgtgggcctgctgatcggccccagaggcaacaccctgaagaacatcgagaaggagtgcaacgccaagatcatgatcagaggcaagggcagcgtgaaggagggcaaggtgggcagaaaggacggccagatgctgcccggcgaggacgagcccctgcacgccctggtgaccgccaacaccatggagaacgtgaagaaggccgtggagcagatcagaaacatcctgaagcagggcatcgagacccccgaggaccagaacgacctgagaaagatgcagctgagagagctggccagactgaacggcaccctgagagaggacgacaacagaatcctgagaccctggcagagcagcgagaccagaagcatcaccaacaccaccgtgtgcaccaagtgcggcggcgccggccacatcgccagcgactgcaagttccagagacccggcgacccccagagcgcccaggacaaggccagaatggacaaggagtacctgagcctgatggccgagctgggcgaggcccccgtgcccgccagcgtgggcagcaccagcggccccgccaccacccccctggccagcgcccccagacccgccgcccccgccaacaacccccccccccccagcctgatgagcaccacccagagcagacccccctggatgaacagcggccccagcgagagcagaccctaccacggcatgcacggcggcggccccggcggccccggcggcggcccccacagcttcccccaccccctgcccagcctgaccggcggccacggcggccaccccatgcagcacaaccccaacggccccccccccccctggatgcagcccccccccccccccatgaaccagggcccccacccccccggccaccacggccccccccccatgggcaagagcgtgcccggcaagtacgcctgcggcctgtggggcctgagccccgccagcagaaagagatacgacgccgccaccacctacggccacgacgccgccgccgccgccgccagccagtgggccgcccccacccccagcctgtggagcagcagccccatggccaccaccgccgccgccgccagcgccacccccagcgcccagcagcagtacggcttccagtaccccctggccatggccgccaagatcccccccagaggcggcgacggccccagccacgagagcgaggacttccccagacccctggtgaccctgcccggcagacagccccagcagagaccctggtggaccggctggttcggcaaggccgcctag

SEQ ID NO: 100724 - DNA, 1302 bp, synthetic construct
  misc_feature 1..1302: note = Description of Artificial Sequence: Synthetic coding sequence
  source 1..1302: mol_type = other DNA
atggtggccctgaaccccgacttcaagccccccgccgactacaagccccccgccaccagagtgagcgacaaggtgatgatcccccaggacgagtaccccgagatcaacttcgtgggcctgctgatcggccccagaggcaacaccctgaagaacatcgagaaggagtgcaacgccaagatcatgatcagaggcaagggcagcgtgaaggagggcaaggtgggcagaaaggacggccagatgctgcccggcgaggacgagcccctgcacgccctggtgaccgccaacaccatggagaacgtgaagaaggccgtggagcagatcagaaacatcctgaagcagggcatcgagacccccgaggaccagaacgacctgagaaagatgcagctgagagagctggccagactgaacggcaccctgagagaggacgacaacagaatcctgagaccctggcagagcagcgagaccagaagcatcaccaacaccaccgtgtgcaccaagtgcggcggcgccggccacatcgccagcgactgcaagttccagagacccggcgacccccagagcgcccaggacaaggccagaatggacaaggagtacctgagcctgatggccgagctgggcgaggcccccgtgcccgccagcgtgggcagcaccagcggccccgccaccacccccctggccagcgcccccagacccgccgcccccgccaacaacccccccccccccagcctgatgagcaccacccagagcagacccccctggatgaacagcggccccagcgagagcagaccctaccacggcatgcacggcggcggccccggcggccccggcggcggcccccacagcttcccccaccccctgcccagcctgaccggcggccacggcggccaccccatgcagcacaaccccaacggccccccccccccctggatgcagcccccccccccccccatgaaccagggcccccacccccccggccaccacggccccccccccatggaccagtacctgggcagcacccccgtgggcagcggcgtgtacagactgcaccagggcaagggcatgatgccccccccccccatgggcatgatgcccccccccccccccccccccagcggccagcccccccccccccccagcggccccctgcccccctggcagcagcagcagcagcagcccccccccccccccccccccagcagcagcatggccagcagcacccccctgccctggcagcagagaagcctgcccgccgccgccatggccagagccatgagagtgagaaccttcagagcccactggtag

SEQ ID NO: 100725 - DNA, 2022 bp, synthetic construct
  misc_feature 1..2022: note = Description of Artificial Sequence: Synthetic coding sequence
  source 1..2022: mol_type = other DNA
atggccaccggcgccaacgccacccccctgggcaagctgggcccccccggcctgccccccctgcccggccccaagggcggcttcgagcccggccccccccccgcccccggccccggcgccggcctgctggcccccggcccccccccccccccccccgtgggcagcatgggcgccctgaccgccgccttccccttcgccgccctgcccccccccccccccccccccccccccccccccccccagcagccccccccccccccccccccccccagccccggcgccagctacccccccccccagccccccccccccccccccctgtaccagagagtgagccccccccagcccccccccccccagccccccagaaaggaccagcagcccggccccgccggcggcggcggcgacttccccagcaagaagagaaagagaagcagatggaaccaggacaccatggagcagaagaccgtgatccccggcatgcccaccgtgatcccccccggcctgaccagagagcaggagagagcctacatcgtgcagctgcagatcgaggacctgaccagaaagctgagaaccggcgacctgggcatcccccccaaccccgaggacagaagccccagccccgagcccatctacaacagcgagggcaagagactgaacaccagagagttcagaaccagaaagaagctggaggaggagagacacaacctgatcaccgagatggtggccctgaaccccgacttcaagccccccgccgactacaagccccccgccaccagagtgagcgacaaggtgatgatcccccaggacgagtaccccgagatcaacttcgtgggcctgctgatcggccccagaggcaacaccctgaagaacatcgagaaggagtgcaacgccaagatcatgatcagaggcaagggcagcgtgaaggagggcaaggtgggcagaaaggacggccagatgctgcccggcgaggacgagcccctgcacgccctggtgaccgccaacaccatggagaacgtgaagaaggccgtggagcagatcagaaacatcctgaagcagggcatcgagacccccgaggaccagaacgacctgagaaagatgcagctgagagagctggccagactgaacggcaccctgagagaggacgacaacagaatcctgagaccctggcagagcagcgagaccagaagcatcaccaacaccaccgtgtgcaccaagtgcggcggcgccggccacatcgccagcgactgcaagttccagagacccggcgacccccagagcgcccaggacaaggccagaatggacaaggagtacctgagcctgatggccgagctgggcgaggcccccgtgcccgccagcgtgggcagcaccagcggccccgccaccacccccctggccagcgcccccagacccgccgcccccgccaacaacccccccccccccagcctgatgagcaccacccagagcagacccccctggatgaacagcggccccagcgagagcagaccctaccacggcatgcacggcggcggccccggcggccccggcggcggcccccacagcttcccccaccccctgcccagcctgaccggcggccacggcggccaccccatgcagcacaaccccaacggccccccccccccctggatgcagcccccccccccccccatgaaccagggcccccacccccccggccaccacggccccccccccatggaccagtacctgggcagcacccccgtgggcagcggcgtgtacagactgcaccagggcaagggcatgatgccccccccccccatgggcatgatgcccccccccccccccccccccagcggccagcccccccccccccccagcggccccctgcccccctggcagcagcagcagcagcagcccccccccccccccccccccagcagcagcatggccagcagcacccccctgccctggcagcagagaagcctgcccgccgccgccatggccagagccatgagagtgagaaccttcagagcccactggtag

SEQ ID NO: 100726 - DNA, 1842 bp, synthetic construct
  misc_feature 1..1842: note = Description of Artificial Sequence: Synthetic coding sequence
  source 1..1842: mol_type = other DNA
atggagcagaagaccgtgatccccggcatgcccaccgtgatcccccccggcctgaccagagagcaggagagagcctacatcgtgcagctgcagatcgaggacctgaccagaaagctgagaaccggcgacctgggcatcccccccaaccccgaggacagaagccccagccccgagcccatctacaacagcgagggcaagagactgaacaccagagagttcagaaccagaaagaagctggaggaggagagacacaacctgatcaccgagatggtggccctgaaccccgacttcaagccccccgccgactacaagccccccgccaccagagtgagcgacaaggtgatgatcccccaggacgagtaccccgagatcaacttcgtgggcctgctgatcggccccagaggcaacaccctgaagaacatcgagaaggagtgcaacgccaagatcatgatcagaggcaagggcagcgtgaaggagggcaaggtgggcagaaaggacggccagatgctgcccggcgaggacgagcccctgcacgccctggtgaccgccaacaccatggagaacgtgaagaaggccgtggagcagatcagaaacatcctgaagcagggcatcgagacccccgaggaccagaacgacctgagaaagatgcagctgagagagctggccagactgaacggcaccctgagagaggacgacaacagaatcctgagaccctggcagagcagcgagaccagaagcatcaccaacaccaccgtgtgcaccaagtgcggcggcgccggccacatcgccagcgactgcaagttccagagacccggcgacccccagagcgcccaggacaaggccagaatggacaaggagtacctgagcctgatggccgagctgggcgaggcccccgtgcccgccagcgtgggcagcaccagcggccccgccaccacccccctggccagcgcccccagacccgccgcccccgccaacaacccccccccccccagcctgatgagcaccacccagagcagacccccctggatgaacagcggccccagcgagagcagaccctaccacggcatgcacggcggcggccccggcggccccggcggcggcccccacagcttcccccaccccctgcccagcctgaccggcggccacggcggccaccccatgcagcacaaccccaacggccccccccccccctggatgcagcccccccccccccccatgaaccagggcccccacccccccggccaccacggccccccccccatggaccagtacctgggcagcacccccgtgggcagcggcgtgtacagactgcaccagggcaagggcatgatgccccccccccccatgggcatgatgcccccccccccccccccccccagcggccagcccccccccccccccagcggccccctgcccccctggcagcagcagcagcagcagcccccccccccccccccccccagcagcagcatggccagcagcacccccctgccctggcagcagaacaccaccaccaccaccaccagcgccggcaccggcagcatccccccctggcagcagcagcaggccgccgccgccgccagccccggcgccccccagatgcagggcaaccccaccatggtgcccctgccccccggcgtgcagccccccctgccccccggcgcccccccccccccccccccccccccccccggcagcgccggcatgatgtacgccccccccccccccccccccccccccatggaccccagcaacttcgtgaccatgatgggcatgggcgtggccggcatgccccccttcggcatgccccccgcccccccccccccccccccccagaactag

SEQ ID NO: 100727 - DNA, 1527 bp, synthetic construct
  misc_feature 1..1527: note = Description of Artificial Sequence: Synthetic coding sequence
  source 1..1527: mol_type = other DNA
atggccaagagcaacggcgagaacggccccagagcccccgccgccggcgagagcctgagcggcaccagagagagcctggcccagggccccgacgccgccaccaccgacgagctgagcagcctgggcagcgacagcgaggccaacggcttcgccgagagaagaatcgacaagttcggcttcatcgtgggcagccagggcgccgagggcgccctggaggaggtgcccctggaggtgctgagacagagagagagcaagtggctggacatgctgaacaactgggacaagtggatggccaagaagcacaagaagatcagactgagatgccagaagggcatcccccccagcctgagaggcagagcctggcagtacctgagcggcggcaaggtgaagctgcagcagaaccccggcaagttcgacgagctggacatgagccccggcgaccccaagtggctggacgtgatcgagagagacctgcacagacagttccccttccacgagatgttcgtgagcagaggcggccacggccagcaggacctgttcagagtgctgaaggcctacaccctgtacagacccgaggagggctactgccaggcccaggcccccatcgccgccgtgctgctgatgcacatgcccgccgagcaggccttctggtgcctggtgcagatctgcgagaagtacctgcccggctactacagcgagaagctggaggccatccagctggacggcgagatcctgttcagcctgctgcagaaggtgagccccgtggcccacaagcacctgagcagacagaagatcgaccccctgctgtacatgaccgagtggttcatgtgcgccttcagcagaaccctgccctggagcagcgtgctgagagtgtgggacatgttcttctgcgagggcgtgaagatcatcttcagagtgggcctggtgctgctgaagcacgccctgggcagccccgagaaggtgaaggcctgccagggccagtacgagaccatcgagagactgagaagcctgagccccaagatcatgcaggaggccttcctggtgcaggaggtggtggagctgcccgtgaccgagagacagatcgagagagagcacctgatccagctgagaagatggcaggagaccagaggcgagctgcagtgcagaagcccccccagactgcacggcgccaaggccatcctggacgccgagcccggccccagacccgccctgcagcccagccccagcatcagactgcccctggacgcccccctgcccggcagcaaggccaagcccaagccccccaagcaggcccagaaggagcagagaaagcagatgaagggcagaggccagctggagaagccccccgcccccaaccaggccatggtggtggccgccgccggcgacgcctgccccccccagcacgtgccccccaaggacagcgcccccaaggacagcgccccccaggacctggccccccaggtgagcgcccaccacagaagccaggagagcctgaccagccaggagagcgaggacacctacctgtag

SEQ ID NO: 100728 - DNA, 2187 bp, synthetic construct
  misc_feature 1..2187: note = Description of Artificial Sequence: Synthetic coding sequence
  source 1..2187: mol_type = other DNA
atgcccgccggccccgtgcaggccgtgcccccccccccccccgtgcccaccgagcccaagcagcccaccgaggaggaggccagcagcaaggaggacagcgcccccagcaagcccgtggtgggcatcatctaccccccccccgaggtgagaaacatcgtggacaagaccgccagcttcgtggccagaaacggccccgagttcgaggccagaatcagacagaacgagatcaacaaccccaagttcaacttcctgaaccccaacgacccctaccacgcctactacagacacaaggtgagcgagttcaaggagggcaaggcccagttcgtggccagaaacggcagacagttcctgacccagctgatgcagaaggagcagagaaactaccagttcgacttcctgagaccccagcacagcctgttcaactacttcaccaagctggtggagcagtacaccaagatcctgatcccccccaagggcctgttcagcaagctgaagaaggaggccgagaaccccagagaggtgctggaccaggtgtgctacagagtggagtgggccaagttccaggagagagagagaaagaaggaggaggaggagaaggagaaggagagagtggcctacgcccagatcgactggcacgacttcgtggtggtggagaccgtggacttccagcccaacgagcagggcaacttccccccccccaccacccccgaggagctgggcgccagaatcctgatccaggagagatacgagaagttcggcgagagcgaggaggtggagatggaggtggagagcgacgaggaggacgacaagcaggagaaggccgaggagccccccagccagctggaccaggacacccaggtgcaggacatggacgagggcagcgacgacgaggaggagggccagaaggtgccccccccccccgagacccccatgcccccccccctgccccccacccccgaccaggtgatcgtgagaaaggactacgaccccaaggccagcaagcccctgccccccgcccccgcccccgacgagtacctggtgagccccatcaccggcgagaagatccccgccagcaagatgcaggagcacatgagaatcggcctgctggaccccagatggctggagcagagagacagaagcatcagagagaagcagagcgacgacgaggtgtacgcccccggcctggacatcgagagcagcctgaagcagctggccgagagaagaaccgacatcttcggcgtggaggagaccgccatcggcaagaagatcggcgaggaggagatccagaagcccgaggagaaggtgacctgggacggccacagcggcagcatggccagaacccagcaggccgcccaggccaacatcaccctgcaggagcagatcgaggccatccacaaggccaagggcctggtgcccgaggacgacaccaaggagaagatcggccccagcaagcccaacgagatcccccagcagccccccccccccagcagcgccaccaacatccccagcagcgccccccccatcaccagcgtgcccagaccccccaccatgcccccccccgtgagaaccaccgtggtgagcgccgtgcccgtgatgcccagaccccccatggccagcgtggtgagactgccccccggcagcgtgatcgcccccatgccccccatcatccacgcccccagaatcaacgtggtgcccatgccccccagcgccccccccatcatggcccccagacccccccccatgatcgtgcccaccgccttcgtgcccgccccccccgtggcccccgtgcccgcccccgcccccatgccccccgtgcacccccccccccccatggaggacgagcccaccagcaagaagctgaagaccgaggacagcctgatgcccgaggaggagttcctgagaagaaacaagggccccgtgagcatcaaggtgcaggtgcccaacatgcaggacaagaccgagtggaagctgaacggccaggtgctggtgttcaccctgcccctgaccgaccaggtgagcgtgatcaaggtgaagatccacgaggccaccggcatgcccgccggcaagcagaagctgcagtacgagggcatcttcatcaaggacagcaacagcctggcctactacaacatggccaacggcgccgtgatccacctggccctgaaggagagaggcggcagaaagaagtag

SEQ ID NO: 100729 - DNA, 2073 bp, synthetic construct
  misc_feature 1..2073: note = Description of Artificial Sequence: Synthetic coding sequence
  source 1..2073: mol_type = other DNA
atgaccctgaccatgcccaccaccgccatccccaaggtgatgcagcagcagcagcagaccacccagcagcagctgccccagaaggtgcaggcccaggtgatccaggagaccatcgtgcccaaggagcccccccccgagttcgagttcatcgccgacccccccagcatcagcgccttcgacctggacgtggtgaagctgaccgcccagttcgtggccagaaacggcagacagttcctgacccagctgatgcagaaggagcagagaaactaccagttcgacttcctgagaccccagcacagcctgttcaactacttcaccaagctggtggagcagtacaccaagatcctgatcccccccaagggcctgttcagcaagctgaagaaggaggccgagaaccccagagaggtgctggaccaggtgtgctacagagtggagtgggccaagttccaggagagagagagaaagaaggaggaggaggagaaggagaaggagagagtggcctacgcccagatcgactggcacgacttcgtggtggtggagaccgtggacttccagcccaacgagcagggcaacttccccccccccaccacccccgaggagctgggcgccagaatcctgatccaggagagatacgagaagttcggcgagagcgaggaggtggagatggaggtggagagcgacgaggaggacgacaagcaggagaaggccgaggagccccccagccagctggaccaggacacccaggtgcaggacatggacgagggcagcgacgacgaggaggagggccagaaggtgccccccccccccgagacccccatgcccccccccctgccccccacccccgaccaggtgatcgtgagaaaggactacgaccccaaggccagcaagcccctgccccccgcccccgcccccgacgagtacctggtgagccccatcaccggcgagaagatccccgccagcaagatgcaggagcacatgagaatcggcctgctggaccccagatggctggagcagagagacagaagcatcagagagaagcagagcgacgacgaggtgtacgcccccggcctggacatcgagagcagcctgaagcagctggccgagagaagaaccgacatcttcggcgtggaggagaccgccatcggcaagaagatcggcgaggaggagatccagaagcccgaggagaaggtgacctgggacggccacagcggcagcatggccagaacccagcaggccgcccaggccaacatcaccctgcaggagcagatcgaggccatccacaaggccaagggcctggtgcccgaggacgacaccaaggagaagatcggccccagcaagcccaacgagatcccccagcagccccccccccccagcagcgccaccaacatccccagcagcgccccccccatcaccagcgtgcccagaccccccaccatgcccccccccgtgagaaccaccgtggtgagcgccgtgcccgtgatgcccagaccccccatggccagcgtggtgagactgccccccggcagcgtgatcgcccccatgccccccatcatccacgcccccagaatcaacgtggtgcccatgccccccagcgccccccccatcatggcccccagacccccccccatgatcgtgcccaccgccttcgtgcccgccccccccgtggcccccgtgcccgcccccgcccccatgccccccgtgcacccccccccccccatggaggacgagcccaccagcaagaagctgaagaccgaggacagcctgatgcccgaggaggagttcctgagaagaaacaagggccccgtgagcatcaaggtgcaggtgcccaacatgcaggacaagaccgagtggaagctgaacggccaggtgctggtgttcaccctgcccctgaccgaccaggtgagcgtgatcaaggtgaagatccacgaggccaccggcatgcccgccggcaagcagaagctgcagtacgagggcatcttcatcaaggacagcaacagcctggcctactacaacatggccaacggcgccgtgatccacctggccctgaaggagagaggcggcagaaagaagtag

SEQ ID NO: 100730 - DNA, 900 bp, synthetic construct
  misc_feature 1..900: note = Description of Artificial Sequence: Synthetic coding sequence
  source 1..900: mol_type = other DNA
atggacctgagcgagctggagagagacaacaccggcagatgcagactgagcagccccgtgcccgccgtgtgcagaaaggagccctgcgtgctgggcgtggacgaggccggcagaggccccgtgctgggccccatggtgtacgccatctgctactgccccctgcccagactggccgacctggaggccctgaaggtggccgacagcaagaccctgctggagagcgagagagagagactgttcgccaagatggaggacaccgacttcgtgggctgggccctggacgtgctgagccccaacctgatcagcaccagcatgctgggcagagtgaagtacaacctgaacagcctgagccacgacaccgccaccggcctgatccagtacgccctggaccagggcgtgaacgtgacccaggtgttcgtggacaccgtgggcatgcccgagacctaccaggccagactgcagcagagcttccccggcatcgaggtgaccgtgaaggccaaggccgacgccctgtaccccgtggtgagcgccgccagcatctgcgccaaggtggccagagaccaggccgtgaagaagtggcagttcgtggagaagctgcaggacctggacaccgactacggcagcggctaccccaacgaccccaagaccaaggcctggctgaaggagcacgtggagcccgtgttcggcttcccccagttcgtgagattcagctggagaaccgcccagaccatcctggagaaggaggccgaggacgtgatctgggaggacagcgccagcgagaaccaggagggcctgagaaagatcaccagctacttcctgaacgagggcagccaggccagacccagaagcagccacagatacttcctggagagaggcctggagagcgccaccagcctgtag

SEQ ID NO: 100731 - DNA, 3915 bp, synthetic construct
  misc_feature 1..3915: note = Description of Artificial Sequence: Synthetic coding sequence
  source 1..3915: mol_type = other DNA
atggccaagatcgccaagacccacgaggacatcgaggcccagatcagagagatccagggcaagaaggccgccctggacgaggcccagggcgtgggcctggacagcaccggctactacgaccaggagatctacggcggcagcgacagcagattcgccggctacgtgaccagcatcgccgccaccgagctggaggacgacgacgacgactacagcagcagcaccagcctgctgggccagaagaagcccggctaccacgcccccgtggccctgctgaacgacatcccccagagcaccgagcagtacgaccccttcgccgagcacagaccccccaagatcgccgacagagaggacgagtacaagaagcacagaagaaccatgatcatcagccccgagagactggaccccttcgccgacggcggcaagacccccgaccccaagatgaacgccagaacctacatggacgtgatgagagagcagcacctgaccaaggaggagagagagatcagacagcagctggccgagaaggccaaggccggcgagctgaaggtggtgaacggcgccgccgccagccagccccccagcaagagaaagagaagatgggaccagaccgccgaccagacccccggcgccacccccaagaagctgagcagctgggaccaggccgagacccccggccacacccccagcctgagatgggacgagacccccggcagagccaagggcagcgagacccccggcgccacccccggcagcaagatctgggaccccacccccagccacacccccgccggcgccgccacccccggcagaggcgacacccccggccacgccacccccggccacggcggcgccaccagcagcgccagaaagaacagatgggacgagacccccaagaccgagagagacacccccggccacggcagcggctgggccgagacccccagaaccgacagaggcggcgacagcatcggcgagacccccacccccggcgccagcaagagaaagagcagatgggacgagacccccgccagccagatgggcggcagcacccccgtgctgacccccggcaagacccccatcggcacccccgccatgaacatggccacccccacccccggccacatcatgagcatgacccccgagcagctgcaggcctggagatgggagagagagatcgacgagagaaacagacccctgagcgacgaggagctggacgccatgttccccgagggctacaaggtgctgcccccccccgccggctacgtgcccatcagaacccccgccagaaagctgaccgccacccccacccccctgggcggcatgaccggcttccacatgcagaccgaggacagaaccatgaagagcgtgaacgaccagcccagcggcaacctgcccttcctgaagcccgacgacatccagtacttcgacaagctgctggtggacgtggacgagagcaccctgagccccgaggagcagaaggagagaaagatcatgaagctgctgctgaagatcaagaacggcaccccccccatgagaaaggccgccctgagacagatcaccgacaaggccagagagttcggcgccggccccctgttcaaccagatcctgcccctgctgatgagccccaccctggaggaccaggagagacacctgctggtgaaggtgatcgacagaatcctgtacaagctggacgacctggtgagaccctacgtgcacaagatcctggtggtgatcgagcccctgctgatcgacgaggactactacgccagagtggagggcagagagatcatcagcaacctggccaaggccgccggcctggccaccatgatcagcaccatgagacccgacatcgacaacatggacgagtacgtgagaaacaccaccgccagagccttcgccgtggtggccagcgccctgggcatccccagcctgctgcccttcctgaaggccgtgtgcaagagcaagaagagctggcaggccagacacaccggcatcaagatcgtgcagcagatcgccatcctgatgggctgcgccatcctgccccacctgagaagcctggtggagatcatcgagcacggcctggtggacgagcagcagaaggtgagaaccatcagcgccctggccatcgccgccctggccgaggccgccaccccctacggcatcgagagcttcgacagcgtgctgaagcccctgtggaagggcatcagacagcacagaggcaagggcctggccgccttcctgaaggccatcggctacctgatccccctgatggacgccgagtacgccaactactacaccagagaggtgatgctgatcctgatcagagagttccagagccccgacgaggagatgaagaagatcgtgctgaaggtggtgaagcagtgctgcggcaccgacggcgtggaggccaactacatcaagaccgagatcctgccccccttcttcaagcacttctggcagcacagaatggccctggacagaagaaactacagacagctggtggacaccaccgtggagctggccaacaaggtgggcgccgccgagatcatcagcagaatcgtggacgacctgaaggacgaggccgagcagtacagaaagatggtgatggagaccatcgagaagatcatgggcaacctgggcgccgccgacatcgaccacaagctggaggagcagctgatcgacggcatcctgtacgccttccaggagcagaccaccgaggacagcgtgatgctgaacggcttcggcaccgtggtgaacgccctgggcaagagagtgaagccctacctgccccagatctgcggcaccgtgctgtggagactgaacaacaagagcgccaaggtgagacagcaggccgccgacctgatcagcagaaccgccgtggtgatgaagacctgccaggaggagaagctgatgggccacctgggcgtggtgctgtacgagtacctgggcgaggagtaccccgaggtgctgggcagcatcctgggcgccctgaaggccatcgtgaacgtgatcggcatgcacaagatgaccccccccatcaaggacctgctgcccagactgacccccatcctgaagaacagacacgagaaggtgcaggagaactgcatcgacctggtgggcagaatcgccgacagaggcgccgagtacgtgagcgccagagagtggatgagaatctgcttcgagctgctggagctgctgaaggcccacaagaaggccatcagaagagccaccgtgaacaccttcggctacatcgccaaggccatcggcccccacgacgtgctggccaccctgctgaacaacctgaaggtgcaggagagacagaacagagtgtgcaccaccgtggccatcgccatcgtggccgagacctgcagccccttcaccgtgctgcccgccctgatgaacgagtacagagtgcccgagctgaacgtgcagaacggcgtgctgaagagcctgagcttcctgttcgagtacatcggcgagatgggcaaggactacatctacgccgtgacccccctgctggaggacgccctgatggacagagacctggtgcacagacagaccgccagcgccgtggtgcagcacatgagcctgggcgtgtacggcttcggctgcgaggacagcctgaaccacctgctgaactacgtgtggcccaacgtgttcgagaccagcccccacgtgatccaggccgtgatgggcgccctggagggcctgagagtggccatcggcccctgcagaatgctgcagtactgcctgcagggcctgttccaccccgccagaaaggtgagagacgtgtactggaagatctacaacagcatctacatcggcagccaggacgccctgatcgcccactaccccagaatctacaacgacgacaagaacacctacatcagatacgagctggactacatcctgtag

SEQ ID NO: 100732 - DNA, 435 bp, synthetic construct
  misc_feature 1..435: note = Description of Artificial Sequence: Synthetic coding sequence
  source 1..435: mol_type = other DNA
atggccaagatcgccaagacccacgaggacatcgaggcccagatcagagagatccagggcaagaaggccgccctggacgaggcccagggcgtgggcctggacagcaccggctactacgaccaggagatctacggcggcagcgacagcagattcgccggctacgtgaccagcatcgccgccaccgagctggaggacgacgacgacgactacagcagcagcaccagcctgctgggccagaagaagcccggctaccacgcccccgtggccctgctgaacgacatcccccagagcaccgagcagtacgaccccttcgccgagcacagaccccccaagatcgccgacagagaggacgagtacaagaagcacagaagaaccatgatcatcagccccgagagactggaccccttcgccgacggcttctacagcgccgcctag

SEQ ID NO: 100733 - DNA, 435 bp, synthetic construct; identical to SEQ ID NO: 100732
  misc_feature 1..435: note = Description of Artificial Sequence: Synthetic coding sequence
  source 1..435: mol_type = other DNA

SEQ ID NO: 100734 - DNA, 2688 bp, synthetic construct
  misc_feature 1..2688: note = Description of Artificial Sequence: Synthetic coding sequence
  source 1..2688: mol_type = other DNA
atggccaccgagcaccccgagccccccaaggccgagctgcagctgccccccccccccccccccggccactacggcgcctgggccgcccaggagctgcaggccaagctggccgagatcggcgcccccatccagggcaacagagaggagctggtggagagactgcagagctacaccagacagaccggcatcgtgctgaacagacccgtgctgagaggcgaggacggcgacaaggccgcccccccccccatgagcgcccagctgcccggcatccccatgccccccccccccctgggcctgccccccctgcagccccccccccccccccccccccccccccccggcctgggcctgggcttccccatggcccacccccccaacctgggcccccccccccccctgagagtgggcgagcccgtggccctgagcgaggaggagagactgaagctggcccagcagcaggccgccctgctgatgcagcaggaggagagagccaagcagcagggcgaccacagcctgaaggagcacgagctgctggagcagcagaagagagccgccgtgctgctggagcaggagagacagcaggagatcgccaagatgggcacccccgtgcccagacccccccaggacatgggccagatcggcgtgagaacccccctgggccccagagtggccgcccccgtgggccccgtgggccccacccccaccgtgctgcccatgggcgcccccgtgcccagacccagaggccccccccccccccccggcgacgagaacagagagatggacgaccccagcgtgggccccaagatcccccaggccctggagaagatcctgcagctgaaggagagcagacaggaggagatgaacagccagcaggaggaggaggagatggagaccgacgccagaagcagcctgggccagagcgccagcgagaccgaggaggacaccgtgagcgtgagcaagaaggagaagaacagaaagagaagaaacagaaagaagaagaagaagccccagagagtgagaggcgtgagcagcgagagcagcggcgacagagagaaggacagcaccagaagcagaggcagcgacagccccgccgccgacgtggagatcgagtacgtgaccgaggagcccgagatctacgagcccaacttcatcttcttcaagagaatcttcgaggccttcaagctgaccgacgacgtgaagaaggagaaggagaaggagcccgagaagctggacaagctggagaacagcgccgcccccaagaagaagggcttcgaggaggagcacaaggacagcgacgacgacagcagcgacgacgagcaggagaagaagcccgaggcccccaagctgagcaagaagaagctgagaagaatgaacagattcaccgtggccgagctgaagcagctggtggccagacccgacgtggtggagatgcacgacgtgaccgcccaggaccccaagctgctggtgcacctgaaggccaccagaaacagcgtgcccgtgcccagacactggtgcttcaagagaaagtacctgcagggcaagagaggcatcgagaagccccccttcgagctgcccgacttcatcaagagaaccggcatccaggagatgagagaggccctgcaggagaaggaggagcagaagaccatgaagagcaagatgagagagaaggtgagacccaagatgggcaagatcgacatcgactaccagaagctgcacgacgccttcttcaagtggcagaccaagcccaagctgaccatccacggcgacctgtactacgagggcaaggagttcgagaccagactgaaggagaagaagcccggcgacctgagcgacgagctgagaatcagcctgggcatgcccgtgggccccaacgcccacaaggtgccccccccctggctgatcgccatgcagagatacggccccccccccagctaccccaacctgaagatccccggcctgaacagccccatccccgagagctgcagcttcggctaccacgccggcggctggggcaagccccccgtggacgagaccggcaagcccctgtacggcgacgtgttcggcaccaacgccgccgagttccagaccaagaccgaggaggaggagatcgacagaaccccctggggcgagctggagcccagcgacgaggagagcagcgaggaggaggaggaggaggagagcgacgaggacaagcccgacgagaccggcttcatcacccccgccgacagcggcctgatcacccccggcggcttcagcagcgtgcccgccggcatggagacccccgagctgatcgagctgagaaagaagaagatcgaggaggccatggacggcagcgagaccccccagctgttcaccgtgctgcccgagaagagaaccgccaccgtgggcggcgccatgatgggcagcacccacatctacgacatgagcaccgtgatgagcagaaagggccccgcccccgagctgcagggcgtggaggtggccctggcccccgaggagctggagctggaccccatggccatgacccagaagtacgaggagcacgtgagagagcagcaggcccaggtggagaaggaggacttcagcgacatggtggccgagcacgccgccaagcagaagcagaagaagagaaaggcccagccccaggacagcagaggcggcagcaagaagtacaaggagttcaagttctag

SEQ ID NO: 100735 - DNA, 2400 bp, synthetic construct
  misc_feature 1..2400: note = Description of Artificial Sequence: Synthetic coding sequence
  source 1..2400: mol_type = other DNA
gccaagatggccaccgagcaccccgagccccccaaggccgagctgcagctgccccccccccccccccccggccactacggcgcctgggccgcccaggagctgcaggccaagctggccgagatcggcgcccccatccagggcaacagagaggagctggtggagagactgcagagctacaccagacagaccggcatcgtgctgaacagacccgtgctgagaggcgaggacggcgacaaggccgcccccccccccatgagcgcccagctgcccggcatccccatgccccccccccccctgggcctgccccccctgcagccccccccccccccccccccccccccccccggcctgggcctgggcttccccatggcccacccccccaacctgggcccccccccccccctgagagtgggcgagcccgtggccctgagcgaggaggagagactgaagctggcccagcagcaggccgccctgctgatgcagcaggaggagagagccaagcagggcgaccacagcctgaaggagcacgagctgctggagcagcagaagagagccgccgtgctgctggagcaggagagacagcaggaggaggaggagatggagaccgacgccagaagcagcctgggccagagcgccagcgagaccgaggaggacaccgtgagcgtgagcaagaaggagaagaacagaaagagaagaaacagaaagaagaagaagaagccccagagagtgagaggcgtgagcagcgagagcagcggcgacagagagaaggacagcaccagaagcagaggcagcgacagccccgccgccgacgtggagatcgagtacgtgaccgaggagcccgagatctacgagcccaacttcatcttcttcaagagaatcttcgaggccttcaagctgaccgacgacgtgaagaaggagaaggagaaggagcccgagaagctggacaagctggagaacagcgccgcccccaagaagaagggcttcgaggaggagcacaaggacagcgacgacgacagcagcgacgacgagcaggagaagaagcccgaggcccccaagctgagcaagaagaagctgagaagaatgaacagattcaccgtggccgagctgaagcagctggtggccagacccgacgtggtggagatgcacgacgtgaccgcccaggaccccaagctgctggtgcacctgaaggccaccagaaacagcgtgcccgtgcccagacactggtgcttcaagagaaagtacctgcagggcaagagaggcatcgagaagccccccttcgagctgcccgacttcatcaagagaaccggcatccaggagatgagagaggccctgcaggagaaggaggagcagaagaccatgaagagcaagatgagagagaaggtgagacccaagatgggcaagatcgacatcgactaccagaagctgcacgacgccttcttcaagtggcagaccaagcccaagctgaccatccacggcgacctgtactacgagggcaaggagttcgagaccagactgaaggagaagaagcccggcgacctgagcgacgagctgagaatcagcctgggcatgcccgtgggccccaacgcccacaaggtgccccccccctggctgatcgccatgcagagatacggccccccccccagctaccccaacctgaagatccccggcctgaacagccccatccccgagagctgcagcttcggctaccacgccggcggctggggcaagccccccgtggacgagaccggcaagcccctgtacggcgacgtgttcggcaccaacgccgccgagttccagaccaagaccgaggaggaggagatcgacagaaccccctggggcgagctggagcccagcgacgaggagagcagcgaggaggaggaggaggaggagagcgacgaggacaagcccgacgagaccggcttcatcacccccgccgacagcggcctgatcacccccggcggcttcagcagcgtgcccgccggcatggagacccccgagctgatcgagctgagaaagaagaagatcgaggaggccatggacggcagcgagaccccccagctgttcaccgtgctgcccgagaagagaaccgccaccgtgggcggcgccatgatgggcagcacccacatctacgacatgagcaccgtgatgagcagaaagggccccgcccccgagctgcagggcgtggaggtggccctggcccccgaggagctggagctggaccccatggccatgacccagaagtacgaggagcacgtgagagagcagcaggcccaggtggagaaggaggacttcagcgacatggtggccgagcacgccgccaagcagaagcagaagaagagaaaggcccagccccaggacagcagaggcggcagcaagaagtacaaggagttcaagttctag

SEQ ID NO: 100736 - DNA, 3654 bp, synthetic construct
  misc_feature 1..3654: note = Description of Artificial Sequence: Synthetic coding sequence
  source 1..3654: mol_type = other DNA
atgttcctgtacaacctgaccctgcagagagccaccggcatcagcttcgccatccacggcaacttcagcggcaccaagcagcaggagatcgtggtgagcagaggcaagatcctggagctgctgagacccgaccccaacaccggcaaggtgcacaccctgctgaccgtggaggtgttcggcgtgatcagaagcctgatggccttcagactgaccggcggcaccaaggactacatcgtggtgggcagcgacagcggcagaatcgtgatcctggagtaccagcccagcaagaacatgttcgagaagatccaccaggagaccttcggcaagagcggctgcagaagaatcgtgcccggccagttcctggccgtggaccccaagggcagagccgtgatgatcagcgccatcgagaagcagaagctggtgtacatcctgaacagagacgccgccgccagactgaccatcagcagccccctggaggcccacaaggccaacaccctggtgtaccacgtggtgggcgtggacgtgggcttcgagaaccccatgttcgcctgcctggagatggactacgaggaggccgacaacgaccccaccggcgaggccgccgccaacacccagcagaccctgaccttctacgagctggacctgggcctgaaccacgtggtgagaaagtacagcgagcccctggaggagcacggcaacttcctgatcaccgtgcccggcggcagcgacggccccagcggcgtgctgatctgcagcgagaactacatcacctacaagaacttcggcgaccagcccgacatcagatgccccatccccagaagaagaaacgacctggacgaccccgagagaggcatgatcttcgtgtgcagcgccacccacaagaccaagagcatgttcttcttcctggcccagaccgagcagggcgacatcttcaagatcaccctggagaccgacgaggacatggtgaccgagatcagactgaagtacttcgacaccgtgcccgtggccgccgccatgtgcgtgctgaagaccggcttcctgttcgtggccagcgagttcggcaaccactacctgtaccagatcgcccacctgggcgacgacgacgaggagcccgagttcagcagcgccatgcccctggaggagggcgacaccttcttcttccagcccagacccctgaagaacctggtgctggtggacgagctggacagcctgagccccatcctgttctgccagatcgccgacctggccaacgaggacaccccccagctgtacgtggcctgcggcagaggccccagaagcagcctgagagtgctgagacacggcctggaggtgagcgagatggccgtgagcgagctgcccggcaaccccaacgccgtgtggaccgtgagaagacacatcgaggacgagttcgacgcctacatcatcgtgagcttcgtgaacgccaccctggtgctgagcatcggcgagaccgtggaggaggtgaccgacagcggcttcctgggcaccacccccaccctgagctgcagcctgctgggcgacgacgccctggtgcaggtgtaccccgacggcatcagacacatcagagccgacaagagagtgaacgagtggaagacccccggcaagaagaccatcgtgaagtgcgccgtgaaccagagacaggtggtgatcgccctgaccggcggcgagctggtgtacttcgagatggaccccagcggccagctgaacgagtacaccgagagaaaggagatgagcgccgacgtggtgtgcatgagcctggccaacgtgccccccggcgagcagagaagcagattcctggccgtgggcctggtggacaacaccgtgagaatcatcagcctggaccccagcgactgcctgcagcccctgagcatgcaggccctgcccgcccagcccgagagcctgtgcatcgtggagatgggcggcaccgagaagcaggacgagctgggcgagagaggcagcatcggcttcctgtacctgaacatcggcctgcagaacggcgtgctgctgagaaccgtgctggaccccgtgaccggcgacctgagcgacaccagaaccagatacctgggcagcagacccgtgaagctgttcagagtgagaatgcagggccaggaggccgtgctggccatgagcagcagaagctggctgagctacagctaccagagcagattccacctgacccccctgagctacgagaccctggagttcgccagcggcttcgccagcgagcagtgccccgagggcatcgtggccatcagcaccaacaccctgagaatcctggccctggagaagctgggcgccgtgttcaaccaggtggccttccccctgcagtacacccccagaaagttcgtgatccaccccgagagcaacaacctgatcatcatcgagaccgaccacaacgcctacaccgaggccaccaaggcccagagaaagcagcagatggccgaggagatggtggaggccgccggcgaggacgagagagagctggccgccgagatggccgccgccttcctgaacgagaacctgcccgagagcatcttcggcgcccccaaggccggcaacggccagtgggccagcgtgatcagagtgatgaaccccatccagggcaacaccctggacctggtgcagctggagcagaacgaggccgccttcagcgtggccgtgtgcagattcagcaacaccggcgaggactggtacgtgctggtgggcgtggccaaggacctgatcctgaaccccagaagcgtggccggcggcttcgtgtacacctacaagctggtgaacaacggcgagaagctggagttcctgcacaagacccccgtggaggaggtgcccgccgccatcgcccccttccagggcagagtgctgatcggcgtgggcaagctgctgagagtgtacgacctgggcaagaagaagctgctgagaaagtgcgagaacaagcacatcgccaactacatcagcggcatccagaccatcggccacagagtgatcgtgagcgacgtgcaggagagcttcatctgggtgagatacaagagaaacgagaaccagctgatcatcttcgccgacgacacctaccccagatgggtgaccaccgccagcctgctggactacgacaccgtggccggcgccgacaagttcggcaacatctgcgtggtgagactgccccccaacaccaacgacgaggtggacgaggaccccaccggcaacaaggccctgtgggacagaggcctgctgaacggcgccagccagaaggccgaggtgatcatgaactaccacgtgggcgagaccgtgctgagcctgcagaagaccaccctgatccccggcggcagcgagagcctggtgtacaccaccctgagcggcggcatcggcatcctggtgcccttcaccagccacgaggaccacgacttcttccagcacgtggagatgcacctgagaagcgagcacccccccctgtgcggcagagaccacctgagcttcagaagctactacttccccgtgaagaacgtgatcgacggcgacctgtgcgagcagttcaacagcatggagcccaacaagcagaagaacgtgagcgaggagctggacagaaccccccccgaggtgagcaagaagctggaggacatcagaaccagatacgccttctag

SEQ ID NO: 100737 - DNA, 828 bp, synthetic construct
  misc_feature 1..828: note = Description of Artificial Sequence: Synthetic coding sequence
  source 1..828: mol_type = other DNA
atgttcctgtacaacctgaccctgcagagagccaccggcatcagcttcgccatccacggcaacttcagcggcaccaagcagcaggagatcgtggtgagcagaggcaagatcctggagctgctgagacccgaccccaacaccggcaaggtgcacaccctgctgaccgtggaggtgttcggcgtgatcagaagcctgatggccttcagactgaccggcggcaccaaggactacatcgtggtgggcagcgacagcggcagaatcgtgatcctggagtaccagcccagcaagaacatgttcgagaagatccaccaggagaccttcggcaagagcggctgcagaagaatcgtgcccggccagttcctggccgtggaccccaagggcagagccgtgatgatcagcgccatcgagaagcagaagctggtgtacatcctgaacagagacgccgccgccagactgaccatcagcagccccctggaggcccacaaggccaacaccctggtgtaccacgtggtgggcgtggacgtgggcttcgagaaccccatgttcgcctgcctggagatggactacgaggaggccgacaacgaccccaccggcgaggccgccgccaacacccagcagaccctgaccttctacgagctggacctgggcctgaaccacgtggtgagaaagtacagcgagcccctggaggagcacggcaacttcctgatcaccgtgcccggcggcagcgacggccccagcggcgtgctgaacctgagcccccccttccccaaggccatccccgccctgatctgcctggacagccccgtgtacttctgcacccacccctag

SEQ ID NO: 100738 - DNA, 1275 bp, synthetic construct
  misc_feature 1..1275: note = Description of Artificial Sequence: Synthetic coding sequence
  source 1..1275: mol_type = other DNA
atggccgccggccccatcagcgagagaaaccaggacgccaccgtgtacgtgggcggcctggacgagaaggtgagcgagcccctgctgtgggagctgttcctgcaggccggccccgtggtgaacacccacatgcccaaggacagagtgaccggccagcaccagggctacggcttcgtggagttcctgagcgaggaggacgccgactacgccatcaagatcatgaacatgatcaagctgtacggcaagcccatcagagtgaacaaggccagcgcccacaacaagaacctggacgtgggcgccaacatcttcatcggcaacctggaccccgagatcgacgagaagctgctgtacgacaccttcagcgccttcggcgtgatcctgcagacccccaagatcatgagagaccccgacaccggcaacagcaagggctacgccttcatcaacttcgccagcttcgacgccagcgacgccgccatcgaggccatgaacggccagtacctgtgcaacagacccatcaccgtgagctacgccttcaagaaggacagcaagggcgagagacacggcagcgccgccgagagactgctggccgcccagaaccccctgagccaggccgacagaccccaccagctgttcgccgacgccccccccccccccagcgcccccaaccccgtggtgagcagcctgggcagcggcctgcccccccccggcatgcccccccccggcagcttccccccccccgtgcccccccccggcgccctgccccccggcatcccccccgccatgccccccccccccatgccccccggcgccgccggccacggcccccccagcgccggcacccccggcgccggccaccccggccacggccacagccacccccaccccttcccccccggcggcatgccccaccccggcatgagccagatgcagctggcccaccacggcccccacggcctgggccacccccacgccggcccccccggcagcggcggccagcccccccccagacccccccccggcatgccccaccccggccccccccccatgggcatgccccccagaggcccccccttcggcagccccatgggccaccccggccccatgcccccccacggcatgagaggccccccccccctgatgcccccccacggctacaccggcccccccagaccccccccctacggctaccagagaggccccctgcccccccccagacccacccccagaccccccgtgccccccagaggccccctgagaggccccctgccccagtag

SEQ ID NO: 100739 - DNA, 573 bp, synthetic construct
  misc_feature 1..573: note = Description of Artificial Sequence: Synthetic coding sequence
  source 1..573: mol_type = other DNA
atgcccaaggacagagtgaccggccagcaccagggctacggcttcgtggagttcctgagcgaggaggacgccgactacgccatcaagatcatgaacatgatcaagctgtacggcaagcccatcagagtgaacaaggccagcgcccacaacaagaacctggacgtgggcgccaacatcttcatcggcaacctggaccccgagatcgacgagaagctgctgtacgacaccttcagcgccttcggcgtgatcctgcagacccccaagatcatgagagaccccgacaccggcaacagcaagggctacgccttcatcaacttcgccagcttcgacgccagcgacgccgccatcgaggccatgaacggccagtacctgtgcaacagacccatcaccgtgagctacgccttcaagaaggacagcaagggcgagagacacggcagcgccgccgagagactgctggccgcccagaaccccctgagccaggccgacagaccccaccagctgttcgccgacgccccccccccccccagcgcccccaaccccgtggtgagcagcctgggcagcggcctgccctag

SEQ ID NO: 100740 - DNA, 2124 bp, synthetic construct
  misc_feature 1..2124: note = Description of Artificial Sequence: Synthetic coding sequence
  source 1..2124: mol_type = other DNA
atgagcagagacagattcagaagcagaggcggcggcggcggcggcttccacagaagaggcggcggcggcggcagaggcggcctgcacgacttcagaagccccccccccggcatgggcctgaaccagaacagaggccccatgggccccggccccggccagagcggccccaagccccccatcccccccccccccccccaccagcagcagcagcagccccccccccagcagccccccccccagcagccccccccccaccagccccccccccacccccagccccaccagcagcagcagccccccccccccccccaggacagcagcaagcccgtggtggcccagggccccggccccgcccccggcgtgggcagcgccccccccgccagcagcagcgccccccccgccaccccccccaccagcggcgccccccccggcagcggccccggccccacccccacccccccccccgccgtgaccagcgccccccccggcgcccccccccccaccccccccagcagcggcgtgcccaccacccccccccaggccggcggccccccccccccccccgccgccgtgcccggccccggccccggccccaagcagggccccggccccggcggccccaagggcggcaagatgcccggcggccccaagcccggcggcggccccggcctgagcacccccggcggccaccccaagcccccccacagaggcggcggcgagcccagaggcggcagacagcaccaccccccctaccaccagcagcaccaccagggccccccccccggcggccccggcggcagaagcgaggagaagatcagcgacagcgagggcttcaaggccaacctgagcctgctgagaagacccggcgagaagacctacacccagagatgcagactgttcgtgggcaacctgcccgccgacatcaccgaggacgagttcaagagactgttcgccaagtacggcgagcccggcgaggtgttcatcaacaagggcaagggcttcggcttcatcaagctggagagcagagccctggccgagatcgccaaggccgagctggacgacacccccatgagaggcagacagctgagagtgagattcgccacccacgccgccgccctgagcgtgagaaacctgagcccctacgtgagcaacgagctgctggaggaggccttcagccagttcggccccatcgagagagccgtggtgatcgtggacgacagaggcagaagcaccggcaagggcatcgtggagttcgccagcaagcccgccgccagaaaggccttcgagagatgcagcgagggcgtgttcctgctgaccaccacccccagacccgtgatcgtggagcccctggagcagctggacgacgaggacggcctgcccgagaagctggcccagaagaaccccatgtaccagaaggagagagagaccccccccagattcgcccagcacggcaccttcgagtacgagtacagccagagatggaagagcctggacgagatggagaagcagcagagagagcaggtggagaagaacatgaaggacgccaaggacaagctggagagcgagatggaggacgcctaccacgagcaccaggccaacctgctgagacaggacctgatgagaagacaggaggagctgagaagaatggaggagctgcacaaccaggagatgcagaagagaaaggagatgcagctgagacaggaggaggagagaagaagaagagaggaggagatgatgatcagacagagagagatggaggagcagatgagaagacagagagaggagagctacagcagaatgggctacatggaccccagagagagagacatgagaatgggcggcggcggcgccatgaacatgggcgacccctacggcagcggcggccagaagttcccccccctgggcggcggcggcggcatcggctacgaggccaaccccggcgtgccccccgccaccatgagcggcagcatgatgggcagcgacatgagaaccgagagattcggccagggcggcgccggccccgtgggcggccagggccccagaggcatgggccccggcacccccgccggctacggcagaggcagagaggagtacgagggccccaacaagaagcccagattctag

SEQ ID NO: 100741 - DNA, 1875 bp, synthetic construct
  misc_feature 1..1875: note = Description of Artificial Sequence: Synthetic coding sequence
  source 1..1875: mol_type = other DNA
atgaacagcggcggcggcttcggcctgggcctgggcttcggcctgacccccaccagcgtgatccaggtgaccaacctgagcagcgccgtgaccagcgagcagatgagaaccctgttcagcttcctgggcgagatcgaggagctgagactgtacccccccgacaacgcccccctggccttcagcagcaaggtgtgctacgtgaagttcagagaccccagcagcgtgggcgtggcccagcacctgaccaacaccgtgttcatcgacagagccctgatcgtggtgccctgcgccgagggcaagatccccgaggagagcaaggccctgagcctgctggcccccgcccccaccatgaccagcctgatgcccggcgccggcctgctgcccatccccacccccaaccccctgaccaccctgggcgtgagcctgagcagcctgggcgccatccccgccgccgccctggaccccaacatcgccaccctgggcgagatcccccagccccccctgatgggcaacgtggaccccagcaagatcgacgagatcagaagaaccgtgtacgtgggcaacctgaacagccagaccaccaccgccgaccagctgctggagttcttcaagcaggtgggcgaggtgaagttcgtgagaatggccggcgacgagacccagcccaccagattcgccttcgtggagttcgccgaccagaacagcgtgcccagagccctggccttcaacggcgtgatgttcggcgacagacccctgaagatcaaccacagcaacaacgccatcgtgaagccccccgagatgaccccccaggccgccgccaaggagctggaggaggtgatgaagagagtgagagaggcccagagcttcatcagcgccgccatcgagcccgagagcggcaagagcaacgagagaaagggcggcagaagcagaagccacaccagaagcaagagcagaagcagcagcaagagccacagcagaagaaagagaagccagagcaagcacagaagcagaagccacaacagaagcagaagcagacagaaggacagaagaagaagcaagagcccccacaagaagagaagcaagagcagagagagaagaaagagcagaagcagaagccacagcagagacaagagaaaggacaccagagagaagatcaaggagaaggagagagtgaaggagaaggacagagagaaggagagagagagagagaaggagagagagaaggagaaggagagaggcaagaacaaggacagagacaaggagagagagaaggacagagagaaggacaaggagaaggacagagagagagagagagagaaggagcacgagaaggacagagacaaggagaaggagaaggagcaggacaaggagaaggagagagagaaggacagaagcaaggagatcgacgagaagagaaagaaggacaagaagagcagaaccccccccagaagctacaacgccagcagaagaagcagaagcagcagcagagagagaagaagaagaagaagcagaagcagcagcagaagccccagaaccagcaagaccatcaagagaaagagcagcagaagccccagccccagaagcagaaacaagaaggacaagaagagagagaaggagagagaccacatcagcgagagaagagagagagagagaagcaccagcatgagaaagagcagcaacgacagagacggcaaggagaagctggagaagaacagcaccagcctgaaggagaaggagcacaacaaggagcccgacagcagcgtgagcaaggaggtggacgacaaggacgcccccagaaccgaggagaacaagatccagcacaacggcaactgccagctgaacgaggagaacctgagcaccaagaccgaggccgtgtag

SEQ ID NO: 100742 - DNA, 1527 bp, synthetic construct
  misc_feature 1..1527: note = Description of Artificial Sequence: Synthetic coding sequence
  source 1..1527: mol_type = other DNA
atgaccagcctgatgcccggcgccggcctgctgcccatccccacccccaaccccctgaccaccctgggcgtgagcctgagcagcctgggcgccatccccgccgccgccctggaccccaacatcgccaccctgggcgagatcccccagccccccctgatgggcaacgtggaccccagcaagatcgacgagatcagaagaaccgtgtacgtgggcaacctgaacagccagaccaccaccgccgaccagctgctggagttcttcaagcaggtgggcgaggtgaagttcgtgagaatggccggcgacgagacccagcccaccagattcgccttcgtggagttcgccgaccagaacagcgtgcccagagccctggccttcaacggcgtgatgttcggcgacagacccctgaagatcaaccacagcaacaacgccatcgtgaagccccccgagatgaccccccaggccgccgccaaggagctggaggaggtgatgaagagagtgagagaggcccagagcttcatcagcgccgccatcgagcccgagagcggcaagagcaacgagagaaagggcggcagaagcagaagccacaccagaagcaagagcagaagcagcagcaagagccacagcagaagaaagagaagccagagcaagcacagaagcagaagccacaacagaagcagaagcagacagaaggacagaagaagaagcaagagcccccacaagaagagaagcaagagcagagagagaagaaagagcagaagcagaagccacagcagagacaagagaaaggacaccagagagaagatcaaggagaaggagagagtgaaggagaaggacagagagaaggagagagagagagagaaggagagagagaaggagaaggagagaggcaagaacaaggacagagacaaggagagagagaaggacagagagaaggacaaggagaaggacagagagagagagagagagaaggagcacgagaaggacagagacaaggagaaggagaaggagcaggacaaggagaaggagagagagaaggacagaagcaaggagatcgacgagaagagaaagaaggacaagaagagcagaaccccccccagaagctacaacgccagcagaagaagcagaagcagcagcagagagagaagaagaagaagaagcagaagcagcagcagaagccccagaaccagcaagaccatcaagagaaagagcagcagaagccccagccccagaagcagaaacaagaaggacaagaagagagagaaggagagagaccacatcagcgagagaagagagagagagagaagcaccagcatgagaaagagcagcaacgacagagacggcaaggagaagctggagaagaacagcaccagcctgaaggagaaggagcacaacaaggagcccgacagcagcgtgagcaaggaggtggacgacaaggacgcccccagaaccgaggagaacaagatccagcacaacggcaactgccagctgaacgaggagaacctgagcaccaagaccgaggccgtgtag

SEQ ID NO: 100743 - DNA, 231 bp, synthetic construct
  misc_feature 1..231: note = Description of Artificial Sequence: Synthetic coding sequence
  source 1..231: mol_type = other DNA
atgaccagcctgatgcccggcgccggcctgctgcccatccccacccccaaccccctgaccaccctgggcgtgagcctgagcagcctgggcgccatccccgccgccgccctggaccccaacatcgccaccctgggcgagatcccccagccccccctgatgggcaacgtggaccccagcaagatcgacgagatcagaagaaccgtgtacgtgggcaacctgaacagccagtag

SEQ ID NO: 100744 - DNA, 1545 bp, synthetic construct
  misc_feature 1..1545: note = Description of Artificial Sequence: Synthetic coding sequence
  source 1..1545: mol_type = other DNA
atgaacagcggcggcggcttcggcctgggcctgggcttcggcctgacccccaccagcgtgatccaggtgaccaacctgagcagcgccgtgaccagcgagcagatgagaaccctgttcagcttcctgggcgagatcgaggagctgagactgtacccccccgacaacgcccccctggccttcagcagcaaggtgtgctacgtgaagttcagagaccccagcagcgtgggcgtggcccagcacctgaccaacaccgtgttcatcgacagagccctgatcgtggtgccctgcgccgagggcaagatccccgaggagagcaaggccctgagcctgctggcccccgcccccaccatgaccagcctgatgcccggcgccggcctgctgcccatccccacccccaaccccctgaccaccctgggcgtgagcctgagcagcctgggcgccatccccgccgccgccctggaccccaacatcgccaccctgggcgagatcccccagccccccctgatgggcaacgtggaccccagcaagatcgacgagatcagaagaaccgtgtacgtgggcaacctgaacagccagaccaccaccgccgaccagctgctggagttcttcaagcaggtgggcgaggtgaagttcgtgagaatggccggcgacgagacccagcccaccagattcgccttcgtggagttcgccgaccagaacagcgtgcccagagccctggccttcaacggcgtgatgttcggcgacagacccctgaagatcaaccacagcaacaacgccatcgtgaagccccccgagatgaccccccaggccgccgccaaggagctggaggaggtgatgaagagagtgagagaggcccagagcttcatcagcgccgccatcgagcccgagagcggcaagagcaacgagagaaagggcggcagaagcagaagccacaccagaagcaagagcagaagcagcagcaagagccacagcagaagaaagagaagccagagcaagcacagaagcagaagccacaacagaagcagaagcagacagaaggacagaagaagaagcaagagcccccacaagaagagaagcaagagcagagagagaagaaagagcagaagcagaagccacagcagagacaagagaaaggacaccagagagaagatcaaggagaaggagagagtgaaggagaaggacagagagaaggagagagagagagagaaggagagagagaaggagaaggagagaggcaagaacaaggacagagacaaggagagagagaaggacagagagaaggacaaggagaaggacagagagagagagagagagaaggagcacgagaaggacagagacaaggagaaggagaaggagcaggacaaggagaaggagagagagaaggacagaagcaaggagatcgacgagaagagaaagaaggacaagaaccccgagcaccaccccggcgtgaccatgcacagagaggacctggtggtgcccgccggcaagggcgtgggcggcggcgccggcgtgctgcccgacagacaggagcaccagaagccctag

SEQ ID NO: 100745 - DNA, 213 bp, synthetic construct
  misc_feature 1..213: note = Description of Artificial Sequence: Synthetic coding sequence
  source 1..213: mol_type = other DNA
atgagcgagaagaagcagcccgtggacctgggcctgctggaggaggacgacgagttcgaggagttccccgccgaggactgggccggcctggacgaggacgaggacgcccacgtgtgggaggacaactgggacgacgacaacgtggaggacgacttcagcaaccagctgagagccgagctggagaagcacggctacaagatggagaccagctag

SEQ ID NO: 100746 - DNA, 1077 bp, synthetic construct
  misc_feature 1..1077: note = Description of Artificial Sequence: Synthetic coding sequence
  source 1..1077: mol_type = other DNA
atggccttcgcccccatgggccccgaggccagcttcttcgacgtgctggacagacacagagagagcctgctggccgccctgagaagaggcggcagagagccccccaccggcggcagcagactggccagcagattcgaggacagcgtgggcctgcagatggtgagccactgcaccaccagaaagatcaagagcgacagccccaagagcgcccagaagttcagcctgatcctgaagatcctgagcatgatctacaagctggtgcagagcaacacctacgccaccaagagagacatctactacaccgacagccagctgttcggcaaccagaccgtggtggacaacatcatcaacgacatcagctgcatgctgaaggtgagcagaagaagcctgcacatcctgagcaccagcaagggcctgatcgccggcaacctgagatacatcgaggaggacggcaccaaggtgaactgcacctgcggcgccaccgccgtggccgtgcccagcaacatccagggcatcagaaacctggtgaccgacgccaagttcgtgctgatcgtggagaaggacgccaccttccagagactgctggacgacaacttctgcaacaagctgagcccctgcatcatgatcaccggcaagggcgtgcccgacctgaacaccagactgctggtgaagaagctgtgggacaccttccacgtgcccgtgttcaccctggtggacgccgacccccacggcatcgagatcatgtgcatctacaagtacggcagcatgagcatgagcttcgaggcccaccacctgaccgtgcccgccatcagatggctgggcctgctgcccagcgacctgaagagactgaacgtgcccaaggacagcctgatccccctgaccaagagagaccagatgaagctggacagcatcctgagaagaccctacgtgacctgccagcccttctggagaaaggagatggagatcatggccgacagcaagatgaaggccgagatccaggccctgaccttcctgagcagcgactacctgagcagagtgtacctgcccaacaagctgaagttcggcggctggatctag

SEQ ID NO: 100747 - DNA, 1065 bp, synthetic construct
  misc_feature 1..1065: note = Description of Artificial Sequence: Synthetic coding sequence
  source 1..1065: mol_type = other DNA
atggccttcgcccccatgggccccgaggccagcttcttcgacgtgctggacagacacagagagagcctgctggccgccctgagaagaggcggcagagagccccccaccggcggcagcagactggccagcagattcgaggacagcgtgggcctgcagatggtgagccactgcaccaccagaaagatcaagagcgacagccccaagagcgcccagaagttcagcctgatcctgaagatcctgagcatgatctacaagctggtgcagagcaacacctacgccaccaagagagacatctactacaccgacagccagctgttcggcaaccagaccgtggtggacaacatcatcaacgacatcagctgcatgctgaaggtgagcagaagaagcctgcacatcctgagcaccagcaagggcctgatcgccggcaacctgagatacatcgaggaggacggcaccaaggtgaactgcacctgcggcgccaccgccgtggccgtgcccagcaacatccagggcatcagaaacgccaagttcgtgctgatcgtggagaaggacgccaccttccagagactgctggacgacaacttctgcaacaagctgagcccctgcatcatgatcaccggcaagggcgtgcccgacctgaacaccagactgctggtgaagaagctgtgggacaccttccacgtgcccgtgttcaccctggtggacgccgacccccacggcatcgagatcatgtgcatctacaagtacggcagcatgagcatgagcttcgaggcccaccacctgaccgtgcccgccatcagatggctgggcctgctgcccagcgacctgaagagactgaacgtgcccaaggacagcctgatccccctgaccaagagagaccagatgaagctggacagcatcctgagaagaccctacgtgacctgccagcccttctggagaaaggagatggagatcatggccgacagcaagatgaaggccgagatccaggccctgaccttcctgagcagcgactacctgagcagagtgtacctgcccaacaagctgaagttcggcggctggatctag

SEQ ID NO: 100748 - DNA, 1191 bp, synthetic construct
  misc_feature 1..1191: note = Description of Artificial Sequence: Synthetic coding sequence
  source 1..1191: mol_type = other DNA
atggccttcgcccccatgggccccgaggccagcttcttcgacgtgctggacagacacagagagagcctgctggccgccctgagaagaggcggcagagagccccccaccggcggcagcagactggccagcagcagcgaggtgctggccagcatcgagaacatcatccaggacatcatcaccagcctggccagaaacgaggcccccgccttcaccatcgacaacagaagcagctgggagaacatcaagttcgaggacagcgtgggcctgcagatggtgagccactgcaccaccagaaagatcaagagcgacagccccaagagcgcccagaagttcagcctgatcctgaagatcctgagcatgatctacaagctggtgcagagcaacacctacgccaccaagagagacatctactacaccgacagccagctgttcggcaaccagaccgtggtggacaacatcatcaacgacatcagctgcatgctgaaggtgagcagaagaagcctgcacatcctgagcaccagcaagggcctgatcgccggcaacctgagatacatcgaggaggacggcaccaaggtgaactgcacctgcggcgccaccgccgtggccgtgcccagcaacatccagggcatcagaaacctggtgaccgacgccaagttcgtgctgatcgtggagaaggacgccaccttccagagactgctggacgacaacttctgcaacaagctgagcccctgcatcatgatcaccggcaagggcgtgcccgacctgaacaccagactgctggtgaagaagctgtgggacaccttccacgtgcccgtgttcaccctggtggacgccgacccccacggcatcgagatcatgtgcatctacaagtacggcagcatgagcatgagcttcgaggcccaccacctgaccgtgcccgccatcagatggctgggcctgctgcccagcgacctgaagagactgaacgtgcccaaggacagcctgatccccctgaccaagagagaccagatgaagctggacagcatcctgagaagaccctacgtgacctgccagcccttctggagaaaggagatggagatcatggccgacagcaagatgaaggccgagatccaggccctgaccttcctgagcagcgactacctgagcagagtgtacctgcccaacaagctgaagttcggcggctggatctag

SEQ ID NO: 100749 - DNA, 813 bp, synthetic construct
  misc_feature 1..813: note = Description of Artificial Sequence: Synthetic coding sequence
  source 1..813: mol_type = other DNA
ctgctggccgccctgagaagaggcggcagagagccccccaccggcggcagcagactggccagcagcagcgaggtgctggccagcatcgagaacatcatccaggacatcatcaccagcctggccagaaacgaggcccccgccttcaccatcgacaacagaagcagctgggagaacatcaagttcgaggacagcgtgggcctgcagatggtgagccactgcaccaccagaaagatcaagagcgacagccccaagagcgcccagaagttcagcctgatcctgaagatcctgagcatgatctacaagctggtgcagagcaacacctacgccaccaagagagacatctactacaccgacagccagctgttcggcaaccagaccgtggtggacaacatcatcaacgacatcagctgcatgctgaaggtgagcagaagaagcctgcacatcctgagcaccagcaagggcctgatcgccggcaacctgagatacatcgaggaggacggcaccaaggtgaactgcacctgcggcgccaccgccgtggccgtgcccagcaacatccagggcatcagaatcaccgacgccaagttcgtgctgatcgtggagaaggacgccaccttccagagactgctggacgacaacttctgcaacaagctgagcccctgcatcatgatcaccggcaagggcgtgcccgacctgaacaccagactgctggtgaagaagctgtgggacaccttccacgtgcccgtgttcaccctggtggacgccgacccccacggcatcgagatcatgtgcatctacaagtacggcagcatgtag

SEQ ID NO: 100750 - DNA, 996 bp, synthetic construct
  misc_feature 1..996: note = Description of Artificial Sequence: Synthetic coding sequence
  source 1..996: mol_type = other DNA
atggagaaccccagccccgccgccgccctgggcaaggccctgtgcgccctgctgctggccaccctgggcgccgccggccagcccctgggcggcgagagcatctgcagcgccagagccctggccaagtacagcatcaccttcaccggcaagtggagccagaccgccttccccaagcagtaccccctgttcagaccccccgcccagtggagcagcctgctgggcgccgcccacagcagcgactacagcatgtggagaaagaaccagtacgtgagcaacggcctgagagacttcgccgagagaggcgaggcctgggccctgatgaaggagatcgaggccgccggcgaggccctgcagagcgtgcacgccgtgttcagcgcccccgccgtgcccagcggcaccggccagaccagcgccgagctggaggtgcagagaagacacagcctggtgagcttcgtggtgagaatcgtgcccagccccgactggttcgtgggcgtggacagcctggacctgtgcgacggcgacagatggagagagcaggccgccctggacctgtacccctacgacgccggcaccgacagcggcttcaccttcagcagccccaacttcgccaccatcccccaggacaccgtgaccgagatcaccagcagcagccccagccaccccgccaacagcttctactaccccagactgaaggccctgccccccatcgccagagtgaccctggtgagactgagacagagccccagagccttcatcccccccgcccccgtgctgcccagcagagacaacgagatcgtggacagcgccagcgtgcccgagacccccctggactgcgaggtgagcctgtggagcagctggggcctgtgcggcggccactgcggcagactgggcaccaagagcagaaccagatacgtgagagtgcagcccgccaacaacggcagcccctgccccgagctggaggaggaggccgagtgcgtgcccgacaactgcgtgtag

SEQ ID NO: 100751 - DNA, 996 bp, synthetic construct; identical to SEQ ID NO: 100750
  misc_feature 1..996: note = Description of Artificial Sequence: Synthetic coding sequence
  source 1..996: mol_type = other DNA

SEQ ID NO: 100752 - DNA, 186 bp, synthetic construct
  misc_feature 1..186: note = Description of Artificial Sequence: Synthetic coding sequence
  source 1..186: mol_type = other DNA
atggagaaccccagccccgccgccgccctgggcaaggccctgtgcgccctgctgctggccaccctgggcgccgccggccagcccctgggcggcgagagcatctgcagcgccagagccctggccaagtacagcatcaccttcaccggcaagtggagccagaccgccttccccaagcagtacccctag

SEQ ID NO: 100753 - DNA, 327 bp, synthetic construct
  misc_feature 1..327: note = Description of Artificial Sequence: Synthetic coding sequence
  source 1..327: mol_type = other DNA
atggagaaccccagccccgccgccgccctgggcaaggccctgtgcgccctgctgctggccaccctgggcgccgccggccagcccctgggcggcgagagcatctgcagcgccagagccctggccaagtacagcatcaccttcaccggcaagtggagccagaccgccttccccaagcagtaccccctgttcagaccccccgcccagtggagcagcctgctgggcgccgcccacagcagcgactacagcatgtggagaaagaaccagtacgtgagcaacggcctgagagacttcgccgagagaggcgaggcctgggccctgatgaagtag

SEQ ID NO: 100754 - DNA, 54 bp, synthetic construct
  misc_feature 1..54: note = Description of Artificial Sequence: Synthetic coding sequence
  source 1..54: mol_type = other DNA
atggagaaccccagccccgccgccgccctgggcaaggccctgtgcgccctgtag

SEQ ID NO: 100755 - DNA, 27 bp, synthetic construct
  misc_feature 1..27: note = Description of Artificial Sequence: Synthetic coding sequence
  source 1..27: mol_type = other DNA
atggagaaccccagccccgccgcctag

SEQ ID NO: 100756 - DNA, 51 bp, synthetic construct
  misc_feature 1..51: note = Description of Artificial Sequence: Synthetic coding sequence
  source 1..51: mol_type = other DNA
atggagaaccccagccccgccgccgccctgggcaaggccctgtgcgcctag

SEQ ID NO: 100757 - DNA, 75 bp, synthetic construct
  misc_feature 1..75: note = Description of Artificial Sequence: Synthetic coding sequence
  source 1..75: mol_type = other DNA
atggagaaccccagccccgccgccgccctgggcaaggccctgtgcgccctgctgctggccaccctgggcgcctag

SEQ ID NO: 100758 - DNA, 195 bp, synthetic construct
  misc_feature 1..195: note = Description of Artificial Sequence: Synthetic coding sequence
  source 1..195: mol_type = other DNA
atggagaaccccagccccgccgccgccctgggcaaggccctgtgcgccctgctgctggccaccctgggcgccgccggccagcccctgggcggcgagagcatctgcagcgccagagccctggccaagtacagcatcaccttcaccggcaagtggagccagaccgccttccccaagcagtaccccctgttcagatag

SEQ ID NO: 100759 - DNA, 960 bp, synthetic construct
  misc_feature 1..960: note = Description of Artificial Sequence: Synthetic coding sequence
  source 1..960: mol_type = other DNA
atggacccccagaaccagcacggcagcggcagcagcctggtggtgatccagcagcccagcctggacagcagacagagactggactacgagagagagatccagcccaccgccatcctgagcctggaccagatcaaggccatcagaggcagcaacgagtacaccgagggccccagcgtggtgaagagacccgcccccagaaccgcccccagacaggagaagcacgagagaacccacgagatcatccccatcaacgtgaacaacaactacgagcacagacacaccagccacctgggccacgccgtgctgcccagcaacgccagaggccccatcctgagcagaagcaccagcaccggcagcgccgccagcagcggcagcaacagcagcgccagcagcgagcagggcctgctgggcagaagcccccccaccagacccgtgcccggccacagaagcgagagagccatcagaacccagcccaagcagctgatcgtggacgacctgaagggcagcctgaaggaggacctgacccagcacaagttcatctgcgagcagtgcggcaagtgcaagtgcggcgagtgcaccgcccccagaaccctgcccagctgcctggcctgcaacagacagtgcctgtgcagcgccgagagcatggtggagtacggcacctgcatgtgcctggtgaagggcatcttctaccactgcagcaacgacgacgagggcgacagctacagcgacaacccctgcagctgcagccagagccactgctgcagcagatacctgtgcatgggcgccatgagcctgttcctgccctgcctgctgtgctacccccccgccaagggctgcctgaagctgtgcagaagatgctacgactggatccacagacccggctgcagatgcaagaacagcaacaccgtgtactgcaagctggagagctgccccagcagaggccagggcaagcccagctag

SEQ ID NO: 100760 - DNA, 960 bp, synthetic construct; identical to SEQ ID NO: 100759
  misc_feature 1..960: note = Description of Artificial Sequence: Synthetic coding sequence
  source 1..960: mol_type = other DNA

SEQ ID NO: 100761 - DNA, 204 bp, synthetic construct
  misc_feature 1..204: note = Description of Artificial Sequence: Synthetic coding sequence
  source 1..204: mol_type = other DNA
atggacccccagaaccagcacggcagcggcagcagcctggtggtgatccagcagcccagcctggacagcagacagagactggactacgagagagagatccagcccaccgccatcctgagcctggaccagatcaaggccatcagaggcagcaacgagtacaccgagggccccagcgtggtgaagagacccgcccccagaacctag

SEQ ID NO: 100762 - DNA, 630 bp, synthetic construct
  misc_feature 1..630: note = Description of Artificial Sequence: Synthetic coding sequence
  source 1..630: mol_type = other DNA
atggacccccagaaccagcacggcagcggcagcagcctggtggtgatccagcagcccagcctggacagcagacagagactggactacgagagagagatccagcccaccgccatcctgagcctggaccagatcaaggccatcagaggcagcaacgagtacaccgagggccccagcgtggtgaagagacccgcccccagaaccgcccccagacaggagaagcacgagagaacccacgagatcatccccatcaacgtgaacaacaactacgagcacagacacaccagccacctgggccacgccgtgctgcccagcaacgccagaggccccatcctgagcagaagcaccagcaccggcagcgccgccagcagcggcagcaacagcagcgccagcagcgagcagggcctgctgggcagaagcccccccaccagacccgtgcccggccacagaagcgagagagccatcagaacccagcccaagcagctgatcgtggacgacctgaagggcagcctgaaggaggacctgacccagcacaagttcatctgcgagcagtgcggcaagtgcaagtgcggcgagtgcaccgcccccagaaccctgcccagctgcctggcctgcaacagacagtgcctgtag

SEQ ID NO: 100763 - DNA, 108 bp, synthetic construct
  misc_feature 1..108: note = Description of Artificial Sequence: Synthetic coding sequence
  source 1..108: mol_type = other DNA
atggacccccagaaccagcacggcagcggcagcagcctggtggtgatccagcagcccagcctggacagcagacagagactggactacgagagagagatccagccctag

SEQ ID NO: 100764 - DNA, 948 bp, synthetic construct
  misc_feature 1..948: note = Description of Artificial Sequence: Synthetic coding sequence
  source 1..948: mol_type = other DNA
atggaggccagagcccagagcggcaacggcagccagcccctgctgcagacccccagagacggcggcagacagagaggcgagcccgaccccagagacgccctgacccagcaggtgcacgtgctgagcctggaccagatcagagccatcagaaacaccaacgagtacaccgagggccccaccgtggtgcccagacccggcctgaagcccgcccccagacccagcacccagcacaagcacgagagactgcacggcctgcccgagcacagacagccccccagactgcagcacagccaggtgcacagcagcgccagagcccccctgagcagaagcatcagcaccgtgagcagcggcagcagaagcagcaccagaaccagcaccagcagcagcagcagcgagcagagactgctgggcagcagcttcagcagcggccccgtggccgacggcatcatcagagtgcagcccaagagcgagctgaagcccggcgagctgaagcccctgagcaaggaggacctgggcctgcacgcctacagatgcgaggactgcggcaagtgcaagtgcaaggagtgcacctaccccagacccctgcccagcgactggatctgcgacaagcagtgcctgtgcagcgcccagaacgtgatcgactacggcacctgcgtgtgctgcgtgaagggcctgttctaccactgcagcaacgacgacgaggacaactgcgccgacaacccctgcagctgcagccagagccactgctgcaccagatggagcgccatgggcgtgatgagcctgttcctgccctgcctgtggtgctacctgcccgccaagggctgcctgaagctgtgccagggctgctacgacagagtgaacagacccggctgcagatgcaagaacagcaacaccgtgtgctgcaaggtgcccaccgtgccccccagaaacttcgagaagcccacctag

SEQ ID NO: 100765 - DNA, 948 bp, synthetic construct; identical to SEQ ID NO: 100764
  misc_feature 1..948: note = Description of Artificial Sequence: Synthetic coding sequence
  source 1..948: mol_type = other DNA

SEQ ID NO: 100766 - DNA, 948 bp, synthetic construct; identical to SEQ ID NO: 100764
  misc_feature 1..948: note = Description of Artificial Sequence: Synthetic coding sequence
  source 1..948: mol_type = other DNA

SEQ ID NO: 100767 - DNA, 1062 bp, synthetic construct
  misc_feature 1..1062: note = Description of Artificial Sequence: Synthetic coding sequence
  source 1..1062: mol_type = other DNA
atggaggccagagcccagagcggcaacggcagccagcccctgctgcagacccccagagacggcggcagacagagaggcgagcccgaccccagagacgccctgacccagcaggtgcacgtgctgagcctggaccagatcagagccatcagaaacaccaacgagtacaccgagggccccaccgtggtgcccagacccggcctgaagcccgcccccagacccagcacccagcacaagcacgagagactgcacggcctgcccgagcacagacagccccccagactgcagcacagccaggtgcacagcagcgccagagcccccctgagcagaagcatcagcaccgtgagcagcggcagcagaagcagcaccagaaccagcaccagcagcagcagcagcgagcagagactgctgggcagcagcttcagcagcggccccgtggccgacggcatcatcagagtgcagcccaagagcgagctgaagcccggcgagctgaagcccctgagcaaggaggacctgggcctgcacgcctacagatgcgaggactgcggcaagtgcaagtgcaaggagtgcacctaccccagacccctgcccagcgactggatctgcgacaagcagtgcctgtgcagcgcccagaacgtgatcgactacggcacctgcgtgtgctgcgtgaagggcctgttctaccactgcagcaacgacgacgaggacaactgcgccgacaacccctgcagctgcagccagagccactgctgcaccagatggagcgccatgggcgtgatgagcctgttcctgccctgcctgtggtgctacctgcccgccaagggctgcctgaagctgtgccagggctgctacgacagagtgaacagacccggctgcagatgcaagaacagcaacaccgtgtgctgcaaggtgcccaccgtgccccccagaaccctgaagaaccagcacagcatcatcaaccaggagtactacagcaacgaggacttcttcttcctgttcctgatccacatctgcaaccagctgaacagctacaacctgggcaccgtgaacagaaaggtgggctag

SEQ ID NO: 100768 - DNA, 867 bp, synthetic construct
  misc_feature 1..867: note = Description of Artificial Sequence: Synthetic coding sequence
  source 1..867: mol_type = other DNA
atggacgccgccgtgaccgacgacttccagcagatcctgcccatcgagcagctgagaagcacccacgccagcaacgactacgtggagagaccccccgccccctgcaagcaggccctgagcagccccagcctgatcgtgcagacccacaagagcgactggagcctggccaccatgcccaccagcctgcccagaagcctgagccagtgccaccagctgcagcccctgccccagcacctgagccagagcagcatcgccagcagcatgagccacagcaccaccgccagcgaccagagactgctggccagcatcacccccagccccagcggccagagcatcatcagaacccagcccggcgccggcgtgcaccccaaggccgacggcgccctgaagggcgaggccgagcagagcgccggccaccccagcgagcacctgttcatctgcgaggagtgcggcagatgcaagtgcgtgccctgcaccgccgccagacccctgcccagctgctggctgtgcaaccagagatgcctgtgcagcgccgagagcctgctggactacggcacctgcctgtgctgcgtgaagggcctgttctaccactgcagcaccgacgacgaggacaactgcgccgacgagccctgcagctgcggccccagcagctgcttcgtgagatgggccgccatgagcctgatcagcctgttcctgccctgcctgtgctgctacctgcccaccagaggctgcctgcacctgtgccagcagggctacgacagcctgagaagacccggctgcagatgcaagagacacaccaacaccgtgtgcagaaagatcagcagcggcagcgcccccttccccaaggcccaggagaagagcgtgtag

SEQ ID NO: 100769 - DNA, 378 bp, synthetic construct
  misc_feature 1..378: note = Description of Artificial Sequence: Synthetic coding sequence
  source 1..378: mol_type = other DNA
atggacgccgccgtgaccgacgacttccagcagatcctgcccatcgagcagctgagaagcacccacgccagcaacgactacgtggagagaccccccgccccctgcaagcaggccctgagcagccccagcctgatcgtgcagacccacaagagcgactggagcctggccaccatgcccaccagcctgcccagaagcctgagccagtgccaccagctgcagcccctgccccagcacctgagccagagcagcatcgccagcagcatgagccacagcaccaccgccagcagcaccaccgcccccctgatgatgaagaccaccgtgctgatgagccccgccctggtgggcctggtgctggccctgagcgccggccagccctag

SEQ ID NO: 100770 - DNA, 969 bp, synthetic construct
  misc_feature 1..969: note = Description of Artificial Sequence: Synthetic coding sequence
  source 1..969: mol_type = other DNA
atgctgagccccctgcccaccggccccctggaggcctgcttcagcgtgcagagcagaaccagcagccccatggagccccccatcccccagagcgcccccctgacccccaacagcgtgatggtgcagcccctgctggacagcagaatgagccacagcagactgcagcaccccctgaccatcctgcccatcgaccaggtgaagaccagccacgtggagaacgactacatcgacaaccccagcctggccctgaccaccggccccaagagaaccagaggcggcgcccccgagctggcccccacccccgccagatgcgaccaggacgtgacccaccactggatcagcttcagcggcagacccagcagcgtgagcagcagcagcagcaccagcagcgaccagagactgctggaccacatggcccccccccccgtggccgaccaggccagccccagagccgtgagaatccagcccaaggtggtgcactgccagcccctggacctgaagggccccgccgtgccccccgagctggacaagcacttcctgctgtgcgaggcctgcggcaagtgcaagtgcaaggagtgcgccagccccagaaccctgcccagctgctgggtgtgcaaccaggagtgcctgtgcagcgcccagaccctggtgaactacggcacctgcatgtgcctggtgcagggcatcttctaccactgcaccaacgaggacgacgagggcagctgcgccgaccacccctgcagctgcagcagaagcaactgctgcgccagatggagcttcatgggcgccctgagcgtggtgctgccctgcctgctgtgctacctgcccgccaccggctgcgtgaagctggcccagagaggctacgacagactgagaagacccggctgcagatgcaagcacaccaacagcgtgatctgcaaggccgccagcggcgacgccaagaccagcagacccgacaagcccttctag

SEQ ID NO: 100771 - DNA, 321 bp, synthetic construct
  misc_feature 1..321: note = Description of Artificial Sequence: Synthetic coding sequence
  source 1..321: mol_type = other DNA
atggagccccccatcccccagagcgcccccctgacccccaacagcgtgatggtgcagcccctgctggacagcagaatgagccacagcagactgcagcaccccctgaccatcctgcccatcgaccaggtgaagaccagccacgtggagaacgactacatcgacaaccccagcctggccctgaccaccggccccaagagaaccagaggcggcgcccccgagctggcccccacccccgccagatgcgaccaggacgtgacccaccactggatcagcttcagcggcagaccctgcagcgccacctgcctgccccccgccgcctag

SEQ ID NO: 100772 - DNA, 900 bp, synthetic construct
  misc_feature 1..900: note = Description of Artificial Sequence: Synthetic coding sequence
  source 1..900: mol_type = other DNA
atggagccccccatcccccagagcgcccccctgacccccaacagcgtgatggtgcagcccctgctggacagcagaatgagccacagcagactgcagcaccccctgaccatcctgcccatcgaccaggtgaagaccagccacgtggagaacgactacatcgacaaccccagcctggccctgaccaccggccccaagagaaccagaggcggcgcccccgagctggcccccacccccgccagatgcgaccaggacgtgacccaccactggatcagcttcagcggcagacccagcagcgtgagcagcagcagcagcaccagcagcgaccagagactgctggaccacatggcccccccccccgtggccgaccaggccagccccagagccgtgagaatccagcccaaggtggtgcactgccagcccctggacctgaagggccccgccgtgccccccgagctggacaagcacttcctgctgtgcgaggcctgcggcaagtgcaagtgcaaggagtgcgccagccccagaaccctgcccagctgctgggtgtgcaaccaggagtgcctgtgcagcgcccagaccctggtgaactacggcacctgcatgtgcctggtgcagggcatcttctaccactgcaccaacgaggacgacgagggcagctgcgccgaccacccctgcagctgcagcagaagcaactgctgcgccagatggagcttcatgggcgccctgagcgtggtgctgccctgcctgctgtgctacctgcccgccaccggctgcgtgaagctggcccagagaggctacgacagactgagaagacccggctgcagatgcaagcacaccaacagcgtgatctgcaaggccgccagcggcgacgccaagaccagcagacccgacaagcccttctag

SEQ ID NO: 100773 - DNA, 153 bp, synthetic construct
  misc_feature 1..153: note = Description of Artificial Sequence: Synthetic coding sequence
  source 1..153: mol_type = other DNA
atggagccccccatcccccagagcgcccccctgacccccaacagcgtgatggtgcagcccctgctggacagcagaatgagccacagcagactgcagcaccccctgaccatcctgcccatcgaccaggtgaagaccagccacgtggagaactag

SEQ ID NO: 100774 - DNA, 1335 bp, synthetic construct
  misc_feature 1..1335: note = Description of Artificial Sequence: Synthetic coding sequence
  source 1..1335: mol_type = other DNA
atgagcgaggagaccgccaccagcgacaacgacaacagctacgccagagtgagagccgtggtgatgaccagagacgacagcagcggcggctggctgcccctgggcggcagcggcctgagcagcgtgaccgtgttcaaggtgccccaccaggaggagaacggctgcgccgacttcttcatcagaggcgagagactgagagacaagatggtggtgctggagtgcatgctgaagaaggacctgatctacaacaaggtgacccccaccttccaccactggaagatcgacgacaagaagttcggcctgaccttccagagccccgccgacgccagagccttcgacagaggcatcagaagagccatcgaggacatcagccagggctgccccgagagcaagaacgaggccgagggcgccgacgacctgcaggccaacgaggaggacagcagcagcagcctggtgaaggaccacctgttccagcaggagaccgtggtgaccagcgagccctacagaagcagcaacatcagacccagccccttcgaggacctgaacgccagaagagtgtacatgcagagccaggccaaccagatcaccttcggccagcccggcctggacatccagagcagaagcatggagtacgtgcagagacagatcagcaaggagtgcggcagcctgaagagccagaacagagtgcccctgaagagcatcagacacgtgagcttccaggacgaggacgagatcgtgagaatcaaccccagagacatcctgatcagaagatacgccgactacagacaccccgacatgtggaagaacgacctggagagagacgacgccgacagcagcatccagttcagcaagcccgacagcaagaagagcgactacctgtacagctgcggcgacgagaccaagctgagcagccccaaggacagcgtggtgttcaagacccagcccagcagcctgaagatcaagaagagcaagagaagaaaggaggacggcgagagaagcagatgcgtgtactgccaggagagattcaaccacgaggagaacgtgagaggcaagtgccaggacgcccccgaccccatcaagagatgcatctaccaggtgagctgcatgctgtgcgccgagagcatgctgtaccactgcatgagcgacagcgagggcgacttcagcgacccctgcagctgcgacaccagcgacgacaagttctgcctgagatggctggccctggtggccctgagcttcatcgtgccctgcatgtgctgctacgtgcccctgagaatgtgccacagatgcggcgaggcctgcggctgctgcggcggcaagcacaaggccgccggctag

SEQ ID NO: 100775 - DNA, 1257 bp, synthetic construct
  misc_feature 1..1257: note = Description of Artificial Sequence: Synthetic coding sequence
  source 1..1257: mol_type = other DNA
atgaccgaggagacccaccccgacgacgacagctacatcgtgagagtgaaggccgtggtgatgaccagagacgacagcagcggcggctggttcccccaggagggcggcggcatcagcagagtgggcgtgtgcaaggtgatgcaccccgagggcaacggcagaagcggcttcctgatccacggcgagagacagaaggacaagctggtggtgctggagtgctacgtgagaaaggacctggtgtacaccaaggccaaccccaccttccaccactggaaggtggacaacagaaagttcggcctgaccttccagagccccgccgacgccagagccttcgacagaggcgtgagaaaggccatcgaggacctgatcgagggcagcaccaccagcagcagcaccatccacaacgaggccgagctgggcgacgacgacgtgttcaccaccgccaccgacagcagcagcaacagcagccagaagagagagcagcccaccagaaccatcagcagccccaccagctgcgagcacagaagaatctacaccctgggccacctgcacgacagctaccccaccgaccactaccacctggaccagcccatgcccagaccctacagacaggtgagcttccccgacgacgacgaggagatcgtgagaatcaaccccagagagaagatctggatgaccggctacgaggactacagacacgcccccgtgagaggcaagtaccccgaccccagcgaggacgccgacagcagctacgtgagattcgccaagggcgaggtgcccaagcacgactacaactacccctacgtggacagcagcgacttcggcctgggcgaggaccccaagggcagaggcggcagcgtgatcaagacccagcccagcagaggcaagagcagaagaagaaaggaggacggcgagagaagcagatgcgtgtactgcagagacatgttcaaccacgaggagaacagaagaggccactgccaggacgcccccgacagcgtgagaacctgcatcagaagagtgagctgcatgtggtgcgccgacagcatgctgtaccactgcatgagcgaccccgagggcgactacaccgacccctgcagctgcgacaccagcgacgagaagttctgcctgagatggatggccctgatcgccctgagcttcctggccccctgcatgtgctgctacctgcccctgagagcctgctaccactgcggcgtgatgtgcagatgctgcggcggcaagcacaaggccgccgcctag

SEQ ID NO: 100776 - DNA, 351 bp, synthetic construct
  misc_feature 1..351: note = Description of Artificial Sequence: Synthetic coding sequence
  source 1..351: mol_type = other DNA
atgaccgaggagacccaccccgacgacgacagctacatcgtgagagtgaaggccgtggtgatgaccagagacgacagcagcggcggctggttcccccaggagggcggcggcatcagcagagtgggcgtgtgcaaggtgatgcaccccgagggcaacggcagaagcggcttcctgatccacggcgagagacagaaggacaagctggtggtgctggagtgctacgtgagaaaggacctggtgtacaccaaggccaaccccaccttccaccactggaaggtggacaacagaaagttcggcctgaccttccagagccccgccgacgccagagccttcgacagaggcgtgagatag

SEQ ID NO: 100777 - DNA, 1248 bp, synthetic construct
  misc_feature 1..1248: note = Description of Artificial Sequence: Synthetic coding sequence
  source 1..1248: mol_type = other DNA
atggccagccccggcagcgacagctacatcgtgagagtgaaggccgtggtgatgaccagagacgacagcagcggcggctggttcccccaggagggcggcggcatcagcagagtgggcgtgtgcaaggtgatgcaccccgagggcaacggcagaagcggcttcctgatccacggcgagagacagaaggacaagctggtggtgctggagtgctacgtgagaaaggacctggtgtacaccaaggccaaccccaccttccaccactggaaggtggacaacagaaagttcggcctgaccttccagagccccgccgacgccagagccttcgacagaggcgtgagaaaggccatcgaggacctgatcgagggcagcaccaccagcagcagcaccatccacaacgaggccgagctgggcgacgacgacgtgttcaccaccgccaccgacagcagcagcaacagcagccagaagagagagcagcccaccagaaccatcagcagccccaccagctgcgagcacagaagaatctacaccctgggccacctgcacgacagctaccccaccgaccactaccacctggaccagcccatgcccagaccctacagacaggtgagcttccccgacgacgacgaggagatcgtgagaatcaaccccagagagaagatctggatgaccggctacgaggactacagacacgcccccgtgagaggcaagtaccccgaccccagcgaggacgccgacagcagctacgtgagattcgccaagggcgaggtgcccaagcacgactacaactacccctacgtggacagcagcgacttcggcctgggcgaggaccccaagggcagaggcggcagcgtgatcaagacccagcccagcagaggcaagagcagaagaagaaaggaggacggcgagagaagcagatgcgtgtactgcagagacatgttcaaccacgaggagaacagaagaggccactgccaggacgcccccgacagcgtgagaacctgcatcagaagagtgagctgcatgtggtgcgccgacagcatgctgtaccactgcatgagcgaccccgagggcgactacaccgacccctgcagctgcgacaccagcgacgagaagttctgcctgagatggatggccctgatcgccctgagcttcctggccccctgcatgtgctgctacctgcccctgagagcctgctaccactgcggcgtgatgtgcagatgctgcggcggcaagcacaaggccgccgcctag

SEQ ID NO: 100778 - DNA, 1233 bp, synthetic construct
  misc_feature 1..1233: note = Description of Artificial Sequence: Synthetic coding sequence
  source 1..1233: mol_type = other DNA
atggtgagagtgagagccgtggtgatggccagagacgacagcagcggcggctggctgcccgtgggcggcggcggcctgagccaggtgagcgtgtgcagagtgagaggcgccagacccgagggcggcgccagacagggccactacgtgatccacggcgagagactgagagaccagaagaccaccctggagtgcaccctgaagcccggcctggtgtacaacaaggtgaaccccatcttccaccactggagcctgggcgactgcaagttcggcctgaccttccagagccccgccgaggccgacgagttccagaagagcctgctggccgccctggccgccctgggcagaggcagcctgacccccagcagcagcagcagcagcagcagccccagccaggacaccgccgagaccccctgccccctgaccagccacgtggacagcgacagcagcagcagccacagcagacaggagaccccccccagcgccgccgccgcccccatcatcaccatggagagcgccagcggcttcggccccaccacccccccccagagaagaagaagcagcgcccagagctacccccccctgctgcccttcaccggcatccccgagcccagcgagcccctggccggcgccggcggcctgggctggggcggcagaggctacgaggactacagaagaagcggcccccccgcccccctggccctgagcacctgcgtggtgagattcgccaagaccggcgccctgagaggcgccgccctgggcccccccgccgccctgcccgcccccctgaccgaggccgccccccccgccccccccgccagacccccccccggccccggccccagcagcgcccccgccaaggccagccccgaggccgaggaggccgccagatgcgtgcactgcagagccctgttcagaagaagagccgacggcagaggcggcagatgcgccgaggcccccgaccccggcagactgctggtgagaagactgagctgcctgtggtgcgccgagagcctgctgtaccactgcctgagcgacgccgagggcgacttcagcgacccctgcgcctgcgagcccggccaccccagacccgccgccagatgggccgccctggccgccctgagcctggccgtgccctgcctgtgctgctacgcccccctgagagcctgccactgggtggccgccagatgcggctgcgccggctgcggcggcagacacgaggaggccgccagatag

SEQ ID NO: 100779 - DNA, 459 bp, synthetic construct
  misc_feature 1..459: note = Description of Artificial Sequence: Synthetic coding sequence
  source 1..459: mol_type = other DNA
atggtgagagtgagagccgtggtgatggccagagacgacagcagcggcggctggctgcccgtgggcggcggcggcctgagccaggtgagcgtgtgcagagtgagaggcgccagacccgagggcggcgccagacagggccactacgtgatccacggcgagagactgagagaccagaagaccaccctggagtgcaccctgaagcccggcctggtgtacaacaaggtgaaccccatcttccaccactggagcctgggcgactgcaagttcggcctgaccttccagagccccgccgaggccgacgagttccagaagagcctgctggccgccctggccgccctgggcagaggcagcctgacccccagcagcagcagcagcagcagcagccccagccaggacaccgccgagaccccctgccccctgaccctgagccagtacttcagacacatgctgtgcccctag

SEQ ID NO: 100780 - DNA, 1725 bp, synthetic construct
  misc_feature 1..1725: note = Description of Artificial Sequence: Synthetic coding sequence
  source 1..1725: mol_type = other DNA
atgtggaccttcctgggcatcgccaccttcacctacttctacaagaagttcggcgacttcatcaccctggccaacagagaggtgctgctgtgcgtgctggtgttcctgagcctgggcctggtgctgagctacagatgcagacacagaaacggcggcctgctgggcagacagcagagcggcagccagttcgccctgttcagcgacatcctgagcggcctgcccttcatcggcttcttctgggccaagagcccccccgagagcgagaacaaggagcagctggaggccagaagaagaagaaagggcaccaacatcagcgagaccagcctgatcggcaccgccgcctgcaccagcaccagcagccagaacgaccccgaggtgatcatcgtgggcgccggcgtgctgggcagcgccctggccgccgtgctgagcagagacggcagaaaggtgaccgtgatcgagagagacctgaaggagcccgacagaatcgtgggcgagttcctgcagcccggcggctaccacgtgctgaaggacctgggcctgggcgacaccgtggagggcctggacgcccaggtggtgaacggctacatgatccacgaccaggagagcaagagcgaggtgcagatcccctaccccctgagcgagaacaaccaggtgcagagcggcagagccttccaccacggcagattcatcatgagcctgagaaaggccgccatggccgagcccaacgccaagttcatcgagggcgtggtgctgcagctgctggaggaggacgacgtggtgatgggcgtgcagtacaaggacaaggagaccggcgacatcaaggagctgcacgcccccctgaccgtggtggccgacggcctgttcagcaagttcagaaagagcctggtgagcaacaaggtgagcgtgagcagccacttcgtgggcttcctgatgaagaacgccccccagttcaaggccaaccacgccgagctgatcctggccaaccccagccccgtgctgatctaccagatcagcagcagcgagaccagagtgctggtggacatcagaggcgagatgcccagaaacctgagagagtacatggtggagaagatctacccccagatccccgaccacctgaaggagcccttcctggaggccaccgacaacagccacctgagaagcatgcccgccagcttcctgccccccagcagcgtgaagaagagaggcgtgctgctgctgggcgacgcctacaacatgagacaccccctgaccggcggcggcatgaccgtggccttcaaggacatcaagctgtggagaaagctgctgaagggcatccccgacctgtacgacgacgccgccatcttcgaggccaagaagagcttctactgggccagaaagaccagccacagcttcgtggtgaacatcctggcccaggccctgtacgagctgttcagcgccaccgacgacagcctgcaccagctgagaaaggcctgcttcctgtacttcaagctgggcggcgagtgcgtggccggccccgtgggcctgctgagcgtgctgagccccaaccccctggtgctgatcggccacttcttcgccgtggccatctacgccgtgtacttctgcttcaagagcgagccctggatcaccaagcccagagccctgctgagcagcggcgccgtgctgtacaaggcctgcagcgtgatcttccccctgatctacagcgagatgaagtacatggtgcactag

SEQ ID NO: 100781 - DNA, 1440 bp, synthetic construct
  misc_feature 1..1440: note = Description of Artificial Sequence: Synthetic coding sequence
  source 1..1440: mol_type = other DNA
atgctgagaagaaagggcaccaacatcagcgagaccagcctgatcggcaccgccgcctgcaccagcaccagcagccagaacgaccccgaggtgatcatcgtgggcgccggcgtgctgggcagcgccctggccgccgtgctgagcagagacggcagaaaggtgaccgtgatcgagagagacctgaaggagcccgacagaatcgtgggcgagttcctgcagcccggcggctaccacgtgctgaaggacctgggcctgggcgacaccgtggagggcctggacgcccaggtggtgaacggctacatgatccacgaccaggagagcaagagcgaggtgcagatcccctaccccctgagcgagaacaaccaggtgcagagcggcagagccttccaccacggcagattcatcatgagcctgagaaaggccgccatggccgagcccaacgccaagttcatcgagggcgtggtgctgcagctgctggaggaggacgacgtggtgatgggcgtgcagtacaaggacaaggagaccggcgacatcaaggagctgcacgcccccctgaccgtggtggccgacggcctgttcagcaagttcagaaagagcctggtgagcaacaaggtgagcgtgagcagccacttcgtgggcttcctgatgaagaacgccccccagttcaaggccaaccacgccgagctgatcctggccaaccccagccccgtgctgatctaccagatcagcagcagcgagaccagagtgctggtggacatcagaggcgagatgcccagaaacctgagagagtacatggtggagaagatctacccccagatccccgaccacctgaaggagcccttcctggaggccaccgacaacagccacctgagaagcatgcccgccagcttcctgccccccagcagcgtgaagaagagaggcgtgctgctgctgggcgacgcctacaacatgagacaccccctgaccggcggcggcatgaccgtggccttcaaggacatcaagctgtggagaaagctgctgaagggcatccccgacctgtacgacgacgccgccatcttcgaggccaagaagagcttctactgggccagaaagaccagccacagcttcgtggtgaacatcctggcccaggccctgtacgagctgttcagcgccaccgacgacagcctgcaccagctgagaaaggcctgcttcctgtacttcaagctgggcggcgagtgcgtggccggccccgtgggcctgctgagcgtgctgagccccaaccccctggtgctgatcggccacttcttcgccgtggccatctacgccgtgtacttctgcttcaagagcgagccctggatcaccaagcccagagccctgctgagcagcggcgccgtgctgtacaaggcctgcagcgtgatcttccccctgatctacagcgagatgaagtacatggtgcactag

SEQ ID NO: 100782 - DNA, 1140 bp, synthetic construct
  misc_feature 1..1140: note = Description of Artificial Sequence: Synthetic coding sequence
  source 1..1140: mol_type = other DNA
atgatccacgaccaggagagcaagagcgaggtgcagatcccctaccccctgagcgagaacaaccaggtgcagagcggcagagccttccaccacggcagattcatcatgagcctgagaaaggccgccatggccgagcccaacgccaagttcatcgagggcgtggtgctgcagctgctggaggaggacgacgtggtgatgggcgtgcagtacaaggacaaggagaccggcgacatcaaggagctgcacgcccccctgaccgtggtggccgacggcctgttcagcaagttcagaaagagcctggtgagcaacaaggtgagcgtgagcagccacttcgtgggcttcctgatgaagaacgccccccagttcaaggccaaccacgccgagctgatcctggccaaccccagccccgtgctgatctaccagatcagcagcagcgagaccagagtgctggtggacatcagaggcgagatgcccagaaacctgagagagtacatggtggagaagatctacccccagatccccgaccacctgaaggagcccttcctggaggccaccgacaacagccacctgagaagcatgcccgccagcttcctgccccccagcagcgtgaagaagagaggcgtgctgctgctgggcgacgcctacaacatgagacaccccctgaccggcggcggcatgaccgtggccttcaaggacatcaagctgtggagaaagctgctgaagggcatccccgacctgtacgacgacgccgccatcttcgaggccaagaagagcttctactgggccagaaagaccagccacagcttcgtggtgaacatcctggcccaggccctgtacgagctgttcagcgccaccgacgacagcctgcaccagctgagaaaggcctgcttcctgtacttcaagctgggcggcgagtgcgtggccggccccgtgggcctgctgagcgtgctgagccccaaccccctggtgctgatcggccacttcttcgccgtggccatctacgccgtgtacttctgcttcaagagcgagccctggatcaccaagcccagagccctgctgagcagcggcgccgtgctgtacaaggcctgcagcgtgatcttccccctgatctacagcgagatgaagtacatggtgcactag

SEQ ID NO: 100783 - DNA, 822 bp, synthetic construct
  misc_feature 1..822: note = Description of Artificial Sequence: Synthetic coding sequence
  source 1..822: mol_type = other DNA
atgaagaagacccagacctggatcctgacctgcatctacctgcagctgctgctgttcaaccccctggtgaagaccgagggcatctgcagaaacagagtgaccaacaacgtgaaggacgtgaccaagctggtggccaacctgcccaaggactacatgatcaccctgaagtacgtgcccggcatggacgtgctgcccagccactgctggatcagcgagatggtggtgcagctgagcgacagcctgaccgacctgctggacaagttcagcaacatcagcgagggcctgagcaactacagcatcatcgacaagctggtgaacatcgtggacgacctggtggagtgcgtgaaggagaacagcagcaaggacctgaagaagagcttcaagagccccgagcccagactgttcacccccgaggagttcttcagaatcttcaacagaagcatcgacgccttcaaggacttcgtggtggccagcgagaccagcgactgcgtggtgagcagcaccctgagccccgagaaggacagcagagtgagcgtgaccaagcccttcatgctgccccccgtggccgccagcagcctgagaaacgacagcagcagcagcaacagaaaggccaagaacccccccggcgacagcagcctgcactgggccgccatggccctgcccgccctgttcagcctgatcatcggcttcgccttcggcgccctgtactggaagaagagacagcccagcctgaccagagccgtggagaacatccagatcaacgaggaggacaacgagatcagcatgctgcaggagaaggagagagagttccaggaggtgtag

SEQ ID NO: 100784 - DNA, 2100 bp, synthetic construct
  misc_feature 1..2100: note = Description of Artificial Sequence: Synthetic coding sequence
  source 1..2100: mol_type = other DNA
atgagactgagaagactgggccagggcggcagatgctacagaggcctgtggcccctgagacacaccagaccctggagcagccccggcgagtacgagtgggagtacgacgaggaggaggagaagaaccagctggagatcgagagactggaggagcagctgagcatcaacgtgtacgactacaactgccacgtggacctgatcagactgctgagactggagggcgagctgaccaaggtgagaatggccagacagaagatgagcgagatcttccccctgaccgaggagctgtggctggagtggctgcacgacgagatcagcatggcccaggacggcctggacagagagcacgtgtacgacctgttcgagaaggccgtgaaggactacatctgccccaacatctggctggagtacggccagtacagcgtgggcggcatcggccagaagggcggcctggagaaggtgagaagcgtgttcgagagagccctgagcagcgtgggcctgcacatgaccaagggcctggccctgtgggaggcctacagagagttcgagagcgccatcgtggaggccgccagactggagaaggtgcacagcctgttcagaagacagctggccatccccctgtacgacatggaggccaccttcgccgagtacgaggagtggagcgaggaccccatccccgagagcgtgatccagaactacaacaaggccctgcagcagctggagaagtacaagccctacgaggaggccctgctgcaggccgaggcccccagactggccgagtaccaggcctacatcgacttcgagatgaagatcggcgaccccgccagaatccagctgatcttcgagagagccctggtggagaactgcctggtgcccgacctgtggatcagatacagccagtacctggacagacagctgaaggtgaaggacctggtgctgagcgtgcacaacagagccatcagaaactgcccctggaccgtggccctgtggagcagatacctgctggccatggagagacacggcgtggaccaccaggtgatcagcgtgaccttcgagaaggccctgaacgccggcttcatccaggccaccgactacgtggagatctggcaggcctacctggactacctgagaagaagagtggacttcaagcaggacagcagcaaggagctggaggagctgagagccgccttcaccagagccctggagtacctgaagcaggaggtggaggagagattcaacgagagcggcgaccccagctgcgtgatcatgcagaactgggccagaatcgaggccagactgtgcaacaacatgcagaaggccagagagctgtgggacagcatcatgaccagaggcaacgccaagtacgccaacatgtggctggagtactacaacctggagagagcccacggcgacacccagcactgcagaaaggccctgcacagagccgtgcagtgcaccagcgactaccccgagcacgtgtgcgaggtgctgctgaccatggagagaaccgagggcagcctggaggactgggacatcgccgtgcagaagaccgagaccagactggccagagtgaacgagcagagaatgaaggccgccgagaaggaggccgccctggtgcagcaggaggaggagaaggccgagcagagaaagagagccagagccgagaagaaggccctgaagaagaagaagaagatcagaggccccgagaagagaggcgccgacgaggacgacgagaaggagtggggcgacgacgaggaggccttccagacccagaagggcagagagcagcacccctgcagctggagaaacaccaagtgcagaagcagcagcagagccagatgggagatgtgctgcagaagatgcggcgcccccttcgaggccgagggcgagggcagcctgcccgaggagggccacgcccagggcgccgccagacagcagcagggccagcaccacagactgtgccagcagcccgccctgcagcacgccggcgccggccacgaggcccaggccaccctgagaggcctgtggggcggcggccccgaccccacccacctgcagcagccctggggcttccccagactgctgctgagaggcgtgtag

SEQ ID NO: 100785 - DNA, 2784 bp, synthetic construct
  misc_feature 1..2784: note = Description of Artificial Sequence: Synthetic coding sequence
  source 1..2784: mol_type = other DNA
atggccaccgccgccgagaccagcgccagcgagcccgaggccgagagcaaggccggccccaaggccgacggcgaggaggacgaggtgaaggccgccagaaccagaagaaaggtgctgagcagagccgtggccgccgccacctacaagaccatgggccccgcctgggaccagcaggaggagggcgtgagcgagagcgacggcgacgagtacgccatggccagcagcgccgagagcagccccggcgagtacgagtgggagtacgacgaggaggaggagaagaaccagctggagatcgagagactggaggagcagctgagcatcaacgtgtacgactacaactgccacgtggacctgatcagactgctgagactggagggcgagctgaccaaggtgagaatggccagacagaagatgagcgagatcttccccctgaccgaggagctgtggctggagtggctgcacgacgagatcagcatggcccaggacggcctggacagagagcacgtgtacgacctgttcgagaaggccgtgaaggactacatctgccccaacatctggctggagtacggccagtacagcgtgggcggcatcggccagaagggcggcctggagaaggtgagaagcgtgttcgagagagccctgagcagcgtgggcctgcacatgaccaagggcctggccctgtgggaggcctacagagagttcgagagcgccatcgtggaggccgccagactggagaaggtgcacagcctgttcagaagacagctggccatccccctgtacgacatggaggccaccttcgccgagtacgaggagtggagcgaggaccccatccccgagagcgtgatccagaactacaacaaggccctgcagcagctggagaagtacaagccctacgaggaggccctgctgcaggccgaggcccccagactggccgagtaccaggcctacatcgacttcgagatgaagatcggcgaccccgccagaatccagctgatcttcgagagagccctggtggagaactgcctggtgcccgacctgtggatcagatacagccagtacctggacagacagctgaaggtgaaggacctggtgctgagcgtgcacaacagagccatcagaaactgcccctggaccgtggccctgtggagcagatacctgctggccatggagagacacggcgtggaccaccaggtgatcagcgacagcagcaaggagctggaggagctgagagccgccttcaccagagccctggagtacctgaagcaggaggtggaggagagattcaacgagagcggcgaccccagctgcgtgatcatgcagaactgggccagaatcgaggccagactgtgcaacaacatgcagaaggccagagagctgtgggacagcatcatgaccagaggcaacgccaagtacgccaacatgtggctggagtactacaacctggagagagcccacggcgacacccagcactgcagaaaggccctgcacagagccgtgcagtgcaccagcgactaccccgagcacgtgtgcgaggtgctgctgaccatggagagaaccgagggcagcctggaggactgggacatcgccgtgcagaagaccgagaccagactggccagagtgaacgagcagagaatgaaggccgccgagaaggaggccgccctggtgcagcaggaggaggagaaggccgagcagagaaagagagccagagccgagaagaaggccctgaagaagaagaagaagatcagaggccccgagaagagaggcgccgacgaggacgacgagaaggagtggggcgacgacgaggaggagcagcccagcaagagaagaagagtggagaacagcatccccgccgccggcgagacccagaacgtggaggtggccgccggccccgccggcaagtgcgccgccgtggacgtggagccccccagcaagcagaaggagaaggccgccagcctgaagagagacatgcccaaggtgctgcacgacagcagcaaggacagcatcaccgtgttcgtgagcaacctgccctacagcatgcaggagcccgacaccaagctgagacccctgttcgaggcctgcggcgaggtggtgcagatcagacccatcttcagcaacagaggcgacttcagaggctactgctacgtggagttcaaggaggagaagagcgccctgcaggccctggagatggacagaaagagcgtggagggcagacccatgttcgtgagcccctgcgtggacaagagcaagaaccccgacttcaaggtgttcagatacagcaccagcctggagaagcacaagctgttcatcagcggcctgcccttcagctgcaccaaggaggagctggaggagatctgcaaggcccacggcaccgtgaaggacctgagactggtgaccaacagagccggcaagcccaagggcctggcctacgtggagtacgagaacgagagccaggccagccaggccgtgatgaagatggacggcatgaccatcaaggagaacatcatcaaggtggccatcagcaaccccccccagagaaaggtgcccgagaagcccgagaccagaaaggcccccggcggccccatgctgctgccccagacctacggcgccagaggcaagggcagaacccagctgagcctgctgcccagagccctgcagagacccagcgccgccgccccccaggccgagaacggccccgccgccgcccccgccgtggccgcccccgccgccaccgaggcccccaagatgagcaacgccgacttcgccaagctgttcctgagaaagtag

SEQ ID NO: 100786 - DNA, 1587 bp, synthetic construct
  misc_feature 1..1587: note = Description of Artificial Sequence: Synthetic coding sequence
  source 1..1587: mol_type = other DNA
atggagagacacggcgtggaccaccaggtgatcagcgacagcagcaaggagctggaggagctgagagccgccttcaccagagccctggagtacctgaagcaggaggtggaggagagattcaacgagagcggcgaccccagctgcgtgatcatgcagaactgggccagaatcgaggccagactgtgcaacaacatgcagaaggccagagagctgtgggacagcatcatgaccagaggcaacgccaagtacgccaacatgtggctggagtactacaacctggagagagcccacggcgacacccagcactgcagaaaggccctgcacagagccgtgcagtgcaccagcgactaccccgagcacgtgtgcgaggtgctgctgaccatggagagaaccgagggcagcctggaggactgggacatcgccgtgcagaagaccgagaccagactggccagagtgaacgagcagagaatgaaggccgccgagaaggaggccgccctggtgcagcaggaggaggagaaggccgagcagagaaagagagccagagccgagaagaaggccctgaagaagaagaagaagatcagaggccccgagaagagaggcgccgacgaggacgacgagaaggagtggggcgacgacgaggaggagcagcccagcaagagaagaagagtggagaacagcatccccgccgccggcgagacccagaacgtggaggtggccgccggccccgccggcaagtgcgccgccgtggacgtggagccccccagcaagcagaaggagaaggccgccagcctgaagagagacatgcccaaggtgctgcacgacagcagcaaggacagcatgcaggagcccgacaccaagctgagacccctgttcgaggcctgcggcgaggtggtgcagatcagacccatcttcagcaacagaggcgacttcagaggctactgctacgtggagttcaaggaggagaagagcgccctgcaggccctggagatggacagaaagagcgtggagggcagacccatgttcgtgagcccctgcgtggacaagagcaagaaccccgacttcaaggtgttcagatacagcaccagcctggagaagcacaagctgttcatcagcggcctgcccttcagctgcaccaaggaggagctggaggagatctgcaaggcccacggcaccgtgaaggacctgagactggtgaccaacagagccggcaagcccaagggcctggcctacgtggagtacgagaacgagagccaggccagccaggccgtgatgaagatggacggcatgaccatcaaggagaacatcatcaaggtggccatcagcaaccccccccagagaaaggtgcccgagaagcccgagaccagaaaggcccccggcggccccatgctgctgccccagacctacggcgccagaggcaagggcagaacccagctgagcctgctgcccagagccctgcagagacccagcgccgccgccccccaggccgagaacggccccgccgccgcccccgccgtggccgcccccgccgccaccgaggcccccaagatgagcaacgccgacttcgccaagctgttcctgagaaagtag

SEQ ID NO: 100787 - DNA, 390 bp, synthetic construct
  misc_feature 1..390: note = Description of Artificial Sequence: Synthetic coding sequence
  source 1..390: mol_type = other DNA
atggccaccgccgccgagaccagcgccagcgagcccgaggccgagagcaaggccggccccaaggccgacggcgaggaggacgaggtgaaggccgccagaaccagaagaaaggtgctgagcagagccgtggccgccgccacctacaagaccatgggccccgcctgggaccagcaggaggagggcgtgagcgagagcgacggcgacgagtacgccatggccagcagcgccgagagcagccccggcgagtacgagtgggagtacgacgaggaggaggagaagaaccagctggagatcgagagactggaggagcaggtgggccccggcgtgggcagcggccacctgcccgtgttccaggtgctgggcagcccctgccccggcccccccccctag

SEQ ID NO: 100788 - DNA, 330 bp, synthetic construct
  misc_feature 1..330: note = Description of Artificial Sequence: Synthetic coding sequence
  source 1..330: mol_type = other DNA
atggccgccagcgccgccagaggcgccgccgccctgagaagaagcatcaaccagcccgtggccttcgtgagaagaatcccctggaccgccgccagcagccagctgaaggagcacttcgcccagttcggccacgtgagaagatgcatcctgcccttcgacaaggagaccggcttccacagaggcctgggctgggtgcagttcagcagcgaggagggcctgagaaacgccctgcagcaggagaaccacatcatcgacggcgtgaaggtgcaggtgcacaccagaagacccaagctgccccagaccagcgacgacgagaagaaggacttctag

SEQ ID NO: 100789 - DNA, 894 bp, synthetic construct
  misc_feature 1..894: note = Description of Artificial Sequence: Synthetic coding sequence
  source 1..894: mol_type = other DNA
atggccaagtggctgaacaagtacttcagcctgggcaacagcaagaccaagagccccccccagccccccagacccgactacagagagcagagaagaagaggcgagagacccagccagcccccccaggccgtgccccaggccagcagcgccgccagcgccagctgcggccccgccaccgccagctgcttcagcgccagcagcggcagcctgcccgacgacagcggcagcaccagcgacctgatcagagcctacagagcccagaaggagagagacttcgaggacccctacaacggccccggcagcagcctgagaaagctgagagccatgtgcagactggactactgcggcggcagcggcgagcccggcggcgtgcagagagccttcagcgccagcagcgccagcggcgccgccggctgctgctgcgccagcagcggcgccggcgccgccgccagcagcagcagcagcagcggcagcccccacctgtacagaagcagcagcgagagaagacccgccacccccgccgaggtgagatacatcagccccaagcacagactgatcaaggtggagagcgccgccggcggcggcgccggcgaccccctgggcggcgcctgcgccggcggcagaacctggagccccaccgcctgcggcggcaagaagctgctgaacaagtgcgccgccagcgccgccgaggagagcggcgccggcaagaaggacaaggtgaccatcgccgacgactacagcgaccccttcgacgccaagaacgacctgaagagcaaggccggcaagggcgagagcgccggctacatggagccctacgaggcccagagaatcatgaccggcctgcaggaggcctggagacacagccccagcggctgcttccccgtgggcccctag

SEQ ID NO: 100790 - DNA, 1530 bp, synthetic construct
  misc_feature 1..1530: note = Description of Artificial Sequence: Synthetic coding sequence
  source 1..1530: mol_type = other DNA
atggccaagtggctgaacaagtacttcagcctgggcaacagcaagaccaagagccccccccagccccccagacccgactacagagagcagagaagaagaggcgagagacccagccagcccccccaggccgtgccccaggccagcagcgccgccagcgccagctgcggccccgccaccgccagctgcttcagcgccagcagcggcagcctgcccgacgacagcggcagcaccagcgacctgatcagagcctacagagcccagaaggagagagacttcgaggacccctacaacggccccggcagcagcctgagaaagctgagagccatgtgcagactggactactgcggcggcagcggcgagcccggcggcgtgcagagagccttcagcgccagcagcgccagcggcgccgccggctgctgctgcgccagcagcggcgccggcgccgccgccagcagcagcagcagcagcggcagcccccacctgtacagaagcagcagcgagagaagacccgccacccccgccgaggtgagatacatcagccccaagcacagactgatcaaggtggagagcgccgccggcggcggcgccggcgaccccctgggcggcgcctgcgccggcggcagaacctggagccccaccgcctgcggcggcaagaagctgctgaacaagtgcgccgccagcgccgccgaggagagcggcgccggcaagaaggacaaggtgaccatcgccgacgactacagcgaccccttcgacgccaagaacgacctgaagagcaaggccggcaagggcgagagcgccggctacatggagccctacgaggcccagagaatcatgaccgagttccagagacaggagagcgtgagaagccagcacaagggcatccagctgtacgacaccccctacgagcccgagggccagagcgtggacagcgacagcgagagcaccgtgagccccagactgagagagagcaagctgccccaggacgacgacagacccgccgacgagtacgaccagccctgggagtggaacagagtgaccatccccgccctggccgcccagttcaacggcaacgagaagagacagagcagccccagccccagcagagacagaagaagacagctgagagcccccggcggcggcttcaagcccatcaagcacggcagccccgagttctgcggcatcctgggcgagagagtggaccccgccgtgcccctggagaagcagatctggtaccacggcgccatcagcagaggcgacgccgagaacctgctgagactgtgcaaggagtgcagctacctggtgagaaacagccagaccagcaagcacgactacagcctgagcctgagaagcaaccagggcttcatgcacatgaagctggccaagaccaaggagaagtacgtgctgggccagaacagcccccccttcgacagcgtgcccgaggtgatccactactacaccaccagaaagctgcccatcaagggcgccgagcacctgagcctgctgtaccccgtggccgtgagaaccctgtag

SEQ ID NO: 100791 - DNA, 1080 bp, synthetic construct
  misc_feature 1..1080: note = Description of Artificial Sequence: Synthetic coding sequence
  source 1..1080: mol_type = other DNA
atgcaggccgccgccctgcccgaggagatcagatggctgctggaggacgccgaggagttcctggccgagggcctgagaaacgagaacctgagcgccgtggccagagaccacagagaccacatcctgagaggcttccagcagatcaaggccagatactactgggacttccagccccagggcggcgacatcggccaggacagcagcgacgacaaccacagcggcaccctgggcctgagcctgaccagcgacgcccccttcctgagcgactaccaggacgagggcatggaggacatcgtgaagggcgcccaggagctggacaacgtgatcaagcagggctacctggagaagaagagcaaggaccacagcttcttcggcagcgagtggcagaagagatggtgcgtggtgagcagaggcctgttctactactacgccaacgagaagagcaagcagcccaagggcaccttcctgatcaagggctacggcgtgagaatggccccccacctgagaagagacagcaagaaggagagctgcttcgagctgaccagccaggacagaagaagctacgagttcaccgccaccagccccgccgaggccagagactgggtggaccagatcagcttcctgctgaaggacctgagcagcctgaccatcccctacgaggaggacgaggaggaggaggagaaggaggagacctacgacgacatcgacggcttcgacagccccagctgcggcagccagtgcagacccaccatcctgcccggcagcgtgggcatcaaggagcccaccgaggagaaggaggaggaggacatctacgaggtgctgcccgacgaggagcacgacctggaggaggacgagagcggcaccagaagaaagggcgtggactacgccagctactaccagggcctgtgggactgccacggcgaccagcccgacgagctgagcttccagagaggcgacctgatcagaatcctgagcaaggagtacaacatgtacggctggtgggtgggcgagctgaacagcctggtgggcatcgtgcccaaggagtacctgaccaccgccttcgaggtggaggagagatag

SEQ ID NO: 100792 - DNA, 831 bp, synthetic construct
  misc_feature 1..831: note = Description of Artificial Sequence: Synthetic coding sequence
  source 1..831: mol_type = other DNA
atgggcaacagcatgaagagcacccccgcccccgccgagagacccctgcccaaccccgagggcctggacagcgacttcctggccgtgctgagcgactaccccagccccgacatcagcccccccatcttcagaagaggcgagaagctgagagtgatcagcgacgagggcggctggtggaaggccatcagcctgagcaccggcagagagagctacatccccggcatctgcgtggccagagtgtaccacggctggctgttcgagggcctgggcagagacaaggccgaggagctgctgcagctgcccgacaccaaggtgggcagcttcatgatcagagagagcgagaccaagaagggcttctacagcctgagcgtgagacacagacaggtgaagcactacagaatcttcagactgcccaacaactggtactacatcagccccagactgaccttccagtgcctggaggacctggtgaaccactacagcgaggtggccgacggcctgtgctgcgtgctgaccaccccctgcctgacccagagcaccgccgcccccgccgtgagagccagcagcagccccgtgaccctgagacagaagaccgtggactggagaagagtgagcagactgcaggaggaccccgagggcaccgagaaccccctgggcgtggacgagagcctgttcagctacggcctgagagagagcatcgccagctacctgagcctgaccagcgaggacaacaccagcttcgacagaaagaagaagagcatcagcctgatgtacggcggcagcaagagaaagagcagcttcttcagcagccccccctacttcgaggactag

SEQ ID NO: 100793 - DNA, 882 bp, synthetic construct
  misc_feature 1..882: note = Description of Artificial Sequence: Synthetic coding sequence
  source 1..882: mol_type = other DNA
atgctgcacagactgtgggccagccccgccgcccccggcaagaagaaggagatgggcaacagcatgaagagcacccccgcccccgccgagagacccctgcccaaccccgagggcctggacagcgacttcctggccgtgctgagcgactaccccagccccgacatcagcccccccatcttcagaagaggcgagaagctgagagtgatcagcgacgagggcggctggtggaaggccatcagcctgagcaccggcagagagagctacatccccggcatctgcgtggccagagtgtaccacggctggctgttcgagggcctgggcagagacaaggccgaggagctgctgcagctgcccgacaccaaggtgggcagcttcatgatcagagagagcgagaccaagaagggcttctacagcctgagcgtgagacacagacaggtgaagcactacagaatcttcagactgcccaacaactggtactacatcagccccagactgaccttccagtgcctggaggacctggtgaaccactacagcgaggtggccgacggcctgtgctgcgtgctgaccaccccctgcctgacccagagcaccgccgcccccgccgtgagagccagcagcagccccgtgaccctgagacagaagaccgtggactggagaagagtgagcagactgcaggaggaccccgagggcaccgagaaccccctgggcgtggacgagagcctgttcagctacggcctgagagagagcatcgccagctacctgagcctgaccagcgaggacaacaccagcttcgacagaaagaagaagagcatcagcctgatgtacggcggcagcaagagaaagagcagcttcttcagcagccccccctacttcgaggactag

SEQ ID NO: 100794 - DNA, 951 bp, synthetic construct
  misc_feature 1..951: note = Description of Artificial Sequence: Synthetic coding sequence
  source 1..951: mol_type = other DNA
atgctgagcaagctgggccacagccccctgggcggcctgagagccagactgaccttccccgtgtgcctgctgtaccacagactgtgggccagccccgccgcccccggcaagaagaaggagatgggcaacagcatgaagagcacccccgcccccgccgagagacccctgcccaaccccgagggcctggacagcgacttcctggccgtgctgagcgactaccccagccccgacatcagcccccccatcttcagaagaggcgagaagctgagagtgatcagcgacgagggcggctggtggaaggccatcagcctgagcaccggcagagagagctacatccccggcatctgcgtggccagagtgtaccacggctggctgttcgagggcctgggcagagacaaggccgaggagctgctgcagctgcccgacaccaaggtgggcagcttcatgatcagagagagcgagaccaagaagggcttctacagcctgagcgtgagacacagacaggtgaagcactacagaatcttcagactgcccaacaactggtactacatcagccccagactgaccttccagtgcctggaggacctggtgaaccactacagcgaggtggccgacggcctgtgctgcgtgctgaccaccccctgcctgacccagagcaccgccgcccccgccgtgagagccagcagcagccccgtgaccctgagacagaagaccgtggactggagaagagtgagcagactgcaggaggaccccgagggcaccgagaaccccctgggcgtggacgagagcctgttcagctacggcctgagagagagcatcgccagctacctgagcctgaccagcgaggacaacaccagcttcgacagaaagaagaagagcatcagcctgatgtacggcggcagcaagagaaagagcagcttcttcagcagccccccctacttcgaggactag

SEQ ID NO: 100795 - DNA, 276 bp, synthetic construct
  misc_feature 1..276: note = Description of Artificial Sequence: Synthetic coding sequence
  source 1..276: mol_type = other DNA
atgggcaacagcatgaagagcacccccgcccccgccgagagacccctgcccaaccccgagggcctggacagcgacttcctggccgtgctgagcgactaccccagccccgacatcagcccccccatcttcagaagaggcgagaagctgagagtgatcagcgacgagggcggctggtggaaggccatcagcctgagcaccggcagagagagctacatccccggcatctgcgtggccagagtgtaccacggctggctgttcgagggcctgggcagatag

SEQ ID NO: 100796 - DNA, 45 bp, synthetic construct
  misc_feature 1..45: note = Description of Artificial Sequence: Synthetic coding sequence
  source 1..45: mol_type = other DNA
atgggcaacagcatgaagagcacccccgcccccgccgagagatag

SEQ ID NO: 100797 - DNA, 150 bp, synthetic construct
  misc_feature 1..150: note = Description of Artificial Sequence: Synthetic coding sequence
  source 1..150: mol_type = other DNA
atgggcaacagcatgaagagcacccccgcccccgccgagagacccctgcccaaccccgagggcctggacagcgacttcctggccgtgctgagcgactaccccagccccgacatcagcccccccatcttcagaagaggcgagaagctgtag

SEQ ID NO: 100798 - DNA, 477 bp, synthetic construct
  misc_feature 1..477: note = Description of Artificial Sequence: Synthetic coding sequence
  source 1..477: mol_type = other DNA
atgggcaacagcatgaagagcacccccgcccccgccgagagacccctgcccaaccccgagggcctggacagcgacttcctggccgtgctgagcgactaccccagccccgacatcagcccccccatcttcagaagaggcgagaagctgagagtgatcagcgacgagggcggctggtggaaggccatcagcctgagcaccggcagagagagctacatccccggcatctgcgtggccagagtgtaccacggctggctgttcgagggcctgggcagagacaaggccgaggagctgctgcagctgcccgacaccaaggtgggcagcttcatgatcagagagagcgagaccaagaagggcttctacagcctgagcgtgagacacagacaggtgaagcactacagaatcttcagactgcccaacaactggtactacatcagccccagactgaccttccagtgcctggaggacctggtgaactag

SEQ ID NO: 100799 - DNA, 123 bp, synthetic construct
  misc_feature 1..123: note = Description of Artificial Sequence: Synthetic coding sequence
  source 1..123: mol_type = other DNA
atgggcaacagcatgaagagcacccccgcccccgccgagagacccctgcccaaccccgagggcctggacagcgacttcctggccgtgctgagcgactaccccagccccgacatcagcccctag

SEQ ID NO: 100800 - DNA, 786 bp, synthetic construct
  misc_feature 1..786: note = Description of Artificial Sequence: Synthetic coding sequence
  source 1..786: mol_type = other DNA
atgggcagcctgcccagcagaagaaagagcctgcccagccccagcctgagcagcagcgtgcagggccagggccccgtgaccatggaggccgagagaagcaaggccaccgccgtggccctgggcagcttccccgccggcggccccgccgagctgagcctgagactgggcgagcccctgaccatcgtgagcgaggacggcgactggtggaccgtgctgagcgaggtgagcggcagagagtacaacatccccagcgtgcacgtggccaaggtgagccacggctggctgtacgagggcctgagcagagagaaggccgaggagctgctgctgctgcccggcaaccccggcggcgccttcctgatcagagagagccagaccagaagaggcagctacagcctgagcgtgagactgagcagacccgccagctgggacagaatcagacactacagaatccactgcctggacaacggctggctgtacatcagccccagactgaccttccccagcctgcaggccctggtggaccactacagcgagctggccgacgacatctgctgcctgctgaaggagccctgcgtgctgcagagagccggccccctgcccggcaaggacatccccctgcccgtgaccgtgcagagaacccccctgaactggaaggagctggacagcagcctgctgttcagcgaggccgccaccggcgaggagagcctgctgagcgagggcctgagagagagcctgagcttctacatcagcctgaacgacgaggccgtgagcctggacgacgcctag

SEQ ID NO: 100801 - DNA, 633 bp, synthetic construct
  misc_feature 1..633: note = Description of Artificial Sequence: Synthetic coding sequence
  source 1..633: mol_type = other DNA
atgggcagcctgcccagcagaagaaagagcctgcccagccccagcctgagcagcagcgtgcagggccagggccccgtgaccatggaggccgagagaagcaaggccaccgccgtggccctgggcagcttccccgccggcggccccgccgagctgagcctgagactgggcgagcccctgaccatcgtgagcgaggacggcgactggtggaccgtgctgagcgaggtgagcggcagagagtacaacatccccagcgtgcacgtggccaaggtgagccacggctggctgtacgagggcctgagcagagagaaggccgaggagctgctgctgctgcccggcaaccccggcggcgccttcctgatcagagagagccagaccagaagaggcagctacagcctgagcgtgagactgagcagacccgccagctgggacagaatcagacactacagaatccactgcctggacaacggctggctgtacatcagccccagactgaccttccccagcctgcaggccctggtggaccactacagcgagggctggcccgccccctggcagggctacacccccacctgcgactgcgccgaggacaccacccagctggagagagccggccagctgccccccgtgttctag

SEQ ID NO: 100802 - DNA, 3840 bp, synthetic construct
  misc_feature 1..3840: note = Description of Artificial Sequence: Synthetic coding sequence
  source 1..3840: mol_type = other DNA
atgaccctgaccgagagactgagagagaagatcagcagagccttctacaaccacggcctgctgtgcgccagctaccccatccccatcatcctgttcaccggcttctgcatcctggcctgctgctaccccctgctgaagctgcccctgcccggcaccggccccgtggagttcaccacccccgtgaaggactacagccccccccccgtggacagcgacagaaagcagggcgagcccaccgagcagcccgagtggtacgtgggcgcccccgtggcctacgtgcagcagatcttcgtgaagagcagcgtgttcccctggcacaagaacctgctggccgtggacgtgttcagaagccccctgagcagagccttccagctggtggaggagatcagaaaccacgtgctgagagacagcagcggcatcagaagcctggaggagctgtgcctgcaggtgaccgacctgctgcccggcctgagaaagctgagaaacctgctgcccgagcacggctgcctgctgctgagccccggcaacttctggcagaacgactgggagagattccacgccgaccccgacatcatcggcaccatccaccagcacgagcccaagaccctgcagaccagcgccaccctgaaggacctgctgttcggcgtgcccggcaagtacagcggcgtgagcctgtacaccagaaagagaatggtgagctacaccatcaccctggtgttccagcactaccacgccaagttcctgggcagcctgagagccagactgatgctgctgcaccccagccccaactgcagcctgagagccgagagcctggtgcacgtgcacttcaaggaggagatcggcgtggccgagctgatccccctggtgaccacctacatcatcctgttcgcctacatctacttcagcaccagaaagatcgacatggtgaagagcaagtggggcctggccctggccgccgtggtgaccgtgctgagcagcctgctgatgagcgtgggcctgtgcaccctgttcggcctgacccccaccctgaacggcggcgagatcttcccctacctggtggtggtgatcggcctggagaacgtgctggtgctgaccaagagcgtggtgagcacccccgtggacctggaggtgaagctgagaatcgcccagggcctgagcagcgagagctggagcatcatgaagaacatggccaccgagctgggcatcatcctgatcggctacttcaccctggtgcccgccatccaggagttctgcctgttcgccgtggtgggcctggtgagcgacttcttcctgcagatgctgttcttcaccaccgtgctgagcatcgacatcagaagaatggagctggccgacctgaacaagagactgccccccgaggcctgcctgcccagcgccaagcccgtgggccagcccaccagatacgagagacagctggccgtgagacccagcaccccccacaccatcaccctgcagcccagcagcttcagaaacctgagactgcccaagagactgagagtggtgtacttcctggccagaaccagactggcccagagactgatcatggccggcaccgtggtgtggatcggcatcctggtgtacaccgaccccgccggcctgagaaactacctggccgcccaggtgaccgagcagagccccctgggcgagggcgccctggcccccatgcccgtgcccagcggcatgctgccccccagccaccccgaccccgccttcagcatcttcccccccgacgcccccaagctgcccgagaaccagaccagccccggcgagagccccgagagaggcggccccgccgaggtggtgcacgacagccccgtgcccgaggtgacctggggccccgaggacgaggagctgtggagaaagctgagcttcagacactggcccaccctgttcagctactacaacatcaccctggccaagagatacatcagcctgctgcccgtgatccccgtgaccctgagactgaaccccagagaggccctggagggcagacacccccaggacggcagaagcgcctggcccccccccggccccatccccgccggccactgggaggccggccccaagggccccggcggcgtgcaggcccacggcgacgtgaccctgtacaaggtggccgccctgggcctggccaccggcatcgtgctggtgctgctgctgctgtgcctgtacagagtgctgtgccccagaaactacggccagctgggcggcggccccggcagaagaagaagaggcgagctgccctgcgacgactacggctacgccccccccgagaccgagatcgtgcccctggtgctgagaggccacctgatggacatcgagtgcctggccagcgacggcatgctgctggtgagctgctgcctggccggccacgtgtgcgtgtgggacgcccagaccggcgactgcctgaccagaatccccagacccggcagacagagaagagacagcggcgtgggcagcggcctggaggcccaggagagctgggagagactgagcgacggcggcaaggccggccccgaggagcccggcgacagcccccccctgagacacagacccagaggcccccccccccccagcctgttcggcgaccagcccgacctgacctgcctgatcgacaccaacttcagcgcccagcccagaagcagccagcccacccagcccgagcccagacacagagccgtgtgcggcagaagcagagacagccccggctacgacttcagctgcctggtgcagagagtgtaccaggaggagggcctggccgccgtgtgcacccccgccctgagaccccccagccccggccccgtgctgagccaggcccccgaggacgagggcggcagccccgagaagggcagccccagcctggcctgggcccccagcgccgagggcagcatctggagcctggagctgcagggcaacctgatcgtggtgggcagaagcagcggcagactggaggtgtgggacgccatcgagggcgtgctgtgctgcagcagcgaggaggtgagcagcggcatcaccgccctggtgttcctggacaagagaatcgtggccgccagactgaacggcagcctggacttcttcagcctggagacccacaccgccctgagccccctgcagttcagaggcacccccggcagaggcagcagccccgccagccccgtgtacagcagcagcgacaccgtggcctgccacctgacccacaccgtgccctgcgcccaccagaagcccatcaccgccctgaaggccgccgccggcagactggtgaccggcagccaggaccacaccctgagagtgttcagactggaggacagctgctgcctgttcaccctgcagggccacagcggcgccatcaccaccgtgtacatcgaccagaccatggtgctggccagcggcggccaggacggcgccatctgcctgtgggacgtgctgaccggcagcagagtgagccacgtgttcgcccacagaggcgacgtgaccagcctgacctgcaccaccagctgcgtgatcagcagcggcctggacgacctgatcagcatctgggacagaagcaccggcatcaagttctacagcatccagcaggacctgggctgcggcgccagcctgggcgtgatcagcgacaacctgctggtgaccggcggccagggctgcgtgagcttctgggacctgaactacggcgacctgctgcagaccgtgtacctgggcaagaacagcgaggcccagcccgccagacagatcctggtgctggacaacgccgccatcgtgtgcaacttcggcagcgagctgagcctggtgtacgtgcccagcgtgctggagaagctggactag

SEQ ID NO: 100803 - DNA, 2316 bp, synthetic construct
  misc_feature 1..2316: note = Description of Artificial Sequence: Synthetic coding sequence
  source 1..2316: mol_type = other DNA
atgaccctgaccgagagactgagagagaagatcagcagagccttctacaaccacggcctgctgtgcgccagctaccccatccccatcatcctgttcaccggcttctgcatcctggcctgctgctaccccctgctgaagctgcccctgcccggcaccggccccgtggagttcaccacccccgtgaaggactacagccccccccccgtggacagcgacagaaagcagggcgagcccaccgagcagcccgagtggtacgtgggcgcccccgtggcctacgtgcagcagatcttcgtgaagagcagcgtgttcccctggcacaagaacctgctggccgtggacgtgttcagaagccccctgagcagagccttccagctggtggaggagatcagaaaccacgtgctgagagacagcagcggcatcagaagcctggaggagctgtgcctgcaggtgaccgacctgctgcccggcctgagaaagctgagaaacctgctgcccgagcacggctgcctgctgctgagccccggcaacttctggcagaacgactgggagagattccacgccgaccccgacatcatcggcaccatccaccagcacgagcccaagaccctgcagaccagcgccaccctgaaggacctgctgttcggcgtgcccggcaagtacagcggcgtgagcctgtacaccagaaagagaatggtgagctacaccatcaccctggtgttccagcactaccacgccaagttcctgggcagcctgagagccagactgatgctgctgcaccccagccccaactgcagcctgagagccgagagcctggtgcacgtgcacttcaaggaggagatcggcgtggccgagctgatccccctggtgaccacctacatcatcctgttcgcctacatctacttcagcaccagaaagatcgacatggtgaagagcaagtggggcctggccctggccgccgtggtgaccgtgctgagcagcctgctgatgagcgtgggcctgtgcaccctgttcggcctgacccccaccctgaacggcggcgagatcttcccctacctggtggtggtgatcggcctggagaacgtgctggtgctgaccaagagcgtggtgagcacccccgtggacctggaggtgaagctgagaatcgcccagggcctgagcagcgagagctggagcatcatgaagaacatggccaccgagctgggcatcatcctgatcggctacttcaccctggtgcccgccatccaggagttctgcctgttcgccgtggtgggcctggtgagcgacttcttcctgcagatgctgttcttcaccaccgtgctgagcatcgacatcagaagaatggagctggccgacctgaacaagagactgccccccgaggcctgcctgcccagcgccaagcccgtgggccagcccaccagatacgagagaagcagcggcagactggaggtgtgggacgccatcgagggcgtgctgtgctgcagcagcgaggaggtgagcagcggcatcaccgccctggtgttcctggacaagagaatcgtggccgccagactgaacggcagcctggacttcttcagcctggagacccacaccgccctgagccccctgcagttcagaggcacccccggcagaggcagcagccccgccagccccgtgtacagcagcagcgacaccgtggcctgccacctgacccacaccgtgccctgcgcccaccagaagcccatcaccgccctgaaggccgccgccggcagactggtgaccggcagccaggaccacaccctgagagtgttcagactggaggacagctgctgcctgttcaccctgcagggccacagcggcgccatcaccaccgtgtacatcgaccagaccatggtgctggccagcggcggccaggacggcgccatctgcctgtgggacgtgctgaccggcagcagagtgagccacgtgttcgcccacagaggcgacgtgaccagcctgacctgcaccaccagctgcgtgatcagcagcggcctggacgacctgatcagcatctgggacagaagcaccggcatcaagttctacagcatccagcaggacctgggctgcggcgccagcctgggcgtgatcagcgacaacctgctggtgaccggcggccagggctgcgtgagcttctgggacctgaactacggcgacctgctgcagaccgtgtacctgggcaagaacagcgaggcccagcccgccagacagatcctggtgctggacaacgccgccatcgtgtgcaacttcggcagcgagctgagcctggtgtacgtgcccagcgtgctggagaagctggactag

SEQ ID NO: 100804 - DNA, 2718 bp, synthetic construct
  misc_feature 1..2718: note = Description of Artificial Sequence: Synthetic coding sequence
  source 1..2718: mol_type = other DNA
atgaccctgaccgagagactgagagagaagatcagcagagccttctacaaccacggcctgctgtgcgccagctaccccatccccatcatcctgatcggctacttcaccctggtgcccgccatccaggagttctgcctgttcgccgtggtgggcctggtgagcgacttcttcctgcagatgctgttcttcaccaccgtgctgagcatcgacatcagaagaatggagctggccgacctgaacaagagactgccccccgaggcctgcctgcccagcgccaagcccgtgggccagcccaccagatacgagagacagctggccgtgagacccagcaccccccacaccatcaccctgcagcccagcagcttcagaaacctgagactgcccaagagactgagagtggtgtacttcctggccagaaccagactggcccagagactgatcatggccggcaccgtggtgtggatcggcatcctggtgtacaccgaccccgccggcctgagaaactacctggccgcccaggtgaccgagcagagccccctgggcgagggcgccctggcccccatgcccgtgcccagcggcatgctgccccccagccaccccgaccccgccttcagcatcttcccccccgacgcccccaagctgcccgagaaccagaccagccccggcgagagccccgagagaggcggccccgccgaggtggtgcacgacagccccgtgcccgaggtgacctggggccccgaggacgaggagctgtggagaaagctgagcttcagacactggcccaccctgttcagctactacaacatcaccctggccaagagatacatcagcctgctgcccgtgatccccgtgaccctgagactgaaccccagagaggccctggagggcagacacccccaggacggcagaagcgcctggcccccccccggccccatccccgccggccactgggaggccggccccaagggccccggcggcgtgcaggcccacggcgacgtgaccctgtacaaggtggccgccctgggcctggccaccggcatcgtgctggtgctgctgctgctgtgcctgtacagagtgctgtgccccagaaactacggccagctgggcggcggccccggcagaagaagaagaggcgagctgccctgcgacgactacggctacgccccccccgagaccgagatcgtgcccctggtgctgagaggccacctgatggacatcgagtgcctggccagcgacggcatgctgctggtgagctgctgcctggccggccacgtgtgcgtgtgggacgcccagaccggcgactgcctgaccagaatccccagacccggccagagaagagacagcggcgtgggcagcggcctggaggcccaggagagctgggagagactgagcgacggcggcaaggccggccccgaggagcccggcgacagcccccccctgagacacagacccagaggcccccccccccccagcctgttcggcgaccagcccgacctgacctgcctgatcgacaccaacttcagcgcccagcccagaagcagccagcccacccagcccgagcccagacacagagccgtgtgcggcagaagcagagacagccccggctacgacttcagctgcctggtgcagagagtgtaccaggaggagggcctggccgccgtgtgcacccccgccctgagaccccccagccccggccccgtgctgagccaggcccccgaggacgagggcggcagccccgagaagggcagccccagcctggcctgggcccccagcgccgagggcagcatctggagcctggagctgcagggcaacctgatcgtggtgggcagaagcagcggcagactggaggtgtgggacgccatcgagggcgtgctgtgctgcagcagcgaggaggtgagcagcggcatcaccgccctggtgttcctggacaagagaatcgtggccgccagactgaacggcagcctggacttcttcagcctggagacccacaccgccctgagccccctgcagttcagaggcacccccggcagaggcagcagccccgccagccccgtgtacagcagcagcgacaccgtggcctgccacctgacccacaccgtgccctgcgcccaccagaagcccatcaccgccctgaaggccgccgccggcagactggtgaccggcagccaggaccacaccctgagagtgttcagactggaggacagctgctgcctgttcaccctgcagggccacagcggcgccatcaccaccgtgtacatcgaccagaccatggtgctggccagcggcggccaggacggcgccatctgcctgtgggacgtgctgaccggcagcagagtgagccacgtgttcgcccacagaggcgacgtgaccagcctgacctgcaccaccagctgcgtgatcagcagcggcctggacgacctgatcagcatctgggacagaagcaccggcatcaagttctacagcatccagcaggacctgggctgcggcgccagcctgggcgtgatcagcgacaacctgctggtgaccggcggccagggctgcgtgagcttctgggacctgaactacggcgacctgctgcagaccgtgtacctgggcaagaacagcgaggcccagcccgccagacagatcctggtgctggacaacgccgccatcgtgtgcaacttcggcagcgagctgagcctggtgtacgtgcccagcgtgctggagaagctggactag

SEQ ID NO: 100805 - DNA, 1059 bp, synthetic construct
  misc_feature 1..1059: note = Description of Artificial Sequence: Synthetic coding sequence
  source 1..1059: mol_type = other DNA
atggtgaagagcaagtggggcctggccctggccgccgtggtgaccgtgctgagcagcctgctgatgagcgtgggcctgtgcaccctgttcggcctgacccccaccctgaacggcggcgagatcttcccctacctggtggtggtgatcggcctggagaacgtgctggtgctgaccaagagcgtggtgagcacccccgtggacctggaggtgaagctgagaatcgcccagggcctgagcagcgagagctggagcatcatgaagaacatggccaccgagctgggcatcatcctgatcggctacttcaccctggtgcccgccatccaggagttctgcctgttcgccgtggtgggcctggtgagcgacttcttcctgcagatgctgttcttcaccaccgtgctgagcatcgacatcagaagaatggagctggccgacctgaacaagagactgccccccgaggcctgcctgcccagcgccaagcccgtgggccagcccaccagatacgagagacagctggccgtgagacccagcaccccccacaccatcaccctgcagcccagcagcttcagaaacctgagactgcccaagagactgagagtggtgtacttcctggcccccaccggcgcccacacctgctgggccctgggcagcagaacccagggccccagatggggcgccggcccctggagaagacacgccgtgcagggcggcggcgccggccccggccacagacacagactgggcgccgccgccgccctgcccctgcccagagccatgcccgcccagctgagagccgccggctggtgggccagagccgccgaggccagaggcgccgccctgagaagactgagactgtgcgccaccagagacggcgacagagccgcctgcgccgccagacccccccacggccacagagtgcccggccagagaagacacgccgccggcgagctgctgcccggcagacccagactgagagtgggcagagccgacagaggcctgcccaacgcccacagcgcccccagacaggccgcccccggccagtggagaggccagagagcctag

SEQ ID NO: 100806 - DNA, 411 bp, synthetic construct
  misc_feature 1..411: note = Description of Artificial Sequence: Synthetic coding sequence
  source 1..411: mol_type = other DNA
atgaccctgaccgagagactgagagagaagatcagcagagccttctacaaccacggcctgctgtgcgccagctaccccatccccatcatcctgttcaccggcttctgcatcctggcctgctgctaccccctgctgaagctgcccctgcccggcaccggccccgtggagttcaccacccccgtgaaggactacagccccccccccgtggacagcgacagaaagcagggcgagcccaccgagcagcccgagtggtacgtgggcgcccccgtggcctacgtgcagcagatcttcgtgaagagcagcgtgttcccctggcacaagaacctgctggccgtggacgtgttcagaagccccctgagcagagccttccagctggtggaggagatcagaaaccacgtgctgagagactag

SEQ ID NO: 100807 - DNA, 3072 bp, synthetic construct
  misc_feature 1..3072: note = Description of Artificial Sequence: Synthetic coding sequence
  source 1..3072: mol_type = other DNA
atgctgctgcaccccagccccaactgcagcctgagagccgagagcctggtgcacgtgcacttcaaggaggagatcggcgtggccgagctgatccccctggtgaccacctacatcatcctgttcgcctacatctacttcagcaccagaaagatcgacatggtgaagagcaagtggggcctggccctggccgccgtggtgaccgtgctgagcagcctgctgatgagcgtgggcctgtgcaccctgttcggcctgacccccaccctgaacggcggcgagatcttcccctacctggtggtggtgatcggcctggagaacgtgctggtgctgaccaagagcgtggtgagcacccccgtggacctggaggtgaagctgagaatcgcccagggcctgagcagcgagagctggagcatcatgaagaacatggccaccgagctgggcatcatcctgatcggctacttcaccctggtgcccgccatccaggagttctgcctgttcgccgtggtgggcctggtgagcgacttcttcctgcagatgctgttcttcaccaccgtgctgagcatcgacatcagaagaatggagctggccgacctgaacaagagactgccccccgaggcctgcctgcccagcgccaagcccgtgggccagcccaccagatacgagagacagctggccgtgagacccagcaccccccacaccatcaccctgcagcccagcagcttcagaaacctgagactgcccaagagactgagagtggtgtacttcctggccagaaccagactggcccagagactgatcatggccggcaccgtggtgtggatcggcatcctggtgtacaccgaccccgccggcctgagaaactacctggccgcccaggtgaccgagcagagccccctgggcgagggcgccctggcccccatgcccgtgcccagcggcatgctgccccccagccaccccgaccccgccttcagcatcttcccccccgacgcccccaagctgcccgagaaccagaccagccccggcgagagccccgagagaggcggccccgccgaggtggtgcacgacagccccgtgcccgaggtgacctggggccccgaggacgaggagctgtggagaaagctgagcttcagacactggcccaccctgttcagctactacaacatcaccctggccaagagatacatcagcctgctgcccgtgatccccgtgaccctgagactgaaccccagagaggccctggagggcagacacccccaggacggcagaagcgcctggcccccccccggccccatccccgccggccactgggaggccggccccaagggccccggcggcgtgcaggcccacggcgacgtgaccctgtacaaggtggccgccctgggcctggccaccggcatcgtgctggtgctgctgctgctgtgcctgtacagagtgctgtgccccagaaactacggccagctgggcggcggccccggcagaagaagaagaggcgagctgccctgcgacgactacggctacgccccccccgagaccgagatcgtgcccctggtgctgagaggccacctgatggacatcgagtgcctggccagcgacggcatgctgctggtgagctgctgcctggccggccacgtgtgcgtgtgggacgcccagaccggcgactgcctgaccagaatccccagacccggccagagaagagacagcggcgtgggcagcggcctggaggcccaggagagctgggagagactgagcgacggcggcaaggccggccccgaggagcccggcgacagcccccccctgagacacagacccagaggcccccccccccccagcctgttcggcgaccagcccgacctgacctgcctgatcgacaccaacttcagcgcccagcccagaagcagccagcccacccagcccgagcccagacacagagccgtgtgcggcagaagcagagacagccccggctacgacttcagctgcctggtgcagagagtgtaccaggaggagggcctggccgccgtgtgcacccccgccctgagaccccccagccccggccccgtgctgagccaggcccccgaggacgagggcggcagccccgagaagggcagccccagcctggcctgggcccccagcgccgagggcagcatctggagcctggagctgcagggcaacctgatcgtggtgggcagaagcagcggcagactggaggtgtgggacgccatcgagggcgtgctgtgctgcagcagcgaggaggtgagcagcggcatcaccgccctggtgttcctggacaagagaatcgtggccgccagactgaacggcagcctggacttcttcagcctggagacccacaccgccctgagccccctgcagttcagaggcacccccggcagaggcagcagccccgccagccccgtgtacagcagcagcgacaccgtggcctgccacctgacccacaccgtgccctgcgcccaccagaagcccatcaccgccctgaaggccgccgccggcagactggtgaccggcagccaggaccacaccctgagagtgttcagactggaggacagctgctgcctgttcaccctgcagggccacagcggcgccatcaccaccgtgtacatcgaccagaccatggtgctggccagcggcggccaggacggcgccatctgcctgtgggacgtgctgaccggcagcagagtgagccacgtgttcgcccacagaggcgacgtgaccagcctgacctgcaccaccagctgcgtgatcagcagcggcctggacgacctgatcagcatctgggacagaagcaccggcatcaagttctacagcatccagcaggacctgggctgcggcgccagcctgggcgtgatcagcgacaacctgctggtgaccggcggccagggctgcgtgagcttctgggacctgaactacggcgacctgctgcagaccgtgtacctgggcaagaacagcgaggcccagcccgccagacagatcctggtgctggacaacgccgccatcgtgtgcaacttcggcagcgagctgagcctggtgtacgtgcccagcgtgctggagaagctggactag

SEQ ID NO: 100808 - DNA, 267 bp, synthetic construct
  misc_feature 1..267: note = Description of Artificial Sequence: Synthetic coding sequence
  source 1..267: mol_type = other DNA
atgaccctgaccgagagactgagagagaagatcagcagagccttctacaaccacggcctgctgtgcgccagctaccccatccccatcatcctgttcaccggcttctgcatcctggcctgctgctaccccctgctgaagctgcccctgcccggcaccggccccgtggagttcaccacccccgtgaaggactacagccccccccccgtggacagcgacagaaagcagggcgagcccaccgagcagcccgagtgggtgggcaccagatag

SEQ ID NO: 100809 - DNA, 399 bp, synthetic construct
  misc_feature 1..399: note = Description of Artificial Sequence: Synthetic coding sequence
  source 1..399: mol_type = other DNA
atgaccctgaccgagagactgagagagaagatcagcagagccttctacaaccacggcctgctgtgcgccagctaccccatccccatcatcctgttcaccggcttctgcatcctggcctgctgctaccccctgctgaagctgcccctgcccggcaccggccccgtggagttcaccacccccgtgaaggactacagccccccccccgtggacagcgacagaaagcagggcgagcccaccgagcagcccgagtggtacgtgggcgcccccgtggcctacgtgcagcagatcttcgtgaagagcagcgtgttcccctggcacaagaacctgctggccgtggacgtgttcagaagccccctgagcagagccttccagctggtggaggagatcagaaaccactag

SEQ ID NO: 100810 - DNA, 2661 bp, synthetic construct
  misc_feature 1..2661: note = Description of Artificial Sequence: Synthetic coding sequence
  source 1..2661: mol_type = other DNA
atgaagaacatggccaccgagctgggcatcatcctgatcggctacttcaccctggtgcccgccatccaggagttctgcctgttcgccgtggtgggcctggtgagcgacttcttcctgcagatgctgttcttcaccaccgtgctgagcatcgacatcagaagaatggagctggccgacctgaacaagagactgccccccgaggcctgcctgcccagcgccaagcccgtgggccagcccaccagatacgagagacagctggccgtgagacccagcaccccccacaccatcaccctgcagcccagcagcttcagaaacctgagactgcccaagagactgagagtggtgtacttcctggccagaaccagactggcccagagactgatcatggccggcaccgtggtgtggatcggcatcctggtgtacaccgaccccgccggcctgagaaactacctggccgcccaggtgaccgagcagagccccctgggcgagggcgccctggcccccatgcccgtgcccagcggcatgctgccccccagccaccccgaccccgccttcagcatcttcccccccgacgcccccaagctgcccgagaaccagaccagccccggcgagagccccgagagaggcggccccgccgaggtggtgcacgacagccccgtgcccgaggtgacctggggccccgaggacgaggagctgtggagaaagctgagcttcagacactggcccaccctgttcagctactacaacatcaccctggccaagagatacatcagcctgctgcccgtgatccccgtgaccctgagactgaaccccagagaggccctggagggcagacacccccaggacggcagaagcgcctggcccccccccggccccatccccgccggccactgggaggccggccccaagggccccggcggcgtgcaggcccacggcgacgtgaccctgtacaaggtggccgccctgggcctggccaccggcatcgtgctggtgctgctgctgctgtgcctgtacagagtgctgtgccccagaaactacggccagctgggcggcggccccggcagaagaagaagaggcgagctgccctgcgacgactacggctacgccccccccgagaccgagatcgtgcccctggtgctgagaggccacctgatggacatcgagtgcctggccagcgacggcatgctgctggtgagctgctgcctggccggccacgtgtgcgtgtgggacgcccagaccggcgactgcctgaccagaatccccagacccggccagagaagagacagcggcgtgggcagcggcctggaggcccaggagagctgggagagactgagcgacggcggcaaggccggccccgaggagcccggcgacagcccccccctgagacacagacccagaggcccccccccccccagcctgttcggcgaccagcccgacctgacctgcctgatcgacaccaacttcagcgcccagcccagaagcagccagcccacccagcccgagcccagacacagagccgtgtgcggcagaagcagagacagccccggctacgacttcagctgcctggtgcagagagtgtaccaggaggagggcctggccgccgtgtgcacccccgccctgagaccccccagccccggccccgtgctgagccaggcccccgaggacgagggcggcagccccgagaagggcagccccagcctggcctgggcccccagcgccgagggcagcatctggagcctggagctgcagggcaacctgatcgtggtgggcagaagcagcggcagactggaggtgtgggacgccatcgagggcgtgctgtgctgcagcagcgaggaggtgagcagcggcatcaccgccctggtgttcctggacaagagaatcgtggccgccagactgaacggcagcctggacttcttcagcctggagacccacaccgccctgagccccctgcagttcagaggcacccccggcagaggcagcagccccgccagccccgtgtacagcagcagcgacaccgtggcctgccacctgacccacaccgtgccctgcgcccaccagaagcccatcaccgccctgaaggccgccgccggcagactggtgaccggcagccaggaccacaccctgagagtgttcagactggaggacagctgctgcctgttcaccctgcagggccacagcggcgccatcaccaccgtgtacatcgaccagaccatggtgctggccagcggcggccaggacggcgccatctgcctgtgggacgtgctgaccggcagcagagtgagccacgtgttcgcccacagaggcgacgtgaccagcctgacctgcaccaccagctgcgtgatcagcagcggcctggacgacctgatcagcatctgggacagaagcaccggcatcaagttctacagcatccagcaggacctgggctgcggcgccagcctgggcgtgatcagcgacaacctgctggtgaccggcggccagggctgcgtgagcttctgggacctgaactacggcgacctgctgcagaccgtgtacctgggcaagaacagcgaggcccagcccgccagacagatcctggtgctggacaacgccgccatcgtgtgcaacttcggcagcgagctgagcctggtgtacgtgcccagcgtgctggagaagctggactag

SEQ ID NO: 100811 - DNA, 792 bp, synthetic construct
  misc_feature 1..792: note = Description of Artificial Sequence: Synthetic coding sequence
  source 1..792: mol_type = other DNA
atgctgctggcctgggtgcaggccttcctggtgagcaacatgctgctggccgaggcctacggcagcggcggctgcttctgggacaacggccacctgtacagagaggaccagaccagccccgcccccggcctgagatgcctgaactggctggacgcccagagcggcctggccagcgcccccgtgagcggcgccggcaaccacagctactgcagaaaccccgacgaggaccccagaggcccctggtgctacgtgagcggcgaggccggcgtgcccgagaagagaccctgcgaggacctgagatgccccgagaccaccagccaggccctgcccgccttcaccaccgagatccaggaggccagcgagggccccggcgccgacgaggtgcaggtgttcgcccccgccaacgccctgcccgccagaagcgaggccgccgccgtgcagcccgtgatcggcatcagccagagagtgagaatgaacagcaaggagaagaaggacctgggcaccctgggctacgtgctgggcatcaccatgatggtgatcatcatcgccatcggcgccggcatcatcctgggctacagctacaagagaggcaaggacctgaaggagcagcacgaccagaaggtgtgcgagagagagatgcagagaatcaccctgcccctgagcgccttcaccaaccccacctgcgagatcgtggacgagaagaccgtggtggtgcacaccagccagacccccgtggacccccaggagggcaccacccccctgatgggccaggccggcacccccggcgcctag

SEQ ID NO: 100812 - DNA, 1176 bp, synthetic construct
  misc_feature 1..1176: note = Description of Artificial Sequence: Synthetic coding sequence
  source 1..1176: mol_type = other DNA
atgtacagcatgatgatggagaccgacctgcacagccccggcggcgcccaggcccccaccaacctgagcggccccgccggcgccggcggcggcggcggcggcggcggcggcggcggcggcggcggcggcgccaaggccaaccaggacagagtgaagagacccatgaacgccttcatggtgtggagcagaggccagagaagaaagatggcccaggagaaccccaagatgcacaacagcgagatcagcaagagactgggcgccgagtggaaggtgatgagcgaggccgagaagagacccttcatcgacgaggccaagagactgagagccctgcacatgaaggagcaccccgactacaagtacagacccagaagaaagaccaagaccctgctgaagaaggacaagtacagcctggccggcggcctgctggccgccggcgccggcggcggcggcgccgccgtggccatgggcgtgggcgtgggcgtgggcgccgccgccgtgggccagagactggagagccccggcggcgccgccggcggcggctacgcccacgtgaacggctgggccaacggcgcctaccccggcagcgtggccgccgccgccgccgccgccgccatgatgcaggaggcccagctggcctacggccagcaccccggcgccggcggcgcccacccccacgcccaccccgcccacccccacccccaccacccccacgcccacccccacaacccccagcccatgcacagatacgacatgggcgccctgcagtacagccccatcagcaacagccagggctacatgagcgccagccccagcggctacggcggcctgccctacggcgccgccgccgccgccgccgccgccgccggcggcgcccaccagaacagcgccgtggccgccgccgccgccgccgccgccgccagcagcggcgccctgggcgccctgggcagcctggtgaagagcgagcccagcggcagcccccccgcccccgcccacagcagagccccctgccccggcgacctgagagagatgatcagcatgtacctgcccgccggcgagggcggcgaccccgccgccgccgccgccgccgccgcccagagcagactgcacagcctgccccagcactaccagggcgccggcgccggcgtgaacggcaccgtgcccctgacccacatctag

SEQ ID NO: 100813 - DNA, 1326 bp, synthetic construct
  misc_feature 1..1326: note = Description of Artificial Sequence: Synthetic coding sequence
  source 1..1326: mol_type = other DNA
atggtgcagcaggccgagagcctggaggccgagagcaacctgcccagagaggccctggacaccgaggagggcgagttcatggcctgcagccccgtggccctggacgagagcgaccccgactggtgcaagaccgccagcggccacatcaagagacccatgaacgccttcatggtgtggagcaagatcgagagaagaaagatcatggagcagagccccgacatgcacaacgccgagatcagcaagagactgggcaagagatggaagatgctgaaggacagcgagaagatccccttcatcagagaggccgagagactgagactgaagcacatggccgactaccccgactacaagtacagacccagaaagaagcccaagatggaccccagcgccaagcccagcgccagccagagccccgagaagagcgccgccggcggcggcggcggcagcgccggcggcggcgccggcggcgccaagaccagcaagggcagcagcaagaagtgcggcaagctgaaggcccccgccgccgccggcgccaaggccggcgccggcaaggccgcccagagcggcgactacggcggcgccggcgacgactacgtgctgggcagcctgagagtgagcggcagcggcggcggcggcgccggcaagaccgtgaagtgcgtgttcctggacgaggacgacgacgacgacgacgacgacgacgagctgcagctgcagatcaagcaggagcccgacgaggaggacgaggagcccccccaccagcagctgctgcagccccccggccagcagcccagccagctgctgagaagatacaacgtggccaaggtgcccgccagccccaccctgagcagcagcgccgagagccccgagggcgccagcctgtacgacgaggtgagagccggcgccaccagcggcgccggcggcggcagcagactgtactacagcttcaagaacatcaccaagcagcaccccccccccctggcccagcccgccctgagccccgccagcagcagaagcgtgagcaccagcagcagcagcagcagcggcagcagcagcggcagcagcggcgaggacgccgacgacctgatgttcgacctgagcctgaacttcagccagagcgcccacagcgccagcgagcagcagctgggcggcggcgccgccgccggcaacctgagcctgagcctggtggacaaggacctggacagcttcagcgagggcagcctgggcagccacttcgagttccccgactactgcacccccgagctgagcgagatgatcgccggcgactggctggaggccaacttcagcgacctggtgttcacctactag

SEQ ID NO: 100814 - DNA, 948 bp, synthetic construct
  misc_feature 1..948: note = Description of Artificial Sequence: Synthetic coding sequence
  source 1..948: mol_type = other DNA
atggtgcagcagagaggcgccagagccaagagagacggcggcccccccccccccggccccggccccgccgaggagggcgccagagagcccggctggtgcaagacccccagcggccacatcaagagacccatgaacgccttcatggtgtggagccagcacgagagaagaaagatcatggaccagtggcccgacatgcacaacgccgagatcagcaagagactgggcagaagatggcagctgctgcaggacagcgagaagatccccttcgtgagagaggccgagagactgagactgaagcacatggccgactaccccgactacaagtacagacccagaaagaagagcaagggcgcccccgccaaggccagacccagaccccccggcggcagcggcggcggcagcagactgaagcccggcccccagctgcccggcagaggcggcagaagagccgccggcggccccctgggcggcggcgccgccgcccccgaggacgacgacgaggacgacgacgaggagctgctggaggtgagactggtggagacccccggcagagagctgtggagaatggtgcccgccggcagagccgccagaggccaggccgagagagcccagggccccagcggcgagggcgccgccgccgccgccgccgccagccccacccccagcgaggacgaggagcccgaggaggaggaggaggaggccgccgccgccgaggagggcgaggaggagaccgtggccagcggcgaggagagcctgggcttcctgagcagactgccccccggccccgccggcctggactgcagcgccctggacagagaccccgacctgcagccccccagcggcaccagccacttcgagttccccgactactgcacccccgaggtgaccgagatgatcgccggcgactggagacccagcagcatcgccgacctggtgttcacctactag

SEQ ID NO: 100815 - DNA, 948 bp, synthetic construct; identical to SEQ ID NO: 100814
  misc_feature 1..948: note = Description of Artificial Sequence: Synthetic coding sequence
  source 1..948: mol_type = other DNA

SEQ ID NO: 100816 - DNA, 1869 bp, synthetic construct
  misc_feature 1..1869: note = Description of Artificial Sequence: Synthetic coding sequence
  source 1..1869: mol_type = other DNA
atgagcatgagaagccccatcagcgcccagctggccctggacggcgtgggcaccatggtgaactgcaccatcaagagcgaggagaagaaggagccctgccacgaggccccccagggcagcgccaccgccgccgagccccagcccggcgaccccgccagagccagccaggacagcgccgacccccaggcccccgcccagggcaacttcagaggcagctgggactgcagcagccccgagggcaacggcagccccgagcccaagagacccggcgtgagcgaggccgccagcggcagccaggagaagctggacttcaacagaaacctgaaggaggtggtgcccgccatcgagaagctgctgagcagcgactggaaggagagattcctgggcagaaacagcatggaggccaaggacgtgaagggcacccaggagagcctggccgagaaggagctgcagctgctggtgatgatccaccagctgagcaccctgagagaccagctgctgaccgcccacagcgagcagaagaacatggccgccatgctgttcgagaagcagcagcagcagatggagctggccagacagcagcaggagcagatcgccaagcagcagcagcagctgatccagcagcagcacaagatcaacctgctgcagcagcagatccagcaggtgaacatgccctacgtgatgatccccgccttcccccccagccaccagcccctgcccgtgacccccgacagccagctggccctgcccatccagcccatcccctgcaagcccgtggagtaccccctgcagctgctgcacagcccccccgcccccgtggtgaagagacccggcgccatggccacccaccaccccctgcaggagcccagccagcccctgaacctgaccgccaagcccaaggcccccgagctgcccaacaccagcagcagccccagcctgaagatgagcagctgcgtgcccagaccccccagccacggcggccccaccagagacctgcagagcagcccccccagcctgcccctgggcttcctgggcgagggcgacgccgtgaccaaggccatccaggacgccagacagctgctgcacagccacagcggcgccctggacggcagccccaacacccccttcagaaaggacctgatcagcctggacagcagccccgccaaggagagactggaggacggctgcgtgcaccccctggaggaggccatgctgagctgcgacatggacggcagcagacacttccccgagagcagaaacagcagccacatcaagagacccatgaacgccttcatggtgtgggccaaggacgagagaagaaagatcctgcaggccttccccgacatgcacaacagcagcatcagcaagatcctgggcagcagatggaagagcatgaccaaccaggagaagcagccctactacgaggagcaggccagactgagcagacagcacctggagaagtaccccgactacaagtacaagcccagacccaagagaacctgcatcgtggagggcaagagactgagagtgggcgagtacaaggccctgatgagaaccagaagacaggacgccagacagagctacgtgatccccccccaggccggccaggtgcagatgagcagcagcgacgtgctgtaccccagagccgccggcatgcccctggcccagcccctggtggagcactacgtgcccagaagcctggaccccaacatgcccgtgatcgtgaacacctgcagcctgagagaggagggcgagggcaccgacgacagacacagcgtggccgacggcgagatgtacagatacagcgaggacgaggacagcgagggcgaggagaagagcgacggcgagctggtggtgctgaccgactag

SEQ ID NO: 100817 - DNA, 174 bp, synthetic construct
  misc_feature 1..174: note = Description of Artificial Sequence: Synthetic coding sequence
  source 1..174: mol_type = other DNA
atgagcatgagaagccccatcagcgcccagctggccctggacggcgtgggcaccatggtgaactgcaccatcaagagcgaggagaagaaggagccctgccacgaggccccccagggcagcgccaccgccgccgagccccagcccggcgaccccgccagagccagccaggactag

SEQ ID NO: 100818 - DNA, 543 bp, synthetic construct
  misc_feature 1..543: note = Description of Artificial Sequence: Synthetic coding sequence
  source 1..543: mol_type = other DNA
atgagcatgagaagccccatcagcgcccagctggccctggacggcgtgggcaccatggtgaactgcaccatcaagagcgaggagaagaaggagccctgccacgaggccccccagggcagcgccaccgccgccgagccccagcccggcgaccccgccagagccagccaggacagcgccgacccccaggcccccgcccagggcaacttcagaggcagctgggactgcagcagccccgagggcaacggcagccccgagcccaagagacccggcgtgagcgaggccgccagcggcagccaggagaagctggacttcaacagaaacctgaaggaggtggtgcccgccatcgagaagctgctgagcagcgactggaaggagagattcctgggcagaaacagcatggaggccaaggacgtgaagggcacccaggagagcctggccgagaaggagctgcagctgctggtgatgatccaccagctgagcaccctgagagaccagctgctgaccgcccacagcgagcagaagaacatggccgccatgctgtag

SEQ ID NO: 100819 - DNA, 723 bp, synthetic construct
  misc_feature 1..723: note = Description of Artificial Sequence: Synthetic coding sequence
  source 1..723: mol_type = other DNA
atgagcaagcccagcgaccacatcaagagacccatgaacgccttcatggtgtggagcagaggccagagaagaaagatggcccaggagaaccccaagatgcacaacagcgagatcagcaagagactgggcgccgagtggaagctgctgagcgaggccgagaagagaccctacatcgacgaggccaagagactgagagcccagcacatgaaggagcaccccgactacaagtacagacccagaagaaagcccaagaacctgctgaagaaggacagatacgtgttccccctgccctacctgggcgacaccgaccccctgaaggccgccggcctgcccgtgggcgccagcgacggcctgctgagcgcccccgagaaggccagagccttcctgccccccgccagcgccccctacagcctgctggaccccgcccagttcagcagcagcgccatccagaagatgggcgaggtgccccacaccctggccaccggcgccctgccctacgccagcaccctgggctaccagaacggcgccttcggcagcctgagctgccccagccagcacacccacacccaccccagccccaccaaccccggctacgtggtgccctgcaactgcaccgcctggagcgccagcaccctgcagccccccgtggcctacatcctgttccccggcatgaccaagaccggcatcgacccctacagcagcgcccacgccaccgccatgtag

SEQ ID NO: 100820 - DNA, 702 bp, synthetic construct
  misc_feature 1..702: note = Description of Artificial Sequence: Synthetic coding sequence
  source 1..702: mol_type = other DNA
atggccctgcccggcagcagccaggaccaggcctggagcctggagccccccgccgccaccgccgccgccagcagcagcagcggcccccaggagagagagggcgccggcagccccgccgcccccggcaccctgcccctggagaaggtgaagagacccatgaacgccttcatggtgtggagcagcgcccagagaagacagatggcccagcagaaccccaagatgcacaacagcgagatcagcaagagactgggcgcccagtggaagctgctggacgaggacgagaagagacccttcgtggaggaggccaagagactgagagccagacacctgagagactaccccgactacaagtacagacccagaagaaaggccaagagcagcggcgccggccccagcagatgcggccagggcagaggcaacctggccagcggcggccccctgtggggccccggctacgccaccacccagcccagcagaggcttcggctacagaccccccagctacagcaccgcctacctgcccggcagctacggcagcagccactgcaagctggaggcccccagcccctgcagcctgccccagagcgaccccagactgcagggcgagctgctgcccacctacacccactacctgccccccggcagccccaccccctacaacccccccctggccggcgcccccatgcccctgacccacctgtag

SEQ ID NO: 100821 - DNA, 702 bp, synthetic construct; identical to SEQ ID NO: 100820
  misc_feature 1..702: note = Description of Artificial Sequence: Synthetic coding sequence
  source 1..702: mol_type = other DNA

SEQ ID NO: 100822 - DNA, 1245 bp, synthetic construct
  misc_feature 1..1245: note = Description of Artificial Sequence: Synthetic coding sequence
  source 1..1245: mol_type = other DNA
atgagcagccccgacgccggctacgccagcgacgaccagagccagacccagagcgccctgcccgccgtgatggccggcctgggcccctgcccctgggccgagagcctgagccccatcggcgacatgaaggtgaagggcgaggcccccgccaacagcggcgcccccgccggcgccgccggcagagccaagggcgagagcagaatcagaagacccatgaacgccttcatggtgtgggccaaggacgagagaaagagactggcccagcagaaccccgacctgcacaacgccgagctgagcaagatgctgggcaagagctggaaggccctgaccctggccgagaagagacccttcgtggaggaggccgagagactgagagtgcagcacatgcaggaccaccccaactacaagtacagacccagaagaagaaagcaggtgaagagactgaagagagtggagggcggcttcctgcacggcctggccgagccccaggccgccgccctgggccccgagggcggcagagtggccatggacggcctgggcctgcagttccccgagcagggcttccccgccggcccccccctgctgcccccccacatgggcggccactacagagactgccagagcctgggcgccccccccctggacggctaccccctgcccacccccgacaccagccccctggacggcgtggaccccgaccccgccttcttcgccgcccccatgcccggcgactgccccgccgccggcacctacagctacgcccaggtgagcgactacgccggcccccccgagccccccgccggccccatgcaccccagactgggccccgagcccgccggccccagcatccccggcctgctggccccccccagcgccctgcacgtgtactacggcgccatgggcagccccggcgccggcggcggcagaggcttccagatgcagccccagcaccagcaccagcaccagcaccagcaccacccccccggccccggccagcccagccccccccccgaggccctgccctgcagagacggcaccgaccccagccagcccgccgagctgctgggcgaggtggacagaaccgagttcgagcagtacctgcacttcgtgtgcaagcccgagatgggcctgccctaccagggccacgacagcggcgtgaacctgcccgacagccacggcgccatcagcagcgtggtgagcgacgccagcagcgccgtgtactactgcaactaccccgacgtgtag

SEQ ID NO: 100823 - DNA, 1155 bp, synthetic construct
  misc_feature 1..1155: note = Description of Artificial Sequence: Synthetic coding sequence
  source 1..1155: mol_type = other DNA
atgcagagaagcccccccggctacggcgcccaggacgacccccccgccagaagagactgcgcctgggcccccggccacggcgccgccgccgacaccagaggcctggccgccggccccgccgccctggccgcccccgccgcccccgccagcccccccagcccccagagaagcccccccagaagccccgagcccggcagatacggcctgagccccgccggcagaggcgagagacaggccgccgacgagagcagaatcagaagacccatgaacgccttcatggtgtgggccaaggacgagagaaagagactggcccagcagaaccccgacctgcacaacgccgtgctgagcaagatgctgggcaaggcctggaaggagctgaacgccgccgagaagagacccttcgtggaggaggccgagagactgagagtgcagcacctgagagaccaccccaactacaagtacagacccagaagaaagaagcaggccagaaaggccagaagactggagcccggcctgctgctgcccggcctggcccccccccagcccccccccgagcccttccccgccgccagcggcagcgccagagccttcagagagctgccccccctgggcgccgagttcgacggcctgggcctgcccacccccgagagaagccccctggacggcctggagcccggcgaggccgccttcttccccccccccgccgcccccgaggactgcgccctgagacccttcagagccccctacgcccccaccgagctgagcagagaccccggcggctgctacggcgcccccctggccgaggccctgagaaccgccccccccgccgcccccctggccggcctgtactacggcaccctgggcacccccggcccctaccccggccccctgagccccccccccgaggccccccccctggagagcgccgagcccctgggccccgccgccgacctgtgggccgacgtggacctgaccgagttcgaccagtacctgaactgcagcagaaccagacccgacgcccccggcctgccctaccacgtggccctggccaagctgggccccagagccatgagctgccccgaggagagcagcctgatcagcgccctgagcgacgccagcagcgccgtgtactacagcgcctgcatcagcggctag

SEQ ID NO: 100824 - DNA, 831 bp, synthetic construct
  misc_feature 1..831: note = Description of Artificial Sequence: Synthetic coding sequence
  source 1..831: mol_type = other DNA
atgagcaagcccgtggaccacgtgaagagacccatgaacgccttcatggtgtggagcagagcccagagaagaaagatggcccaggagaaccccaagatgcacaacagcgagatcagcaagagactgggcgccgagtggaagctgctgaccgagagcgagaagagacccttcatcgacgaggccaagagactgagagccatgcacatgaaggagcaccccgactacaagtacagacccagaagaaagcccaagaccctgctgaagaaggacaagttcgccttccccgtgccctacggcctgggcggcgtggccgacgccgagcaccccgccctgaaggccggcgccggcctgcacgccggcgccggcggcggcctggtgcccgagagcctgctggccaaccccgagaaggccgccgccgccgccgccgccgccgccgccagagtgttcttcccccagagcgccgccgccgccgccgccgccgccgccgccgccgccgccggcagcccctacagcctgctggacctgggcagcaagatggccgagatcagcagcagcagcagcggcctgccctacgccagcagcctgggctaccccaccgccggcgccggcgccttccacggcgccgccgccgccgccgccgccgccgccgccgccgccggcggccacacccacagccaccccagccccggcaaccccggctacatgatcccctgcaactgcagcgcctggcccagccccggcctgcagccccccctggcctacatcctgctgcccggcatgggcaagccccagctggacccctaccccgccgcctacgccgccgccctgtag

SEQ ID NO: 100825 - DNA, 1341 bp, synthetic construct
  misc_feature 1..1341: note = Description of Artificial Sequence: Synthetic coding sequence
  source 1..1341: mol_type = other DNA
atgagacccgtgagagagaacagcagcggcgccagaagccccagagtgcccgccgacctggccagaagcatcctgatcagcctgcccttcccccccgacagcctggcccacagaccccccagcagcgcccccaccgagagccagggcctgttcaccgtggccgcccccgcccccggcgcccccagcccccccgccaccctggcccacctgctgcccgcccccgccatgtacagcctgctggagaccgagctgaagaaccccgtgggcacccccacccaggccgccggcaccggcggccccgccgcccccggcggcgccggcaagagcagcgccaacgccgccggcggcgccaacagcggcggcggcagcagcggcggcgccagcggcggcggcggcggcaccgaccaggacagagtgaagagacccatgaacgccttcatggtgtggagcagaggccagagaagaaagatggccctggagaaccccaagatgcacaacagcgagatcagcaagagactgggcgccgactggaagctgctgaccgacgccgagaagagacccttcatcgacgaggccaagagactgagagccgtgcacatgaaggagtaccccgactacaagtacagacccagaagaaagaccaagaccctgctgaagaaggacaagtacagcctgcccagcggcctgctgccccccggcgccgccgccgccgccgccgccgccgccgccgccgccgccgccgccagcagccccgtgggcgtgggccagagactggacacctacacccacgtgaacggctgggccaacggcgcctacagcctggtgcaggagcagctgggctacgcccagccccccagcatgagcagccccccccccccccccgccctgccccccatgcacagatacgacatggccggcctgcagtacagccccatgatgccccccggcgcccagagctacatgaacgtggccgccgccgccgccgccgccagcggctacggcggcatggcccccagcgccaccgccgccgccgccgccgcctacggccagcagcccgccaccgccgccgccgccgccgccgccgccgccgccatgagcctgggccccatgggcagcgtggtgaagagcgagcccagcagccccccccccgccatcgccagccacagccagagagcctgcctgggcgacctgagagacatgatcagcatgtacctgccccccggcggcgacgccgccgacgccgccagccccctgcccggcggcagactgcacggcgtgcaccagcactaccagggcgccggcaccgccgtgaacggcaccgtgcccctgacccacatctag

SEQ ID NO: 100826 - DNA, 2253 bp, synthetic construct
  misc_feature 1..2253: note = Description of Artificial Sequence: Synthetic coding sequence
  source 1..2253: mol_type = other DNA
atgagcagcaagagacccgccagcccctacggcgaggccgacggcgaggtggccatggtgaccagcagacagaaggtggaggaggaggagagcgacggcctgcccgccttccacctgcccctgcacgtgagcttccccaacaagccccacagcgaggagttccagcccgtgagcctgctgacccaggagacctgcggccacagaacccccaccagccagcacaacaccatggaggtggacggcaacaaggtgatgagcagcttcgccccccacaacagcagcaccagcccccagaaggccgaggagggcggcagacagagcggcgagagcctgagcagcaccgccctgggcacccccgagagaagaaagggcagcctggccgacgtggtggacaccctgaagcagagaaagatggaggagctgatcaagaacgagcccgaggagacccccagcatcgagaagctgctgagcaaggactggaaggacaagctgctggccatgggcagcggcaacttcggcgagatcaagggcacccccgagagcctggccgagaaggagagacagctgatgggcatgatcaaccagctgaccagcctgagagagcagctgctggccgcccacgacgagcagaagaagctggccgccagccagatcgagaagcagagacagcagatggagctggccaagcagcagcaggagcagatcgccagacagcagcagcagctgctgcagcagcagcacaagatcaacctgctgcagcagcagatccaggtgcagggccagctgccccccctgatgatccccgtgttcccccccgaccagagaaccctggccgccgccgcccagcagggcttcctgctgccccccggcttcagctacaaggccggctgcagcgacccctaccccgtgcagctgatccccaccaccatggccgccgccgccgccgccacccccggcctgggccccctgcagctgcagcagctgtacgccgcccagctggccgccatgcaggtgagccccggcggcaagctgcccggcatcccccagggcaacctgggcgccgccgtgagccccaccagcatccacaccgacaagagcaccaacagccccccccccaagagcaaggacgaggtggcccagcccctgaacctgagcgccaagcccaagaccagcgacggcaagagccccaccagccccaccagcccccacatgcccgccctgagaatcaacagcggcgccggccccctgaaggccagcgtgcccgccgccctggccagccccagcgccagagtgagcaccatcggctacctgaacgaccacgacgccgtgaccaaggccatccaggaggccagacagatgaaggagcagctgagaagagagcagcaggtgctggacggcaaggtggccgtggtgaacagcctgggcctgaacaactgcagaaccgagaaggagaagaccaccctggagagcctgacccagcagctggccgtgaagcagaacgaggagggcaagttcagccacgccatgatggacttcaacctgagcggcgacagcgacggcagcgccggcgtgagcgagagcagaatctacagagagagcagaggcagaggcagcaacgagccccacatcaagagacccatgaacgccttcatggtgtgggccaaggacgagagaagaaagatcctgcaggccttccccgacatgcacaacagcaacatcagcaagatcctgggcagcagatggaaggccatgaccaacctggagaagcagccctactacgaggagcaggccagactgagcaagcagcacctggagaagtaccccgactacaagtacaagcccagacccaagagaacctgcctggtggacggcaagaagctgagaatcggcgagtacaaggccatcatgagaaacagaagacaggagatgagacagtacttcaacgtgggccagcaggcccagatccccatcgccaccgccggcgtggtgtaccccggcgccatcgccatggccggcatgcccagcccccacctgcccagcgagcacagcagcgtgagcagcagccccgagcccggcatgcccgtgatccagagcacctacggcgtgaagggcgaggagccccacatcaaggaggagatccaggccgaggacatcaacggcgagatctacgacgagtacgacgaggaggaggacgaccccgacgtggactacggcagcgacagcgagaaccacatcgccggccaggccaactag

SEQ ID NO: 100827 - DNA, 1929 bp, synthetic construct
  misc_feature 1..1929: note = Description of Artificial Sequence: Synthetic coding sequence
  source 1..1929: mol_type = other DNA
atgagcagcaagagacccgccagcccctacggcgaggccgacggcgaggtggccatggtgaccagcagacagaaggtggaggaggaggagagcgacggcctgcccgccttccacctgcccctgcacgtgagcttccccaacaagccccacagcgaggagttccagcccgtgagcctgctgacccaggagacctgcggccacagaacccccaccagccagcacaacaccatggaggtggacggcaacaaggtgatgagcagcttcgccccccacaacagcagcaccagcccccagaaggccgaggagggcggcagacagagcggcgagagcctgagcagcaccgccctgggcacccccgagagaagaaagggcagcctggccgacgtggtggacaccctgaagcagagaaagatggaggagctgatcaagaacgagcccgaggagacccccagcatcgagaagctgctgagcaaggactggaaggacaagctgctggccatgggcagcggcaacttcggcgagatcaagggcacccccgagagcctggccgagaaggagagacagctgatgggcatgatcaaccagctgaccagcctgagagagcagctgctggccgcccacgacgagcagaagaagctggccgccagccagatcgagaagcagagacagcagatggagctggccaagcagcagcaggagcagatcgccagacagcagcagcagctgctgcagcagcagcacaagatcaacctgctgcagcagcagatccaggtgcagggccagctgccccccctgatgatccccgtgttcccccccgaccagagaaccctggccgccgccgcccagcagggcttcctgctgccccccggcttcagctacaaggccggctgcagcgacccctaccccgtgcagctgatccccaccaccatggccgccgccgccgccgccacccccggcctgggccccctgcagctgcagcagctgtacgccgcccagctggccgccatgcaggtgagccccggcggcaagctgcccggcatcccccagggcaacctgggcgccgccgtgagccccaccagcatccacaccgacaagagcaccaacagccccccccccaagagcaaggagaagaccaccctggagagcctgacccagcagctggccgtgaagcagaacgaggagggcaagttcagccacgccatgatggacttcaacctgagcggcgacagcgacggcagcgccggcgtgagcgagagcagaatctacagagagagcagaggcagaggcagcaacgagccccacatcaagagacccatgaacgccttcatggtgtgggccaaggacgagagaagaaagatcctgcaggccttccccgacatgcacaacagcaacatcagcaagatcctgggcagcagatggaaggccatgaccaacctggagaagcagccctactacgaggagcaggccagactgagcaagcagcacctggagaagtaccccgactacaagtacaagcccagacccaagagaacctgcctggtggacggcaagaagctgagaatcggcgagtacaaggccatcatgagaaacagaagacaggagatgagacagtacttcaacgtgggccagcaggcccagatccccatcgccaccgccggcgtggtgtaccccggcgccatcgccatggccggcatgcccagcccccacctgcccagcgagcacagcagcgtgagcagcagccccgagcccggcatgcccgtgatccagagcacctacggcgtgaagggcgaggagccccacatcaaggaggagatccaggccgaggacatcaacggcgagatctacgacgagtacgacgaggaggaggacgaccccgacgtggactacggcagcgacagcgagaaccacatcgccggccaggccaactag

SEQ ID NO: 100828 - DNA, 1134 bp, synthetic construct
  misc_feature 1..1134: note = Description of Artificial Sequence: Synthetic coding sequence
  source 1..1134: mol_type = other DNA
atgcacgacgaggtggcccagcccctgaacctgagcgccaagcccaagaccagcgacggcaagagccccaccagccccaccagcccccacatgcccgccctgagaatcaacagcggcgccggccccctgaaggccagcgtgcccgccgccctggccagccccagcgccagagtgagcaccatcggctacctgaacgaccacgacgccgtgaccaaggccatccaggaggccagacagatgaaggagcagctgagaagagagcagcaggtgctggacggcaaggtggccgtggtgaacagcctgggcctgaacaactgcagaaccgagaaggagaagaccaccctggagagcctgacccagcagctggccgtgaagcagaacgaggagggcaagttcagccacgccatgatggacttcaacctgagcggcgacagcgacggcagcgccggcgtgagcgagagcagaatctacagagagagcagaggcagaggcagcaacgagccccacatcaagagacccatgaacgccttcatggtgtgggccaaggacgagagaagaaagatcctgcaggccttccccgacatgcacaacagcaacatcagcaagatcctgggcagcagatggaaggccatgaccaacctggagaagcagccctactacgaggagcaggccagactgagcaagcagcacctggagaagtaccccgactacaagtacaagcccagacccaagagaacctgcctggtggacggcaagaagctgagaatcggcgagtacaaggccatcatgagaaacagaagacaggagatgagacagtacttcaacgtgggccagcaggcccagatccccatcgccaccgccggcgtggtgtaccccggcgccatcgccatggccggcatgcccagcccccacctgcccagcgagcacagcagcgtgagcagcagccccgagcccggcatgcccgtgatccagagcacctacggcgtgaagggcgaggagccccacatcaaggaggagatccaggccgaggacatcaacggcgagatctacgacgagtacgacgaggaggaggacgaccccgacgtggactacggcagcgacagcgagaaccacatcgccggccaggccaactag

SEQ ID NO: 100829 - DNA, 1764 bp, synthetic construct
  misc_feature 1..1764: note = Description of Artificial Sequence: Synthetic coding sequence
  source 1..1764: mol_type = other DNA
atgagcagcaagagacccgccagcccctacggcgaggccgacggcgaggtggccatggtgaccagcagacagaaggtggaggaggaggagagcgacggcctgcccgccttccacctgcccctgcacgaggtggacggcaacaaggtgatgagcagcttcgccccccacaacagcagcaccagcccccagaaggccgaggagggcggcagacagagcggcgagagcctgagcagcaccgccctgggcacccccgagagaagaaagggcagcctggccgacgtggtggacaccctgaagcagagaaagatggaggagctgatcaagaacgagcccgaggagacccccagcatcgagaagctgctgagcaaggactggaaggacaagctgctggccatgggcagcggcaacttcggcgagatcaagggcacccccgagagcctggccgagaaggagagacagctgatgggcatgatcaaccagctgaccagcctgagagagcagctgctggccgcccacgacgagcagaagaagctggccgccagccagatcgagaagcagagacagcagatggagctggccaagcagcagcaggagcagatcgccagacagcagcagcagctgctgcagcagcagcacaagatcaacctgctgcagcagcagatccaggtgcagggccagctgccccccctgatgatccccgtgttcccccccgaccagagaaccctggccgccgccgcccagcagggcttcctgctgccccccggcttcagctacaaggccggctgcagcgacccctaccccgtgcagctgatccccaccaccatggccgccgccgccgccgccacccccggcctgggccccctgcagctgcagcagctgtacgccgcccagctggccgccatgcaggtgagccccggcggcaagctgcccggcatcccccagggcaacctgggcgccgccgtgagccccaccagcatccacaccgacaagagcaccaacagccccccccccaagagcaaggacgaggtggcccagcccctgaacctgagcgccaagcccaagaccagcgacggcaagagccccaccagccccaccagcccccacatgcccgccctgagaatcaacagcggcgccggccccctgaaggccagcgtgcccgccgccctggccagccccagcgccagagtgagcaccatcggctacctgaacgaccacgacgccgtgaccaaggccatccaggaggccagacagatgaaggagcagctgagaagagagcagcaggtgctggacggcaaggtggccgtggtgaacagcctgggcctgaacaactgcagaaccgagaaggagaagaccaccctggagagcctgacccagcagctggccgtgaagcagaacgaggagggcaagttcagccacgccatgatggacttcaacctgagcggcgacagcgacggcagcgccggcgtgagcgagagcagaatctacagagagagcagaggcagaggcagcaacgagccccacatcaagagacccatgaacgccttcatggtgtgggccaaggacgagagaagaaagatcctgcaggccttccccgacctgggcttcctgtgcgtgtgcatgtacgtgatcatggtgctgatcatcggcatcaccctggaccactgcgagctgaacccccacctgggcatgaagagccacatcctgcccagcgactggagcagaaacaacctggacctggacttcgccctgcagatgaccacctag

SEQ ID NO: 100830 - DNA, 2292 bp, synthetic construct
  misc_feature 1..2292: note = Description of Artificial Sequence: Synthetic coding sequence
  source 1..2292: mol_type = other DNA
atgctgaccgaccccgacctgccccaggagttcgagagaatgagcagcaagagacccgccagcccctacggcgaggccgacggcgaggtggccatggtgaccagcagacagaaggtggaggaggaggagagcgacggcctgcccgccttccacctgcccctgcacgtgagcttccccaacaagccccacagcgaggagttccagcccgtgagcctgctgacccaggagacctgcggccacagaacccccaccagccagcacaacaccatggaggtggacggcaacaaggtgatgagcagcttcgccccccacaacagcagcaccagcccccagaaggccgaggagggcggcagacagagcggcgagagcctgagcagcaccgccctgggcacccccgagagaagaaagggcagcctggccgacgtggtggacaccctgaagcagagaaagatggaggagctgatcaagaacgagcccgaggagacccccagcatcgagaagctgctgagcaaggactggaaggacaagctgctggccatgggcagcggcaacttcggcgagatcaagggcacccccgagagcctggccgagaaggagagacagctgatgggcatgatcaaccagctgaccagcctgagagagcagctgctggccgcccacgacgagcagaagaagctggccgccagccagatcgagaagcagagacagcagatggagctggccaagcagcagcaggagcagatcgccagacagcagcagcagctgctgcagcagcagcacaagatcaacctgctgcagcagcagatccaggtgcagggccagctgccccccctgatgatccccgtgttcccccccgaccagagaaccctggccgccgccgcccagcagggcttcctgctgccccccggcttcagctacaaggccggctgcagcgacccctaccccgtgcagctgatccccaccaccatggccgccgccgccgccgccacccccggcctgggccccctgcagctgcagcagctgtacgccgcccagctggccgccatgcaggtgagccccggcggcaagctgcccggcatcccccagggcaacctgggcgccgccgtgagccccaccagcatccacaccgacaagagcaccaacagccccccccccaagagcaaggacgaggtggcccagcccctgaacctgagcgccaagcccaagaccagcgacggcaagagccccaccagccccaccagcccccacatgcccgccctgagaatcaacagcggcgccggccccctgaaggccagcgtgcccgccgccctggccagccccagcgccagagtgagcaccatcggctacctgaacgaccacgacgccgtgaccaaggccatccaggaggccagacagatgaaggagcagctgagaagagagcagcaggtgctggacggcaaggtggccgtggtgaacagcctgggcctgaacaactgcagaaccgagaaggagaagaccaccctggagagcctgacccagcagctggccgtgaagcagaacgaggagggcaagttcagccacgccatgatggacttcaacctgagcggcgacagcgacggcagcgccggcgtgagcgagagcagaatctacagagagagcagaggcagaggcagcaacgagccccacatcaagagacccatgaacgccttcatggtgtgggccaaggacgagagaagaaagatcctgcaggccttccccgacatgcacaacagcaacatcagcaagatcctgggcagcagatggaaggccatgaccaacctggagaagcagccctactacgaggagcaggccagactgagcaagcagcacctggagaagtaccccgactacaagtacaagcccagacccaagagaacctgcctggtggacggcaagaagctgagaatcggcgagtacaaggccatcatgagaaacagaagacaggagatgagacagtacttcaacgtgggccagcaggcccagatccccatcgccaccgccggcgtggtgtaccccggcgccatcgccatggccggcatgcccagcccccacctgcccagcgagcacagcagcgtgagcagcagccccgagcccggcatgcccgtgatccagagcacctacggcgtgaagggcgaggagccccacatcaaggaggagatccaggccgaggacatcaacggcgagatctacgacgagtacgacgaggaggaggacgaccccgacgtggactacggcagcgacagcgagaaccacatcgccggccaggccaactag

SEQ ID NO: 100831 - DNA, 1929 bp, synthetic construct; identical to SEQ ID NO: 100827
  misc_feature 1..1929: note = Description of Artificial Sequence: Synthetic coding sequence
  source 1..1929: mol_type = other DNA

SEQ ID NO: 100832 - DNA, 2253 bp, synthetic construct; identical to SEQ ID NO: 100826
  misc_feature 1..2253: note = Description of Artificial Sequence: Synthetic coding sequence
  source 1..2253: mol_type = other DNA

SEQ ID NO: 100833 - DNA, 2427 bp, synthetic construct
  misc_feature 1..2427: note = Description of Artificial Sequence: Synthetic coding sequence
  source 1..2427: mol_type = other DNA
atgagcagcaagcaggccaccagccccttcgcctgcgccgccgacggcgaggacgccatgacccaggacctgaccagcagagagaaggaggagggcagcgaccagcacgtggccagccacctgcccctgcaccccatcatgcacaacaagccccacagcgaggagctgcccaccctggtgagcaccatccagcaggacgccgactgggacagcgtgctgagcagccagcagagaatggagagcgagaacaacaagctgtgcagcctgtacagcttcagaaacaccagcaccagcccccacaagcccgacgagggcagcagagacagagagatcatgaccagcgtgaccttcggcacccccgagagaagaaagggcagcctggccgacgtggtggacaccctgaagcagaagaagctggaggagatgaccagaaccgagcaggaggacagcagctgcatggagaagctgctgagcaaggactggaaggagaagatggagagactgaacaccagcgagctgctgggcgagatcaagggcacccccgagagcctggccgagaaggagagacagctgagcaccatgatcacccagctgatcagcctgagagagcagctgctggccgcccacgacgagcagaagaagctggccgccagccagatcgagaagcagagacagcagatggacctggccagacagcagcaggagcagatcgccagacagcagcagcagctgctgcagcagcagcacaagatcaacctgctgcagcagcagatccaggtgcagggccacatgccccccctgatgatccccatcttcccccacgaccagagaaccctggccgccgccgccgccgcccagcagggcttcctgttcccccccggcatcacctacaagcccggcgacaactaccccgtgcagttcatccccagcaccatggccgccgccgccgccagcggcctgagccccctgcagctgcagaagggccacgtgagccacccccagatcaaccagagactgaagggcctgagcgacagattcggcagaaacctggacaccttcgagcacggcggcggccacagctacaaccacaagcagatcgagcagctgtacgccgcccagctggccagcatgcaggtgagccccggcgccaagatgcccagcaccccccagccccccaacaccgccggcaccgtgagccccaccggcatcaagaacgagaagagaggcaccagccccgtgacccaggtgaaggacgaggccgccgcccagcccctgaacctgagcagcagacccaagaccgccgagcccgtgaagagccccaccagccccacccagaacctgttccccgccagcaagaccagccccgtgaacctgcccaacaagagcagcatccccagccccatcggcggcagcctgggcagaggcagcagcctggacatcctgagcagcctgaacagccccgccctgttcggcgaccaggacaccgtgatgaaggccatccaggaggccagaaagatgagagagcagatccagagagagcagcagcagcagcagccccacggcgtggacggcaagctgagcagcatcaacaacatgggcctgaacagctgcagaaacgagaaggagagaaccagattcgagaacctgggcccccagctgaccggcaagagcaacgaggacggcaagctgggccccggcgtgatcgacctgaccagacccgaggacgccgagggcggcgccaccgtggccgaggccagagtgtacagagacgccagaggcagagccagcagcgagccccacatcaagagacccatgaacgccttcatggtgtgggccaaggacgagagaagaaagatcctgcaggccttccccgacatgcacaacagcaacatcagcaagatcctgggcagcagatggaagagcatgagcaaccaggagaagcagccctactacgaggagcaggccagactgagcaagatccacctggagaagtaccccaactacaagtacaagcccagacccaagagaacctgcatcgtggacggcaagaagctgagaatcggcgagtacaagcagctgatgagaagcagaagacaggagatgagacagttcttcaccgtgggccagcagccccagatccccatcaccaccggcaccggcgtggtgtaccccggcgccatcaccatggccaccaccacccccagcccccagatgaccagcgactgcagcagcaccagcgccagccccgagcccagcctgcccgtgatccagagcacctacggcatgaagaccgacggcggcagcctggccggcaacgagatgatcaacggcgaggacgagatggagatgtacgacgactacgaggacgaccccaagagcgactacagcagcgagaacgaggcccccgaggccgtgagcgccaactag

SEQ ID NO: 100834 - DNA, 2487 bp, synthetic construct
  misc_feature 1..2487: note = Description of Artificial Sequence: Synthetic coding sequence
  source 1..2487: mol_type = other DNA
atgagcagcaagcaggccaccagccccttcgcctgcgccgccgacggcgaggacgccatgacccaggacctgaccagcagagagaaggaggagggcagcgaccagcacgtggccagccacctgcccctgcaccccatcatgcacaacaagccccacagcgaggagctgcccaccctggtgagcaccatccagcaggacgccgactgggacagcgtgctgagcagccagcagagaatggagagcgagaacaacaagctgtgcagcctgtacagcttcagaaacaccagcaccagcccccacaagcccgacgagggcagcagagacagagagatcatgaccagcgtgaccttcggcacccccgagagaagaaagggcagcctggccgacgtggtggacaccctgaagcagaagaagctggaggagatgaccagaaccgagcaggaggacagcagctgcatggagaagctgctgagcaaggactggaaggagaagatggagagactgaacaccagcgagctgctgggcgagatcaagggcacccccgagagcctggccgagaaggagagacagctgagcaccatgatcacccagctgatcagcctgagagagcagctgctggccgcccacgacgagcagaagaagctggccgccagccagatcgagaagcagagacagcagatggacctggccagacagcagcaggagcagatcgccagacagcagcagcagctgctgcagcagcagcacaagatcaacctgctgcagcagcagatccaggtgcagggccacatgccccccctgatgatccccatcttcccccacgaccagagaaccctggccgccgccgccgccgcccagcagggcttcctgttcccccccggcatcacctacaagcccggcgacaactaccccgtgcagttcatccccagcaccatggccgccgccgccgccagcggcctgagccccctgcagctgcagaagggccacgtgagccacccccagatcaaccagagactgaagggcctgagcgacagattcggcagaaacctggacaccttcgagcacggcggcggccacagctacaaccacaagcagatcgagcagctgtacgccgcccagctggccagcatgcaggtgagccccggcgccaagatgcccagcaccccccagccccccaacaccgccggcaccgtgagccccaccggcatcaagaacgagaagagaggcaccagccccgtgacccaggtgaaggacgaggccgccgcccagcccctgaacctgagcagcagacccaagaccgccgagcccgtgaagagccccaccagccccacccagaacctgttccccgccagcaagaccagccccgtgaacctgcccaacaagagcagcatccccagccccatcggcggcagcctgggcagaggcagcagcctggacatcctgagcagcctgaacagccccgccctgttcggcgaccaggacaccgtgatgaaggccatccaggaggccagaaagatgagagagcagatccagagagagcagcagcagcagcagccccacggcgtggacggcaagctgagcagcatcaacaacatgggcctgaacagctgcagaaacgagaaggagagaaccagattcgagaacctgggcccccagctgaccggcaagagcaacgaggacggcaagctgggccccggcgtgatcgacctgaccagacccgaggacgccgagggcagcaaggccatgaacggcagcgccgccaagctgcagcagtactactgctggcccaccggcggcgccaccgtggccgaggccagagtgtacagagacgccagaggcagagccagcagcgagccccacatcaagagacccatgaacgccttcatggtgtgggccaaggacgagagaagaaagatcctgcaggccttccccgacatgcacaacagcaacatcagcaagatcctgggcagcagatggaagagcatgagcaaccaggagaagcagccctactacgaggagcaggccagactgagcaagatccacctggagaagtaccccaactacaagtacaagcccagacccaagagaacctgcatcgtggacggcaagaagctgagaatcggcgagtacaagcagctgatgagaagcagaagacaggagatgagacagttcttcaccgtgggccagcagccccagatccccatcaccaccggcaccggcgtggtgtaccccggcgccatcaccatggccaccaccacccccagcccccagatgaccagcgactgcagcagcaccagcgccagccccgagcccagcctgcccgtgatccagagcacctacggcatgaagaccgacggcggcagcctggccggcaacgagatgatcaacggcgaggacgagatggagatgtacgacgactacgaggacgaccccaagagcgactacagcagcgagaacgaggcccccgaggccgtgagcgccaactag

SEQ ID NO: 100835 - DNA, 2427 bp, synthetic construct; identical to SEQ ID NO: 100833
  misc_feature 1..2427: note = Description of Artificial Sequence: Synthetic coding sequence
  source 1..2427: mol_type = other DNA

SEQ ID NO: 100836 - DNA, 420 bp, synthetic construct
  misc_feature 1..420: note = Description of Artificial Sequence: Synthetic coding sequence
  source 1..420: mol_type = other DNA
atgagcagcaagcaggccaccagccccttcgcctgcgccgccgacggcgaggacgccatgacccaggacctgaccagcagagagaaggaggagggcagcgaccagcacgtggccagccacctgcccctgcaccccatcatgcacaacaagccccacagcgaggagctgcccaccctggtgagcaccatccagcaggacgccgactgggacagcgtgctgagcagccagcagagaatggagagcgagaacaacaagctgtgcagcctgtacagcttcagaaacaccagcaccagcccccacaagcccgacgagggcagcagagacagagagatcatgaccagcgtgaccttcggcacccccgagagaagaaagggcagcctggccgacgtggtggacaccctgaagcagaagaagctgtag

SEQ ID NO: 100837 - DNA, 2406 bp, synthetic construct
  misc_feature 1..2406: note = Description of Artificial Sequence: Synthetic coding sequence
  source 1..2406: mol_type = other DNA
atgagcagcaagcaggccaccagccccttcgcctgcgccgccgacggcgaggacgccatgacccaggacctgaccagcagagagaaggaggagggcagcgaccagcacgtggccagccacctgcccctgcaccccatcatgcacaacaagccccacagcgaggagctgcccaccctggtgagcaccatccagcaggacgccgactgggacagcgtgctgagcagccagcagagaatggagagcgagaacaacaagctgtgcagcctgtacagcttcagaaacaccagcaccagcccccacaagcccgacgagggcagcagagacagagagatcatgaccagcgtgaccttcggcacccccgagagaagaaagggcagcctggccgacgtggtggacaccctgaagcagaagaagctggaggagatgaccagaaccgagcaggaggacagcagctgcatggagaagctgctgagcaaggactggaaggagaagatggagagactgaacaccagcgagctgctgggcgagatcaagggcacccccgagagcctggccgagaaggagagacagctgagcaccatgatcacccagctgatcagcctgagagagcagctgctggccgcccacgacgagcagaagaagctggccgccagccagatcgagaagcagagacagcagatggacctggccagacagcagcaggagcagatcgccagacagcagcagcagctgctgcagcagcagcacaagatcaacctgctgcagcagcagatccaggtgcagggccacatgccccccctgatgatccccatcttcccccacgaccagagaaccctggccgccgccgccgccgcccagcagggcttcctgttcccccccggcatcacctacaagcccggcgacaactaccccgtgcagttcatccccagcaccatggccgccgccgccgccagcggcctgagccccctgcagctgcagcagctgtacgccgcccagctggccagcatgcaggtgagccccggcgccaagatgcccagcaccccccagccccccaacaccgccggcaccgtgagccccaccggcatcaagaacgagaagagaggcaccagccccgtgacccaggtgaaggacgaggccgccgcccagcccctgaacctgagcagcagacccaagaccgccgagcccgtgaagagccccaccagccccacccagaacctgttccccgccagcaagaccagccccgtgaacctgcccaacaagagcagcatccccagccccatcggcggcagcctgggcagaggcagcagcctgggcaagtggaagagccagcaccaggaggagacctacgagctggacatcctgagcagcctgaacagccccgccctgttcggcgaccaggacaccgtgatgaaggccatccaggaggccagaaagatgagagagcagatccagagagagcagcagcagcagcagccccacggcgtggacggcaagctgagcagcatcaacaacatgggcctgaacagctgcagaaacgagaaggagagaaccagattcgagaacctgggcccccagctgaccggcaagagcaacgaggacggcaagctgggccccggcgtgatcgacctgaccagacccgaggacgccgagggcagcaaggccatgaacggcagcgccgccaagctgcagcagtactactgctggcccaccggcggcgccaccgtggccgaggccagagtgtacagagacgccagaggcagagccagcagcgagccccacatcaagagacccatgaacgccttcatggtgtgggccaaggacgagagaagaaagatcctgcaggccttccccgacatgcacaacagcaacatcagcaagatcctgggcagcagatggaagagcatgagcaaccaggagaagcagccctactacgaggagcaggccagactgagcaagatccacctggagaagtaccccaactacaagtacaagcccagacccaagagaacctgcatcgtggacggcaagaagctgagaatcggcgagtacaagcagctgatgagaagcagaagacaggagatgagacagttcttcaccgtgggccagcagccccagatccccatcaccaccggcaccggcgtggtgtaccccggcgccatcaccatggccaccaccacccccagcccccagatgaccagcgactgcagcagcaccagcgccagccccgagcccagcctgcccgtgatccagagcacctacggcatgaagaccgacggcggcagcctggccggcaacgagatgatcaacggcgaggacgagatggagatgtacgacgactacgaggacgaccccaagagcgactacagcagcgagaacgaggcccccgaggccgtgagcgccaactag

SEQ ID NO: 100838 - DNA, 2487 bp, synthetic construct; identical to SEQ ID NO: 100834
  misc_feature 1..2487: note = Description of Artificial Sequence: Synthetic coding sequence
  source 1..2487: mol_type = other DNA

SEQ ID NO: 100839 - DNA, 240 bp, synthetic construct
  misc_feature 1..240: note = Description of Artificial Sequence: Synthetic coding sequence
  source 1..240: mol_type = other DNA
atgagcagcaagcaggccaccagccccttcgcctgcgccgccgacggcgaggacgccatgacccaggacctgaccagcagagagaaggaggagggcagcgaccagcacgtggccagccacctgcccctgcaccccatcatgcacaacaagccccacagcgaggagctgcccaccctggtgagcaccatccagcaggacgccgactgggacagcgtgctgagcagccagcagagaatgtag

SEQ ID NO: 100840 - DNA, 480 bp, synthetic construct
  misc_feature 1..480: note = Description of Artificial Sequence: Synthetic coding sequence
  source 1..480: mol_type = other DNA
atgagcagcaagcaggccaccagccccttcgcctgcgccgccgacggcgaggacgccatgacccaggacctgaccagcagagagaaggaggagggcagcgaccagcacgtggccagccacctgcccctgcaccccatcatgcacaacaagccccacagcgaggagctgcccaccctggtgagcaccatccagcaggacgccgactgggacagcgtgctgagcagccagcagagaatggagagcgagaacaacaagctgtgcagcctgtacagcttcagaaacaccagcaccagcccccacaagcccgacgagggcagcagagacagagagatcatgaccagcgtgaccttcggcacccccgagagaagaaagggcagcctggccgacgtggtggacaccctgaagcagaagaagctggaggagatgaccagaaccgagcaggaggacagcagctgcatggagaagctgctgagcaagtag

SEQ ID NO: 100841 - DNA, 2415 bp, synthetic construct
  misc_feature 1..2415: note = Description of Artificial Sequence: Synthetic coding sequence
  source 1..2415: mol_type = other DNA
atgggcagaatgagcagcaagcaggccaccagccccttcgcctgcgccgccgacggcgaggacgccatgacccaggacctgaccagcagagagaaggaggagggcagcgaccagcacgtggccagccacctgcccctgcaccccatcatgcacaacaagccccacagcgaggagctgcccaccctggtgagcaccatccagcaggacgccgactgggacagcgtgctgagcagccagcagagaatggagagcgagaacaacaagctgtgcagcctgtacagcttcagaaacaccagcaccagcccccacaagcccgacgagggcagcagagacagagagatcatgaccagcgtgaccttcggcacccccgagagaagaaagggcagcctggccgacgtggtggacaccctgaagcagaagaagctggaggagatgaccagaaccgagcaggaggacagcagctgcatggagaagctgctgagcaaggactggaaggagaagatggagagactgaacaccagcgagctgctgggcgagatcaagggcacccccgagagcctggccgagaaggagagacagctgagcaccatgatcacccagctgatcagcctgagagagcagctgctggccgcccacgacgagcagaagaagctggccgccagccagatcgagaagcagagacagcagatggacctggccagacagcagcaggagcagatcgccagacagcagcagcagctgctgcagcagcagcacaagatcaacctgctgcagcagcagatccaggtgcagggccacatgccccccctgatgatccccatcttcccccacgaccagagaaccctggccgccgccgccgccgcccagcagggcttcctgttcccccccggcatcacctacaagcccggcgacaactaccccgtgcagttcatccccagcaccatggccgccgccgccgccagcggcctgagccccctgcagctgcagcagctgtacgccgcccagctggccagcatgcaggtgagccccggcgccaagatgcccagcaccccccagccccccaacaccgccggcaccgtgagccccaccggcatcaagaacgagaagagaggcaccagccccgtgacccaggtgaaggacgaggccgccgcccagcccctgaacctgagcagcagacccaagaccgccgagcccgtgaagagccccaccagccccacccagaacctgttccccgccagcaagaccagccccgtgaacctgcccaacaagagcagcatccccagccccatcggcggcagcctgggcagaggcagcagcctgggcaagtggaagagccagcaccaggaggagacctacgagctggacatcctgagcagcctgaacagccccgccctgttcggcgaccaggacaccgtgatgaaggccatccaggaggccagaaagatgagagagcagatccagagagagcagcagcagcagcagccccacggcgtggacggcaagctgagcagcatcaacaacatgggcctgaacagctgcagaaacgagaaggagagaaccagattcgagaacctgggcccccagctgaccggcaagagcaacgaggacggcaagctgggccccggcgtgatcgacctgaccagacccgaggacgccgagggcagcaaggccatgaacggcagcgccgccaagctgcagcagtactactgctggcccaccggcggcgccaccgtggccgaggccagagtgtacagagacgccagaggcagagccagcagcgagccccacatcaagagacccatgaacgccttcatggtgtgggccaaggacgagagaagaaagatcctgcaggccttccccgacatgcacaacagcaacatcagcaagatcctgggcagcagatggaagagcatgagcaaccaggagaagcagccctactacgaggagcaggccagactgagcaagatccacctggagaagtaccccaactacaagtacaagcccagacccaagagaacctgcatcgtggacggcaagaagctgagaatcggcgagtacaagcagctgatgagaagcagaagacaggagatgagacagttcttcaccgtgggccagcagccccagatccccatcaccaccggcaccggcgtggtgtaccccggcgccatcaccatggccaccaccacccccagcccccagatgaccagcgactgcagcagcaccagcgccagccccgagcccagcctgcccgtgatccagagcacctacggcatgaagaccgacggcggcagcctggccggcaacgagatgatcaacggcgaggacgagatggagatgtacgacgactacgaggacgaccccaagagcgactacagcagcgagaacgaggcccccgaggccgtgagcgccaactag

SEQ ID NO: 100842 - DNA, 1167 bp, synthetic construct
  misc_feature 1..1167: note = Description of Artificial Sequence: Synthetic coding sequence
  source 1..1167: mol_type = other DNA
atggccagcctgctgggcgcctacccctggcccgagggcctggagtgccccgccctggacgccgagctgagcgacggccagagcccccccgccgtgcccagaccccccggcgacaagggcagcgagagcagaatcagaagacccatgaacgccttcatggtgtgggccaaggacgagagaaagagactggccgtgcagaaccccgacctgcacaacgccgagctgagcaagatgctgggcaagagctggaaggccctgaccctgagccagaagagaccctacgtggacgaggccgagagactgagactgcagcacatgcaggactaccccaactacaagtacagacccagaagaaagaagcaggccaagagactgtgcaagagagtggaccccggcttcctgctgagcagcctgagcagagaccagaacgccctgcccgagaagagaagcggcagcagaggcgccctgggcgagaaggaggacagaggcgagtacagccccggcaccgccctgcccagcctgagaggctgctaccacgagggccccgccggcggcggcggcggcggcacccccagcagcgtggacacctacccctacggcctgcccaccccccccgagatgagccccctggacgtgctggagcccgagcagaccttcttcagcagcccctgccaggaggagcacggccaccccagaagaatcccccacctgcccggccacccctacagccccgagtacgcccccagccccctgcactgcagccaccccctgggcagcctggccctgggccagagccccggcgtgagcatgatgagccccgtgcccggctgcccccccagccccgcctactacagccccgccacctaccaccccctgcacagcaacctgcaggcccacctgggccagctgagccccccccccgagcaccccggcttcgacgccctggaccagctgagccaggtggagctgctgggcgacatggacagaaacgagttcgaccagtacctgaacacccccggccaccccgacagcgccaccggcgccatggccctgagcggccacgtgcccgtgagccaggtgacccccaccggccccaccgagaccagcctgatcagcgtgctggccgacgccaccgccacctactacaacagctacagcgtgagctag

SEQ ID NO: 100843 - DNA, 1323 bp, synthetic construct
  misc_feature 1..1323: note = Description of Artificial Sequence: Synthetic coding sequence
  source 1..1323: mol_type = other DNA
atgagcatgctggccgagagaagaagaaagcagaagtgggccgtggacccccagaacaccgcctggagcaacgacgacagcaagttcggccagagaatgctggagaagatgggctggagcaagggcaagggcctgggcgcccaggagcagggcgccaccgaccacatcaaggtgcaggtgaagaacaaccacctgggcctgggcgccaccatcaacaacgaggacaactggatcgcccaccaggacgacttcaaccagctgctggccgagctgaacacctgccacggccaggagaccaccgacagcagcgacaagaaggagaagaagagcttcagcctggaggagaagagcaagatcagcaagaacagagtgcactacatgaagttcaccaagggcaagagctggaaggccctgaccctgagccagaagagaccctacgtggacgaggccgagagactgagactgcagcacatgcaggactaccccaactacaagtacagacccagaagaaagaagcaggccaagagactgtgcaagagagtggaccccggcttcctgctgagcagcctgagcagagaccagaacgccctgcccgagaagagaagcggcagcagaggcgccctgggcgagaaggaggacagaggcgagtacagccccggcaccgccctgcccagcctgagaggctgctaccacgagggccccgccggcggcggcggcggcggcacccccagcagcgtggacacctacccctacggcctgcccaccccccccgagatgagccccctggacgtgctggagcccgagcagaccttcttcagcagcccctgccaggaggagcacggccaccccagaagaatcccccacctgcccggccacccctacagccccgagtacgcccccagccccctgcactgcagccaccccctgggcagcctggccctgggccagagccccggcgtgagcatgatgagccccgtgcccggctgcccccccagccccgcctactacagccccgccacctaccaccccctgcacagcaacctgcaggcccacctgggccagctgagccccccccccgagcaccccggcttcgacgccctggaccagctgagccaggtggagctgctgggcgacatggacagaaacgagttcgaccagtacctgaacacccccggccaccccgacagcgccaccggcgccatggccctgagcggccacgtgcccgtgagccaggtgacccccaccggccccaccgagaccagcctgatcagcgtgctggccgacgccaccgccacctactacaacagctacagcgtgagctag

SEQ ID NO: 100844 - DNA, 1341 bp, synthetic construct
  misc_feature 1..1341: note = Description of Artificial Sequence: Synthetic coding sequence
  source 1..1341: mol_type = other DNA
atgctggacatgagcgaggccagaagccagcccccctgcagccccagcggcaccgccagcagcatgagccacgtggaggacagcgacagcgacgccccccccagccccgccggcagcgagggcctgggcagagccggcgtggccgtgggcggcgccagaggcgaccccgccgaggccgccgacgagagattccccgcctgcatcagagacgccgtgagccaggtgctgaagggctacgactggagcctggtgcccatgcccgtgagaggcggcggcggcggcgccctgaaggccaagccccacgtgaagagacccatgaacgccttcatggtgtgggcccaggccgccagaagaaagctggccgaccagtacccccacctgcacaacgccgagctgagcaagaccctgggcaagctgtggagactgctgagcgagagcgagaagagacccttcgtggaggaggccgagagactgagagtgcagcacaagaaggaccaccccgactacaagtaccagcccagaagaagaaagagcgccaaggccggccacagcgacagcgacagcggcgccgagctgggcccccaccccggcggcggcgccgtgtacaaggccgaggccggcctgggcgacggccaccaccacggcgaccacaccggccagacccacggcccccccaccccccccaccacccccaagaccgagctgcagcaggccggcgccaagcccgagctgaagctggagggcagaagacccgtggacagcggcagacagaacatcgacttcagcaacgtggacatcagcgagctgagcagcgaggtgatgggcaccatggacgccttcgacgtgcacgagttcgaccagtacctgcccctgggcggccccgccccccccgagcccggccaggcctacggcggcgcctacttccacgccggcgccagccccgtgtgggcccacaagagcgcccccagcgccagcgccagccccaccgagaccggcccccccagaccccacatcaagaccgagcagcccagccccggccactacggcgaccagcccagaggcagccccgactacggcagctgcagcggccagagcagcgccacccccgccgcccccgccggccccttcgccggcagccagggcgactacggcgacctgcaggccagcagctactacggcgcctaccccggctacgcccccggcctgtaccagtacccctgcttccacagccccagaagaccctacgccagccccctgctgaacggcctggccctgccccccgcccacagccccaccagccactgggaccagcccgtgtacaccaccctgaccagaccctag

SEQ ID NO: 100845 - DNA, 1530 bp, synthetic construct
  misc_feature 1..1530: note = Description of Artificial Sequence: Synthetic coding sequence
  source 1..1530: mol_type = other DNA
atgaacctgctggaccccttcatgaagatgaccgacgagcaggagaagggcctgagcggcgcccccagccccaccatgagcgaggacagcgccggcagcccctgccccagcggcagcggcagcgacaccgagaacaccagaccccaggagaacaccttccccaagggcgagcccgacctgaagaaggagagcgaggaggacaagttccccgtgtgcatcagagaggccgtgagccaggtgctgaagggctacgactggaccctggtgcccatgcccgtgagagtgaacggcagcagcaagaacaagccccacgtgaagagacccatgaacgccttcatggtgtgggcccaggccgccagaagaaagctggccgaccagtacccccacctgcacaacgccgagctgagcaagaccctgggcaagctgtggagactgctgaacgagagcgagaagagacccttcgtggaggaggccgagagactgagagtgcagcacaagaaggaccaccccgactacaagtaccagcccagaagaagaaagagcgtgaagaacggccaggccgaggccgaggaggccaccgagcagacccacatcagccccaacgccatcttcaaggccctgcaggccgacagcccccacagcagcagcggcatgagcgaggtgcacagccccggcgagcacagcggccagagccagggcccccccaccccccccaccacccccaagaccgacgtgcagcccggcaaggccgacctgaagagagagggcagacccctgcccgagggcggcagacagccccccatcgacttcagagacgtggacatcggcgagctgagcagcgacgtgatcagcaacatcgagaccttcgacgtgaacgagttcgaccagtacctgccccccaacggccaccccggcgtgcccgccacccacggccaggtgacctacaccggcagctacggcatcagcagcaccgccgccacccccgccagcgccggccacgtgtggatgagcaagcagcaggccccccccccccccccccagcagcccccccaggccccccccgccccccaggcccccccccagccccaggccgcccccccccagcagcccgccgcccccccccagcagccccaggcccacaccctgaccaccctgagcagcgagcccggccagagccagagaacccacatcaagaccgagcagctgagccccagccactacagcgagcagcagcagcacagcccccagcagatcgcctacagccccttcaacctgccccactacagccccagctacccccccatcaccagaagccagtacgactacaccgaccaccagaacagcagcagctactacagccacgccgccggccagggcaccggcctgtacagcaccttcacctacatgaaccccgcccagagacccatgtacacccccatcgccgacaccagcggcgtgcccagcatcccccagacccacagcccccagcactgggagcagcccgtgtacacccagctgaccagaccctag

SEQ ID NO: 100846 - DNA, 1338 bp, synthetic construct
  misc_feature 1..1338: note = Description of Artificial Sequence: Synthetic coding sequence
  source 1..1338: mol_type = other DNA
atgaacctgctggaccccttcatgaagatgaccgacgagcaggagaagggcctgagcggcgcccccagccccaccatgagcgaggacagcgccggcagcccctgccccagcggcagcggcagcgacaccgagaacaccagaccccaggagaacaccttccccaagggcgagcccgacctgaagaaggagagcgaggaggacaagttccccgtgtgcatcagagaggccgtgagccaggtgctgaagggctacgactggaccctggtgcccatgcccgtgagagtgaacggcagcagcaagaacaagccccacgtgaagagacccatgaacgccttcatggtgtgggcccaggccgccagaagaaagctggccgaccagtacccccacctgcacaacgccgagctgagcaagaccctgggcaagctgtggagactgctgaacgagagcgagaagagacccttcgtggaggaggccgagagactgagagtgcagcacaagaaggaccaccccgactacaagtaccagcccagaagaagaaagagcgtgaagaacggccaggccgaggccgaggaggccaccgagcagacccacatcagccccaacgccatcttcaaggccctgcaggccgacagcccccacagcagcagcggcatgagcgaggtgcacagccccggcgagcacagcggccagagccagggcccccccaccccccccaccacccccaagaccgacgtgcagcccggcaaggccgacctgaagagagagggcagacccctgcccgagggcggcagacagccccccatcgacttcagagacgtggacatcggcgagctgagcagcgacgtgatcagcaacatcgagaccttcgacgtgaacgagttcgaccagtacctgccccccaacggccaccccggcgtgcccgccacccacggccaggtgacctacaccggcagctacggcatcagcagcaccgccgccacccccgccagcgccggccacgtgtggatgagcaagcagcaggccccccccccccccccccagcagcacagcccccagcagatcgcctacagccccttcaacctgccccactacagccccagctacccccccatcaccagaagccagtacgactacaccgaccaccagaacagcagcagctactacagccacgccgccggccagggcaccggcctgtacagcaccttcacctacatgaaccccgcccagagacccatgtacacccccatcgccgacaccagcggcgtgcccagcatcccccagacccacagcccccagcactgggagcagcccgtgtacacccagctgaccagaccctag

SEQ ID NO: 100847 - DNA, 273 bp, synthetic construct
  misc_feature 1..273: note = Description of Artificial Sequence: Synthetic coding sequence
  source 1..273: mol_type = other DNA
atgagaggctacctggtggccatcttcctgagcgccgtgttcctgtactacgtgctgcactgcatcctgtggggcaccaacgtgtactgggtggcccccgtggagatgaagagaagaaacaagatccagccctgcctgagcaagcccgccttcgccagcctgctgagccagagcagcgcctacatcctgagaaagggcatcgaggagctgaaccagaccagcatcctgttcacccaggtgagcagcgtgagccccttcagcgtgtgcggctag

SEQ ID NO: 100848 - DNA, 273 bp, synthetic construct; identical to SEQ ID NO: 100847
  misc_feature 1..273: note = Description of Artificial Sequence: Synthetic coding sequence
  source 1..273: mol_type = other DNA

SEQ ID NO: 100849 - DNA, 1335 bp, synthetic construct
  misc_feature 1..1335: note = Description of Artificial Sequence: Synthetic coding sequence
  source 1..1335: mol_type = other DNA
atgggcctgctggtgttcgtgagaaacctgctgctggccctgtgcctgttcctggtgctgggcttcctgtactacagcgcctggaagctgcacctgctgcagtgggaggaggacagcagcaagtacagccacagcagcagcccccaggagaagcccgtggccgacagcgtggtgctgagcttcgacagcgccggccagaccctgggcagcgagtacgacagactgggcttcctgctgaacctggacagcaagctgagccccagaaccctgtgcaccgtggtgttcggcctggactgcatcctggagagccccggcgagcccaagaagctgctgatgcccgccagccaccccctggagatcctgaagagcctgagcgaggacaccgccttcgccctgggcttcctgaagctgcccagacccgccgagctggccaccaagtacgccaacttcagcgagggcgcctgcaagcccggctacgccagcgccctgatgaccgccatcttccccagattcagcaagcccgcccccatgttcctggacgacagcttcagaaagtgggccagaatcagagagttcgtgccccccttcggcatcaagggccaggacaacctgatcaaggccatcctgagcgtgaccaaggagtacagactgacccccgccctggacagcctgagatgcagaagatgcatcatcgtgggcaacggcggcgtgctggccaacaagagcctgggcagcagaatcgacgactacgacatcgtggtgagactgaacagcgcccccgtgaagggcttcgagaaggacgtgggcagcaagaccaccctgagaatcacctaccccgagggcgccatgcagagacccgagcagtacgagagagacagcctgttcgtgctggccggcttcaagtggcaggacttcaagtggctgaagtacatcgtgtacaaggagagagtgagcgccagcgacggcttctggaagagcgtggccaccagagtgcccaaggagccccccgagatcagaatcctgaacccctacttcatccaggaggccgccttcaccctgatcggcctgcccttcaacaacggcctgatgggcagaggcaacatccccaccctgggcagcgtggccgtgaccatggccctgcacggctgcgacgaggtggccgtggccggcttcggctacgacatgagcacccccaacgcccccctgcactactacgagaccgtgagaatggccgccatcaaggagagctggacccacaacatccagagagagaaggagttcctgagaaagctggtgaaggccagagtgatcaccgacctgagcagcggcatctag

SEQ ID NO: 100850 - DNA, 468 bp, synthetic construct
  misc_feature 1..468: note = Description of Artificial Sequence: Synthetic coding sequence
  source 1..468: mol_type = other DNA
atgggcctgctggtgttcgtgagaaacctgctgctggccctgtgcctgttcctggtgctgggcttcctgtactacagcgcctggaagctgcacctgctgcagtgggaggaggacagcaacagcgtggtgctgagcttcgacagcgccggccagaccctgggcagcgagtacgacagactgggcttcctgctgaacctggacagcaagctgcccgccgagctggccaccaagtacgccaacttcagcgagggcgcctgcaagcccggctacgccagcgccctgatgaccgccatcttccccagattcagcaagcccgcccccatgttcctggacgacagcttcagaaagtgggccagaatcagagagttcgtgccccccttcggcatcaagggccaggtgctggacgcccagtaccccgccagagagagagtgagcgccgaggccggcgagagcagcagacaccactag

SEQ ID NO: 100851 - DNA, 1035 bp, synthetic construct
  misc_feature 1..1035: note = Description of Artificial Sequence: Synthetic coding sequence
  source 1..1035: mol_type = other DNA
atgggcctgctggtgttcgtgagaaacctgctgctggccctgtgcctgttcctggtgctgggcttcctgtactacagcgcctggaagctgcacctgctgcagtgggaggaggacagcaacagcgtggtgctgagcttcgacagcgccggccagaccctgggcagcgagtacgacagactgggcttcctgctgaacctggacagcaagctgttcagcaagcccgcccccatgttcctggacgacagcttcagaaagtgggccagaatcagagagttcgtgccccccttcggcatcaagggccaggacaacctgatcaaggccatcctgagcgtgaccaaggagtacagactgacccccgccctggacagcctgagatgcagaagatgcatcatcgtgggcaacggcggcgtgctggccaacaagagcctgggcagcagaatcgacgactacgacatcgtggtgagactgaacagcgcccccgtgaagggcttcgagaaggacgtgggcagcaagaccaccctgagaatcacctaccccgagggcgccatgcagagacccgagcagtacgagagagacagcctgttcgtgctggccggcttcaagtggcaggacttcaagtggctgaagtacatcgtgtacaaggagagagtgagcgccagcgacggcttctggaagagcgtggccaccagagtgcccaaggagccccccgagatcagaatcctgaacccctacttcatccaggaggccgccttcaccctgatcggcctgcccttcaacaacggcctgatgggcagaggcaacatccccaccctgggcagcgtggccgtgaccatggccctgcacggctgcgacgaggtggccgtggccggcttcggctacgacatgagcacccccaacgcccccctgcactactacgagaccgtgagaatggccgccatcaaggagagctggacccacaacatccagagagagaaggagttcctgagaaagctggtgaaggccagagtgatcaccgacctgagcagcggcatctag

SEQ ID NO: 100852 - DNA, 687 bp, synthetic construct
  misc_feature 1..687: note = Description of Artificial Sequence: Synthetic coding sequence
  source 1..687: mol_type = other DNA
atgggcctgctggtgttcgtgagaaacctgctgctggccctgtgcctgttcctggtgctgggcttcctgtactacagcgcctggaagctgcacctgctgcagtgggaggaggacagcaagtacgacagactgggcttcctgctgaacctggacagcaagctgcccgccgagctggccaccaagtacgccaacttcagcgagggcgcctgcaagcccggctacgccagcgccctgatgaccgccatcttccccagattcagcaagcccgcccccatgttcctggacgacagcttcagaaagtgggccagaatcagagagttcgtgccccccttcggcatcaagggccaggacaacctgatcaaggccatcctgagcgtgaccaaggagtacagactgacccccgccctggacagcctgagatgcagaagatgcatcatcgtgggcaacggcggcgtgctggccaacaagagcctgggcagcagaatcgacgactacgacatcgtggtgagagtgcacagaatggccagcggcaacctgtggcccctggagtgccccagaagccccctgagattcgagagcagcacccacatcagcagcagaagaccccccagccccagcctggcctgccccagcaccatggccagctgggccggcggcaccagcctgcccctggccgtgtggcagtag

SEQ ID NO: 100853 - DNA, 1173 bp, synthetic construct
  misc_feature 1..1173: note = Description of Artificial Sequence: Synthetic coding sequence
  source 1..1173: mol_type = other DNA
atgggcctgctggtgttcgtgagaaacctgctgctggccctgtgcctgttcctggtgctgggcttcctgtactacagcgcctggaagctgcacctgctgcagtgggaggaggacagcagcaagtacagccacagcagcagcccccaggagaagcccgtggccgacagcgtggtgctgagcttcgacagcgccggccagaccctgggcagcgagtacgacagactgggcttcctgctgaacctggacagcaagctgcccgccgagctggccaccaagtacgccaacttcagcgagggcgcctgcaagcccggctacgccagcgccctgatgaccgccatcttccccagattcagcaagcccgcccccatgttcctggacgacagcttcagaaagtgggccagaatcagagagttcgtgccccccttcggcatcaagggccaggacaacctgatcaaggccatcctgagcgtgaccaaggagtacagactgacccccgccctggacagcctgagatgcagaagatgcatcatcgtgggcaacggcggcgtgctggccaacaagagcctgggcagcagaatcgacgactacgacatcgtggtgagactgaacagcgcccccgtgaagggcttcgagaaggacgtgggcagcaagaccaccctgagaatcacctaccccgagggcgccatgcagagacccgagcagtacgagagagacagcctgttcgtgctggccggcttcaagtggcaggacttcaagtggctgaagtacatcgtgtacaaggagagagtgagcgccagcgacggcttctggaagagcgtggccaccagagtgcccaaggagccccccgagatcagaatcctgaacccctacttcatccaggaggccgccttcaccctgatcggcctgcccttcaacaacggcctgatgggcagaggcaacatccccaccctgggcagcgtggccgtgaccatggccctgcacggctgcgacgaggtggccgtggccggcttcggctacgacatgagcacccccaacgcccccctgcactactacgagaccgtgagaatggccgccatcaaggagagctggacccacaacatccagagagagaaggagttcctgagaaagctggtgaaggccagagtgatcaccgacctgagcagcggcatctag

SEQ ID NO: 100854 - DNA, 1242 bp, synthetic construct
  misc_feature 1..1242: note = Description of Artificial Sequence: Synthetic coding sequence
  source 1..1242: mol_type = other DNA
atgggcctgctggtgttcgtgagaaacctgctgctggccctgtgcctgttcctggtgctgggcttcctgtactacagcgcctggaagctgcacctgctgcagtgggaggaggacagcaagtacgacagactgggcttcctgctgaacctggacagcaagctgagccccagaaccctgtgcaccgtggtgttcggcctggactgcatcctggagagccccggcgagcccaagaagctgctgatgcccgccagccaccccctggagatcctgaagagcctgagcgaggacaccgccttcgccctgggcttcctgaagctgcccagacccgccgagctggccaccaagtacgccaacttcagcgagggcgcctgcaagcccggctacgccagcgccctgatgaccgccatcttccccagattcagcaagcccgcccccatgttcctggacgacagcttcagaaagtgggccagaatcagagagttcgtgccccccttcggcatcaagggccaggacaacctgatcaaggccatcctgagcgtgaccaaggagtacagactgacccccgccctggacagcctgagatgcagaagatgcatcatcgtgggcaacggcggcgtgctggccaacaagagcctgggcagcagaatcgacgactacgacatcgtggtgagactgaacagcgcccccgtgaagggcttcgagaaggacgtgggcagcaagaccaccctgagaatcacctaccccgagggcgccatgcagagacccgagcagtacgagagagacagcctgttcgtgctggccggcttcaagtggcaggacttcaagtggctgaagtacatcgtgtacaaggagagagtgagcgccagcgacggcttctggaagagcgtggccaccagagtgcccaaggagccccccgagatcagaatcctgaacccctacttcatccaggaggccgccttcaccctgatcggcctgcccttcaacaacggcctgatgggcagaggcaacatccccaccctgggcagcgtggccgtgaccatggccctgcacggctgcgacgaggtggccgtggccggcttcggctacgacatgagcacccccaacgcccccctgcactactacgagaccgtgagaatggccgccatcaaggagagctggacccacaacatccagagagagaaggagttcctgagaaagctggtgaaggccagagtgatcaccgacctgagcagcggcatctag

SEQ ID NO: 100855 - DNA, 834 bp, synthetic construct
  misc_feature 1..834: note = Description of Artificial Sequence: Synthetic coding sequence
  source 1..834: mol_type = other DNA
atgggcctgctggtgttcgtgagaaacctgctgctggccctgtgcctgttcctggtgctgggcttcctgtactacagcgcctggaagctgcacctgctgcagtgggaggaggacagcaacagcgtggtgctgagcttcgacagcgccggccagaccctgggcagcgagtacgacagactgggcttcctgctgaacctggacagcaagctgcccgccgagctggccaccaagtacgccaacttcagcgagggcgcctgcaagcccggctacgccagcgccctgatgaccgccatcttccccagattcagcaagcccgcccccatgttcctggacgacagcttcagaaagtgggccagaatcagagagttcgtgccccccttcggcatcaagggccaggacaacctgatcaaggccatcctgagcgtgaccaaggagtacagactgacccccgccctggacagcctgagatgcagaagatgcatcatcgtgggcaacggcggcgtgctggccaacaagagcctgggcagcagaatcgacgactacgacatcgtggtgagactgaacagcgcccccgtgaagggcttcgagaaggacgtgggcagcaagaccaccctgagaatcacctaccccgagggcgccatgcagagacccgagcagtacgagagagacagcctgttcgtgctggccggcttcaagtggcaggacttcaagtggctgaagtacatcgtgtacaaggagagagtgagctggacccacaacatccagagagagaaggagttcctgagaaagctggtgaaggccagagtgatcaccgacctgagcagcggcatctag

SEQ ID NO: 100856 - DNA, 1128 bp, synthetic construct
  misc_feature 1..1128: note = Description of Artificial Sequence: Synthetic coding sequence
  source 1..1128: mol_type = other DNA
atgggcctgctggtgttcgtgagaaacctgctgctggccctgtgcctgttcctggtgctgggcttcctgtactacagcgcctggaagctgcacctgctgcagtgggaggaggacagcaacagcgtggtgctgagcttcgacagcgccggccagaccctgggcagcgagtacgacagactgggcttcctgctgaacctggacagcaagctgcccgccgagctggccaccaagtacgccaacttcagcgagggcgcctgcaagcccggctacgccagcgccctgatgaccgccatcttccccagattcagcaagcccgcccccatgttcctggacgacagcttcagaaagtgggccagaatcagagagttcgtgccccccttcggcatcaagggccaggacaacctgatcaaggccatcctgagcgtgaccaaggagtacagactgacccccgccctggacagcctgagatgcagaagatgcatcatcgtgggcaacggcggcgtgctggccaacaagagcctgggcagcagaatcgacgactacgacatcgtggtgagactgaacagcgcccccgtgaagggcttcgagaaggacgtgggcagcaagaccaccctgagaatcacctaccccgagggcgccatgcagagacccgagcagtacgagagagacagcctgttcgtgctggccggcttcaagtggcaggacttcaagtggctgaagtacatcgtgtacaaggagagagtgagcgccagcgacggcttctggaagagcgtggccaccagagtgcccaaggagccccccgagatcagaatcctgaacccctacttcatccaggaggccgccttcaccctgatcggcctgcccttcaacaacggcctgatgggcagaggcaacatccccaccctgggcagcgtggccgtgaccatggccctgcacggctgcgacgaggtggccgtggccggcttcggctacgacatgagcacccccaacgcccccctgcactactacgagaccgtgagaatggccgccatcaaggagagctggacccacaacatccagagagagaaggagttcctgagaaagctggtgaaggccagagtgatcaccgacctgagcagcggcatctag

SEQ ID NO: 100857 - DNA, 1080 bp, synthetic construct
  misc_feature 1..1080: note = Description of Artificial Sequence: Synthetic coding sequence
  source 1..1080: mol_type = other DNA
atgggcctgctggtgttcgtgagaaacctgctgctggccctgtgcctgttcctggtgctgggcttcctgtactacagcgcctggaagctgcacctgctgcagtgggaggaggacagcaagtacgacagactgggcttcctgctgaacctggacagcaagctgcccgccgagctggccaccaagtacgccaacttcagcgagggcgcctgcaagcccggctacgccagcgccctgatgaccgccatcttccccagattcagcaagcccgcccccatgttcctggacgacagcttcagaaagtgggccagaatcagagagttcgtgccccccttcggcatcaagggccaggacaacctgatcaaggccatcctgagcgtgaccaaggagtacagactgacccccgccctggacagcctgagatgcagaagatgcatcatcgtgggcaacggcggcgtgctggccaacaagagcctgggcagcagaatcgacgactacgacatcgtggtgagactgaacagcgcccccgtgaagggcttcgagaaggacgtgggcagcaagaccaccctgagaatcacctaccccgagggcgccatgcagagacccgagcagtacgagagagacagcctgttcgtgctggccggcttcaagtggcaggacttcaagtggctgaagtacatcgtgtacaaggagagagtgagcgccagcgacggcttctggaagagcgtggccaccagagtgcccaaggagccccccgagatcagaatcctgaacccctacttcatccaggaggccgccttcaccctgatcggcctgcccttcaacaacggcctgatgggcagaggcaacatccccaccctgggcagcgtggccgtgaccatggccctgcacggctgcgacgaggtggccgtggccggcttcggctacgacatgagcacccccaacgcccccctgcactactacgagaccgtgagaatggccgccatcaaggagagctggacccacaacatccagagagagaaggagttcctgagaaagctggtgaaggccagagtgatcaccgacctgagcagcggcatctag

SEQ ID NO: 100858 - DNA, 1335 bp, synthetic construct; identical to SEQ ID NO: 100849
  misc_feature 1..1335: note = Description of Artificial Sequence: Synthetic coding sequence
  source 1..1335: mol_type = other DNA

SEQ ID NO: 100859 - DNA, 513 bp, synthetic construct
  misc_feature 1..513: note = Description of Artificial Sequence: Synthetic coding sequence
  source 1..513: mol_type = other DNA
atgggcctgctggtgttcgtgagaaacctgctgctggccctgtgcctgttcctggtgctgggcttcctgtactacagcgcctggaagctgcacctgctgcagtgggaggaggacagcagcaagtacagccacagcagcagcccccaggagaagcccgtggccgacagcgtggtgctgagcttcgacagcgccggccagaccctgggcagcgagtacgacagactgggcttcctgctgaacctggacagcaagctgcccgccgagctggccaccaagtacgccaacttcagcgagggcgcctgcaagcccggctacgccagcgccctgatgaccgccatcttccccagattcagcaagcccgcccccatgttcctggacgacagcttcagaaagtgggccagaatcagagagttcgtgccccccttcggcatcaagggccaggtgctggacgcccagtaccccgccagagagagagtgagcgccgaggccggcgagagcagcagacaccactag

SEQ ID NO: 100860 - DNA, 468 bp, synthetic construct; identical to SEQ ID NO: 100850
  misc_feature 1..468: note = Description of Artificial Sequence: Synthetic coding sequence
  source 1..468: mol_type = other DNA

SEQ ID NO: 100861 - DNA, 561 bp, synthetic construct
  misc_feature 1..561: note = Description of Artificial Sequence: Synthetic coding sequence
  source 1..561: mol_type = other DNA
atgggcctgctggtgttcgtgagaaacctgctgctggccctgtgcctgttcctggtgctgggcttcctgtactacagcgcctggaagctgcacctgctgcagtgggaggaggacagcaacagcgtggtgctgagcttcgacagcgccggccagaccctgggcagcgagtacgacagactgggcttcctgctgaacctggacagcaagctgcccgccgagctggccaccaagtacgccaacttcagcgagggcgcctgcaagcccggctacgccagcgccctgatgaccgccatcttccccagattcagcaagcccgcccccatgttcctggacgacagcttcagaaagtgggccagaatcagagagttcgtgccccccttcggcatcaagggccaggacaacctgatcaaggccatcctgagcgtgaccaaggagtacagactgacccccgccctggacagcctgagatgcagaagatgcatcatcgtgggcaacggcggcgtgctggccaacaagagcctgggcagcagaatcgacgactacgacatcgtggtgagatag

SEQ ID NO: 100862 - DNA, 558 bp, synthetic construct
  misc_feature 1..558: note = Description of Artificial Sequence: Synthetic coding sequence
  source 1..558: mol_type = other DNA
atgggcctgctggtgttcgtgagaaacctgctgctggccctgtgcctgttcctggtgctgggcttcctgtactacagcgcctggaagctgcacctgctgcagtgggaggaggacagcagcaagtacagccacagcagcagcccccaggagaagcccgtggccgagtacgacagactgggcttcctgctgaacctggacagcaagctgcccgccgagctggccaccaagtacgccaacttcagcgagggcgcctgcaagcccggctacgccagcgccctgatgaccgccatcttccccagattcagcaagcccgcccccatgttcctggacgacagcttcagaaagtgggccagaatcagagagttcgtgccccccttcggcatcaagggccaggacaacctgatcaaggccatcctgagcgtgaccaaggagtacagactgacccccgccctggacagcctgagatgcagaagatgcatcatcgtgggcaacggcggcgtgctggccaacaagagcctgggcagcagaatcgacgactacgacatcgtggtgagatag

SEQ ID NO: 100863 - DNA, 606 bp, synthetic construct
  misc_feature 1..606: note = Description of Artificial Sequence: Synthetic coding sequence
  source 1..606: mol_type = other DNA
atgggcctgctggtgttcgtgagaaacctgctgctggccctgtgcctgttcctggtgctgggcttcctgtactacagcgcctggaagctgcacctgctgcagtgggaggaggacagcagcaagtacagccacagcagcagcccccaggagaagcccgtggccgagtacgacagactgggcttcctgctgaacctggacagcaagctgcccgccgagctggccaccaagtacgccaacttcagcgagggcgcctgcaagcccggctacgccagcgccctgatgaccgccatcttccccagattcagcaagcccgcccccatgttcctggacgacagcttcagaaagtgggccagaatcagagagttcgtgccccccttcggcatcaagggccaggacaacctgatcaaggccatcctgagcgtgaccaaggagtacagactgacccccgccctggacagcctgagatgcagaagatgcatcatcgtgggcaacggcggcgtgctggccaacaagagcctgggcagcagaatcgacgactacgacatcgtggtgagccccggcagaaccatcagcagcgagagaaagagcttctgcggcagctggtag

SEQ ID NO: 100864 - DNA, 1290 bp, synthetic construct
  misc_feature 1..1290: note = Description of Artificial Sequence: Synthetic coding sequence
  source 1..1290: mol_type = other DNA
atgggcctgctggtgttcgtgagaaacctgctgctggccctgtgcctgttcctggtgctgggcttcctgtactacagcgcctggaagctgcacctgctgcagtgggaggaggacagcaacagcgtggtgctgagcttcgacagcgccggccagaccctgggcagcgagtacgacagactgggcttcctgctgaacctggacagcaagctgagccccagaaccctgtgcaccgtggtgttcggcctggactgcatcctggagagccccggcgagcccaagaagctgctgatgcccgccagccaccccctggagatcctgaagagcctgagcgaggacaccgccttcgccctgggcttcctgaagctgcccagacccgccgagctggccaccaagtacgccaacttcagcgagggcgcctgcaagcccggctacgccagcgccctgatgaccgccatcttccccagattcagcaagcccgcccccatgttcctggacgacagcttcagaaagtgggccagaatcagagagttcgtgccccccttcggcatcaagggccaggacaacctgatcaaggccatcctgagcgtgaccaaggagtacagactgacccccgccctggacagcctgagatgcagaagatgcatcatcgtgggcaacggcggcgtgctggccaacaagagcctgggcagcagaatcgacgactacgacatcgtggtgagactgaacagcgcccccgtgaagggcttcgagaaggacgtgggcagcaagaccaccctgagaatcacctaccccgagggcgccatgcagagacccgagcagtacgagagagacagcctgttcgtgctggccggcttcaagtggcaggacttcaagtggctgaagtacatcgtgtacaaggagagagtgagcgccagcgacggcttctggaagagcgtggccaccagagtgcccaaggagccccccgagatcagaatcctgaacccctacttcatccaggaggccgccttcaccctgatcggcctgcccttcaacaacggcctgatgggcagaggcaacatccccaccctgggcagcgtggccgtgaccatggccctgcacggctgcgacgaggtggccgtggccggcttcggctacgacatgagcacccccaacgcccccctgcactactacgagaccgtgagaatggccgccatcaaggagagctggacccacaacatccagagagagaaggagttcctgagaaagctggtgaaggccagagtgatcaccgacctgagcagcggcatctag

SEQ ID NO: 100865 - DNA, 1038 bp, synthetic construct
  misc_feature 1..1038: note = Description of Artificial Sequence: Synthetic coding sequence
  source 1..1038: mol_type = other DNA
atgggcctgctggtgttcgtgagaaacctgctgctggccctgtgcctgttcctggtgctgggcttcctgtactacagcgcctggaagctgcacctgctgcagtgggaggaggacagcaacagcgtggtgctgagcttcgacagcgccggccagaccctgggcagcgagtacgacagactgggcttcctgctgaacctggacagcaagctgcccgccgagctggccaccaagtacgccaacttcagcgagggcgcctgcaagcccggctacgccagcgccctgatgaccgccatcttccccagattcagcaagcccgcccccatgttcctggacgacagcttcagaaagtgggccagaatcagagagttcgtgccccccttcggcatcaagggccaggacaacctgatcaaggccatcctgagcgtgaccaaggagtacagactgacccccgccctggacagcctgagatgcagaagatgcatcatcgtgggcaacggcggcgtgctggccaacaagagcctgggcagcagaatcgacgactacgacatcgtggtgagactgaacagcgcccccgtgaagggcttcgagaaggacgtgggcagcaagaccaccctgagaatcacctaccccgagggcgccatgcagagacccgagcagtacgagagagacagcctgttcgtgctggccggcttcaagtggcaggacttcaagtggctgaagtacatcgtgtacaaggagagagtggaggccgccttcaccctgatcggcctgcccttcaacaacggcctgatgggcagaggcaacatccccaccctgggcagcgtggccgtgaccatggccctgcacggctgcgacgaggtggccgtggccggcttcggctacgacatgagcacccccaacgcccccctgcactactacgagaccgtgagaatggccgccatcaaggagagctggacccacaacatccagagagagaaggagttcctgagaaagctggtgaaggccagagtgatcaccgacctgagcagcggcatctag

SEQ ID NO: 100866 - DNA, 1242 bp, synthetic construct; identical to SEQ ID NO: 100854
  misc_feature 1..1242: note = Description of Artificial Sequence: Synthetic coding sequence
  source 1..1242: mol_type = other DNA

SEQ ID NO: 100867 - DNA, 1035 bp, synthetic construct; identical to SEQ ID NO: 100851
  misc_feature 1..1035: note = Description of Artificial Sequence: Synthetic coding sequence
  source 1..1035: mol_type = other DNA

SEQ ID NO: 100868 - DNA, 1290 bp, synthetic construct; identical to SEQ ID NO: 100864
  misc_feature 1..1290: note = Description of Artificial Sequence: Synthetic coding sequence
  source 1..1290: mol_type = other DNA

SEQ ID NO: 100869 - DNA, 456 bp, synthetic construct
  misc_feature 1..456: note = Description of Artificial Sequence: Synthetic coding sequence
  source 1..456: mol_type = other DNA
atgggcctgctggtgttcgtgagaaacctgctgctggccctgtgcctgttcctggtgctgggcttcctgtactacagcgcctggaagctgcacctgctgcagtgggaggaggacagcaacagcgtggtgctgagcttcgacagcgccggccagaccctgggcagcgagtacgacagactgggcttcctgctgaacctggacagcaagctgcccgccgagctggccaccaagtacgccaacttcagcgagggcgcctgcaagcccggctacgccagcgccctgatgaccgccatcttccccagattcagcaagcccgcccccatgttcctggacgacagcttcagaaagtgggccagaatcagagagttcgtgccccccttcggcatcaagggccaggagtgcatcggctggctgctggagatctgcggccacagcagcgcccagggcgccccctag

SEQ ID NO: 100870 - DNA, 561 bp, synthetic construct
  misc_feature 1..561: note = Description of Artificial Sequence: Synthetic coding sequence
  source 1..561: mol_type = other DNA
atgggcctgctggtgttcgtgagaaacctgctgctggccctgtgcctgttcctggtgctgggcttcctgtactacagcgcctggaagctgcacctgctgcagtgggaggaggacagcaagtacgacagactgggcttcctgctgaacctggacagcaagctgcccgccgagctggccaccaagtacgccaacttcagcgagggcgcctgcaagcccggctacgccagcgccctgatgaccgccatcttccccagattcagcaagcccgcccccatgttcctggacgacagcttcagaaagtgggccagaatcagagagttcgtgccccccttcggcatcaagggccaggacaacctgatcaaggccatcctgagcgtgaccaaggagtacagactgacccccgccctggacagcctgagatgcagaagatgcatcatcgtgggcaacggcggcgtgctggccaacaagagcctgggcagcagaatcgacgactacgacatcgtggtgagccccggcagaaccatcagcagcgagagaaagagcttctgcggcagctggtag

SEQ ID NO: 100871 - DNA, 420 bp, synthetic construct
  misc_feature 1..420: note = Description of Artificial Sequence: Synthetic coding sequence
  source 1..420: mol_type = other DNA
atgggcctgctggtgttcgtgagaaacctgctgctggccctgtgcctgttcctggtgctgggcttcctgtactacagcgcctggaagctgcacctgctgcagtgggaggaggacagcaagtacgacagactgggcttcctgctgaacctggacagcaagctgcccgccgagctggccaccaagtacgccaacttcagcgagggcgcctgcaagcccggctacgccagcgccctgatgaccgccatcttccccagattcagcaagcccgcccccatgttcctggacgacagcttcagaaagtgggccagaatcagagagttcgtgccccccttcggcatcaagggccaggtgctggacgcccagtaccccgccagagagagagtgagcgccgaggccggcgagagcagcagacaccactag

SEQ ID NO: 100872 - DNA, 306 bp, synthetic construct
  misc_feature 1..306: note = Description of Artificial Sequence: Synthetic coding sequence
  source 1..306: mol_type = other DNA
atgggcctgctggtgttcgtgagaaacctgctgctggccctgtgcctgttcctggtgctgggcttcctgtactacagcgcctggaagctgcacctgctgcagtgggaggaggacagcaagtacgacagactgggcttcctgctgaacctggacagcaagctgcccgccgagctggccaccaagtacgccaacttcagcgagggcgcctgcaagcccggctacgccagcgccctgatgaccgccatcttccccagacccggcagaaccatcagcagcgagagaaagagcttctgcggcagctggtag

SEQ ID NO: 100873 - DNA, 786 bp, synthetic construct
  misc_feature 1..786: note = Description of Artificial Sequence: Synthetic coding sequence
  source 1..786: mol_type = other DNA
atgggcctgctggtgttcgtgagaaacctgctgctggccctgtgcctgttcctggtgctgggcttcctgtactacagcgcctggaagctgcacctgctgcagtgggaggaggacagcaagtacgacagactgggcttcctgctgaacctggacagcaagctgcccgccgagctggccaccaagtacgccaacttcagcgagggcgcctgcaagcccggctacgccagcgccctgatgaccgccatcttccccagattcagcaagcccgcccccatgttcctggacgacagcttcagaaagtgggccagaatcagagagttcgtgccccccttcggcatcaagggccaggacaacctgatcaaggccatcctgagcgtgaccaaggagtacagactgacccccgccctggacagcctgagatgcagaagatgcatcatcgtgggcaacggcggcgtgctggccaacaagagcctgggcagcagaatcgacgactacgacatcgtggtgagactgaacagcgcccccgtgaagggcttcgagaaggacgtgggcagcaagaccaccctgagaatcacctaccccgagggcgccatgcagagacccgagcagtacgagagagacagcctgttcgtgctggccggcttcaagtggcaggacttcaagtggctgaagtacatcgtgtacaaggagagagtgagctggacccacaacatccagagagagaaggagttcctgagaaagctggtgaaggccagagtgatcaccgacctgagcagcggcatctag

SEQ ID NO: 100874 - DNA, 834 bp, synthetic construct; identical to SEQ ID NO: 100855
  misc_feature 1..834: note = Description of Artificial Sequence: Synthetic coding sequence
  source 1..834: mol_type = other DNA

SEQ ID NO: 100875 - DNA, 513 bp, synthetic construct; identical to SEQ ID NO: 100859
  misc_feature 1..513: note = Description of Artificial Sequence: Synthetic coding sequence
  source 1..513: mol_type = other DNA

SEQ ID NO: 100876 - DNA, 642 bp, synthetic construct
  misc_feature 1..642: note = Description of Artificial Sequence: Synthetic coding sequence
  source 1..642: mol_type = other DNA
atgagaaccagcgccgagtacttcagactggccctgagcaagctgcagagctgcgacctgttcgacgagttcgacaagatgaacaacggccccgtgctgggccacgaggaggaggtgggcagaagaaccaccttcagactgttctaccccgagagcgtgttcagcgaccccatccacaacgaccccaacaccaccgtgatcctgaccgccttcaagccccacgacctgagatggctgctggagctgctgatgggcgacaagatcaacaccaacggcttctggaagaagcccgccctgaacctgatctacaagccctaccagatcagaatcctggaccccttcatcatcagaaccgccgcctacgagctgctgcacttccccaaggtgttccccaagaaccagaagcccaagcaccccaccaccggcatcatcgccatcaccctggccttctacatctgccacgaggtgcacctggccggcttcaagtacaacttcagcgacctgaagagccccctgcactactacggcaacgccaccatgagcctgatgaacaagaacgcctaccacaacgtgaccgccgagcagctgttcctgaaggacatcatcgagaagaacctggtgatcaacctgacccaggactag

SEQ ID NO: 100877 - DNA, 996 bp, synthetic construct
  misc_feature 1..996: note = Description of Artificial Sequence: Synthetic coding sequence
  source 1..996: mol_type = other DNA
atgagaggctacctggtggccatcttcctgagcgccgtgttcctgtactacgtgctgcactgcatcctgtggggcaccaacgtgtactgggtggcccccgtggagatgaagagaagaaacaagatccagccctgcctgagcaagcccgccttcgccagcctgctgagattccaccagttccaccccttcctgtgcgccgccgacttcagaaagatcgccagcctgtacggcagcgacaagttcgacctgccctacggcatgagaaccagcgccgagtacttcagactggccctgagcaagctgcagagctgcgacctgttcgacgagttcgacaacatcccctgcaagaagtgcgtggtggtgggcaacggcggcgtgctgaagaacaagaccctgggcgagaagatcgacagctacgacgtgatcatcagaatgaacaacggccccgtgctgggccacgaggaggaggtgggcagaagaaccaccttcagactgttctaccccgagagcgtgttcagcgaccccatccacaacgaccccaacaccaccgtgatcctgaccgccttcaagccccacgacctgagatggctgctggagctgctgatgggcgacaagatcaacaccaacggcttctggaagaagcccgccctgaacctgatctacaagccctaccagatcagaatcctggaccccttcatcatcagaaccgccgcctacgagctgctgcacttccccaaggtgttccccaagaaccagaagcccaagcaccccaccaccggcatcatcgccatcaccctggccttctacatctgccacgaggtgcacctggccggcttcaagtacaacttcagcgacctgaagagccccctgcactactacggcaacgccaccatgagcctgatgaacaagaacgcctaccacaacgtgaccgccgagcagctgttcctgaaggacatcatcgagaagaacctggtgatcaacctgacccaggactag

SEQ ID NO: 100878 - DNA, 996 bp, synthetic construct; identical to SEQ ID NO: 100877
  misc_feature 1..996: note = Description of Artificial Sequence: Synthetic coding sequence
  source 1..996: mol_type = other DNA

SEQ ID NO: 100879 - DNA, 696 bp, synthetic construct
  misc_feature 1..696: note = Description of Artificial Sequence: Synthetic coding sequence
  source 1..696: mol_type = other DNA
atgagaggctacctggtggccatcttcctgagcgccgtgttcctgtactacgtgctgcactgcatcctgtggggcaccaacgtgtactgggtggcccccgtggagatgaagagaagaaacaagatccagccctgcctgagcaagcccgccttcgccagcctgctgagattccaccagttccaccccttcctgtgcgccgccgacttcagaaagatcgccagcctgtacggcagcgacaagttcgacctgccctacggcatgagaaccagcgccgagtacttcagactggccctgagcaagctgcagagctgcgacctgttcgacgagttcgacaacatcccctgcaagaagtgcgtggtggtgggcaacggcggcgtgctgaagaacaagaccctgggcgagaagatcgacagctacgacgtgatcatcagaatgaacaacggccccgtgctgggccacgaggaggaggtgggcagaagaaccaccttcagactgttctaccccgagagcgtgttcagcgaccccatccacaacgaccccaacaccaccgtgatcctgaccgccttcaagccccacgacctgagatggctgctggagctgctgatgggcgacaagatcaacaccaacggcttctggaagaagcccgccctgaacctgatctacaagccctaccagatcagaatcctggacccctag

SEQ ID NO: 100880 - DNA, 741 bp, synthetic construct
  misc_feature 1..741: note = Description of Artificial Sequence: Synthetic coding sequence
  source 1..741: mol_type = other DNA
atgcactgcagagactgcgccctggtgaccagcagcggccacctgctgcacagcagacagggcagccagatcgaccagaccgagtgcgtgatcagaatgaacgacgcccccaccagaggctacggcagagacgtgggcaacagaaccagcctgagagtgatcgcccacagcagcatccagagaatcctgagaaacagacacgacctgctgaacgtgagccagggcaccgtgttcatcttctggggccccagcagctacatgagaagagacggcaagggccaggtgtacaacaacctgcacctgctgagccaggtgctgcccagactgaaggccttcatgatcaccagacacaagatgctgcagttcgacgagctgttcaagcaggagaccggcaaggacagaaagatcagcaacacctggctgagcaccggctggttcaccatgaccatcgccctggagctgtgcgacagaatcaacgtgtacggcatggtgccccccgacttctgcagagaccccaaccaccccagcgtgccctaccactactacgagcccttcggccccgacgagtgcaccatgtacctgagccacgagagaggcagaaagggcagccaccacagattcatcaccgagaagagagtgttcaagaactgggccagaaccttcaacatccacttcttccagcccgactggaagcccgagagcctggccatcaaccaccccgagaacaagcccgtgttctag

SEQ ID NO: 100881 - DNA, 1011 bp, synthetic construct
  misc_feature 1..1011: note = Description of Artificial Sequence: Synthetic coding sequence
  source 1..1011: mol_type = other DNA
atgaagaccctgatgagacacggcctggccgtgtgcctggccctgaccaccatgtgcaccagcctgctgctggtgtacagcagcctgggcggccagaaggagagacccccccagcagcagcagcagcagcagcagcagcagcagcaggccagcgccaccggcagcagccagcccgccgccgagagcagcacccagcagagacccggcgtgcccgccggccccagacccctggacggctacctgggcgtggccgaccacaagcccctgaagatgcactgcagagactgcgccctggtgaccagcagcggccacctgctgcacagcagacagggcagccagatcgaccagaccgagtgcgtgatcagaatgaacgacgcccccaccagaggctacggcagagacgtgggcaacagaaccagcctgagagtgatcgcccacagcagcatccagagaatcctgagaaacagacacgacctgctgaacgtgagccagggcaccgtgttcatcttctggggccccagcagctacatgagaagagacggcaagggccaggtgtacaacaacctgcacctgctgagccaggtgctgcccagactgaaggccttcatgatcaccagacacaagatgctgcagttcgacgagctgttcaagcaggagaccggcaaggacagaaagatcagcaacacctggctgagcaccggctggttcaccatgaccatcgccctggagctgtgcgacagaatcaacgtgtacggcatggtgccccccgacttctgcagagaccccaaccaccccagcgtgccctaccactactacgagcccttcggccccgacgagtgcaccatgtacctgagccacgagagaggcagaaagggcagccaccacagattcatcaccgagaagagagtgttcaagaactgggccagaaccttcaacatccacttcttccagcccgactggaagcccgagagcctggccatcaaccaccccgagaacaagcccgtgttctag

SEQ ID NO: 100882 - DNA, 1275 bp, synthetic construct
  misc_feature 1..1275: note = Description of Artificial Sequence: Synthetic coding sequence
  source 1..1275: mol_type = other DNA
atgagcgaccacggcgacgtgagcctgccccccgaggacagagtgagagccctgagccagctgggcagcgccgtggaggtgaacgaggacatcccccccagaagatacttcagaagcggcgtggagatcatcagaatggccagcatctacagcgaggagggcaacatcgagcacgccttcatcctgtacaacaagtacatcaccctgttcatcgagaagctgcccaagcacagagactacaagagcgccgtgatccccgagaagaaggacaccgtgaagaagctgaaggagatcgccttccccaaggccgaggagctgaaggccgagctgctgaagagatacaccaaggagtacaccgagtacaacgaggagaagaagaaggaggccgaggagctggccagaaacatggccatccagcaggagctggagaaggagaagcagagagtggcccagcagaagcagcagcagctggagcaggagcagttccacgccttcgaggagatgatcagaaaccaggagctggagaaggagagactgaagatcgtgcaggagttcggcaaggtggaccccggcctgggcggccccctggtgcccgacctggagaagcccagcctggacgtgttccccaccctgaccgtgagcagcatccagcccagcgactgccacaccaccgtgagacccgccaagccccccgtggtggacagaagcctgaagcccggcgccctgagcaacagcgagagcatccccaccatcgacggcctgagacacgtggtggtgcccggcagactgtgcccccagttcctgcagctggccagcgccaacaccgccagaggcgtggagacctgcggcatcctgtgcggcaagctgatgagaaacgagttcaccatcacccacgtgctgatccccaagcagagcgccggcagcgactactgcaacaccgagaacgaggaggagctgttcctgatccaggaccagcagggcctgatcaccctgggctggatccacacccaccccacccagaccgccttcctgagcagcgtggacctgcacacccactgcagctaccagatgatgctgcccgagagcgtggccatcgtgtgcagccccaagttccaggagaccggcttcttcaagctgaccgaccacggcctggaggagatcagcagctgcagacagaagggcttccacccccacagcaaggacccccccctgttctgcagctgcagccacgtgaccgtggtggacagagccgtgaccatcaccgacctgagatag

SEQ ID NO: 100883 - DNA, 1275 bp, synthetic construct; identical to SEQ ID NO: 100882
  misc_feature 1..1275: note = Description of Artificial Sequence: Synthetic coding sequence
  source 1..1275: mol_type = other DNA

SEQ ID NO: 100884 - DNA, 1275 bp, synthetic construct; identical to SEQ ID NO: 100882
  misc_feature 1..1275: note = Description of Artificial Sequence: Synthetic coding sequence
  source 1..1275: mol_type = other DNA

SEQ ID NO: 100885 - DNA, 1275 bp, synthetic construct; identical to SEQ ID NO: 100882
  misc_feature 1..1275: note = Description of Artificial Sequence: Synthetic coding sequence
  source 1..1275: mol_type = other DNA

SEQ ID NO: 100886 - DNA, 492 bp, synthetic construct
  misc_feature 1..492: note = Description of Artificial Sequence: Synthetic coding sequence
  source 1..492: mol_type = other DNA
atgagcgaccacggcgacgtgagcctgccccccgaggacagagtgagagccctgagccagctgggcagcgccgtggaggtgaacgaggacatcccccccagaagatacttcagaagcggcgtggagatcatcagaatggccagcatctacagcgaggagggcaacatcgagcacgccttcatcctgtacaacaagtacatcaccctgttcatcgagaagctgcccaagcacagagactacaagagcgccgtgatccccgagaagaaggacaccgtgaagaagctgaaggagatcgccttccccaaggccgaggagctgaaggccgagctgctgaagagatacaccaaggagtacaccgagtacaacgaggagaagaagaaggaggccgaggagctggccagaaacatggccatccagcaggagctggagaaggagaagcagagagtggcccagcagaagcagcagcagctggagcaggagcagttccactag

SEQ ID NO: 100887 - DNA, 957 bp, synthetic construct
  misc_feature 1..957: note = Description of Artificial Sequence: Synthetic coding sequence
  source 1..957: mol_type = other DNA
atgagcgaccacggcgacgtgagcctgccccccgaggacagagtgagagccctgagccagctgggcagcgccgtggaggtgaacgaggacatcccccccagaagatacttcagaagcggcgtggagatcatcagaatggccagcatctacagcgaggagggcaacatcgagcacgccttcatcctgtacaacaagtacatcaccctgttcatcgagaagctgcccaagcacagagactacaagagcgccgtgatccccgagaagaaggacaccgtgaagaagctgaaggagatcgccttccccaaggccgaggagctgaaggccgagctgctgaagagatacaccaaggagtacaccgagtacaacgaggagaagaagaaggaggccgaggagctggccagaaacatggccatccagcaggagctggagaaggagaagcagagagtggcccagcagaagcagcagcagctggagcaggagcagttccacgccttcgaggagatgatcagaaaccaggagctggagaaggagagactgaagatcgtgcaggagttcggcaaggtggaccccggcctgggcggccccctggtgcccgacctggagaagcccagcctggacgtgttccccaccctgaccgtgagcagcatccagcccagcgactgccacaccaccgtgagacccgccaagccccccgtggtggacagaagcctgaagcccggcgccctgagcaacagcgagagcatccccaccatcgacggcctgagacacgtggtggtgcccggcagactgtgcccccagttcctgcagctggccagcgccaacaccgccagaggcgtggagacctgcggcatcctgtgcggcaagctgatgagaaacgagttcaccatcacccacgtgctgatccccaagcagagcgccggcagcgactactgcaacaccgagaacgaggaggagtag

SEQ ID NO: 100888 - DNA, 414 bp, synthetic construct
  misc_feature 1..414: note = Description of Artificial Sequence: Synthetic coding sequence
  source 1..414: mol_type = other DNA
atgagcgaccacggcgacgtgagcctgccccccgaggacagagtgagagccctgagccagctgggcagcgccgtggaggtgaacgaggacatcccccccagaagatacttcagaagcggcgtggagatcatcagaatggccagcatctacagcgaggagggcaacatcgagcacgccttcatcctgtacaacaagtacatcaccctgttcatcgagaagctgcccaagcacagagactacaagagcgccgtgatccccgagaagaaggacaccgtgaagaagctgaaggagatcgccttccccaaggccgaggagctgaaggccgagctgctgaagagatacaccaaggagtacaccgagtacaacgaggagaagaagaaggaggccgaggagctggccagaaacatggcctag

SEQ ID NO: 100889 - DNA, 1047 bp, synthetic construct
  misc_feature 1..1047: note = Description of Artificial Sequence: Synthetic coding sequence
  source 1..1047: mol_type = other DNA
atgagcgaccacggcgacgtgagcctgccccccgaggacagagtgagagccctgagccagctgggcagcgccgtggaggtgaacgaggacatcccccccagaagatacttcagaagcggcgtggagatcatcagaatggccagcatctacagcgaggagggcaacatcgagcacgccttcatcctgtacaacaagtacatcaccctgttcatcgagaagctgcccaagcacagagactacaagagcgccgtgatccccgagaagaaggacaccgtgaagaagctgaaggagatcgccttccccaaggccgaggagctgaaggccgagctgctgaagagatacaccaaggagtacaccgagtacaacgaggagaagaagaaggaggccgaggagctggccagaaacatggccatccagcaggagctggagaaggagaagcagagagtggcccagcagaagcagcagcagctggagcaggagcagttccacgccttcgaggagatgatcagaaaccaggagctggagaaggagagactgaagatcgtgcaggagttcggcaaggtggaccccggcctgggcggccccctggtgcccgacctggagaagcccagcctggacgtgttccccaccctgaccgtgagcagcatccagcccagcgactgccacaccaccgtgagacccgccaagccccccgtggtggacagaagcctgaagcccggcgccctgagcaacagcgagagcatccccaccatcgacggcctgagacacgtggtggtgcccggcagactgtgcccccagttcctgcagctggccagcgccaacaccgccagaggcgtggagacctgcggcatcctgtgcggcaagctgatgagaaacgagttcaccatcacccacgtgctgatccccaagcagagcgccggcagcgactactgcaacaccgagaacgaggaggagctgttcctgatccaggaccagcagggcctgatcaccctgggctggatccacgtggagaccctgtggagcctgaagagcctgcacgccccctag

SEQ ID NO: 100890 - DNA, 813 bp, synthetic construct
  misc_feature 1..813: note = Description of Artificial Sequence: Synthetic coding sequence
  source 1..813: mol_type = other DNA
atgagacagcagcagctggagagcgagcagttcctgttcttcgaggaccagctgaagaagcaggagctggccagaggccagatgagaagccagcagaccagcggcctgagcgagcagatcgacggcagcgccctgagctgcttcagcacccaccagaacaacagcctgctgaacgtgttcgccgaccagcccaacaagagcgacgccaccaactacgccagccacagcccccccgtgaacagagccctgacccccgccgccaccctgagcgccgtgcagaacctggtggtggagggcctgagatgcgtggtgctgcccgaggacctgtgccacaagttcctgcagctggccgagagcaacaccgtgagaggcatcgagacctgcggcatcctgtgcggcaagctgacccacaacgagttcaccatcacccacgtgatcgtgcccaagcagagcgccggccccgactactgcgacatggagaacgtggaggagctgttcaacgtgcaggaccagcacgacctgctgaccctgggctggatccacacccaccccacccagaccgccttcctgagcagcgtggacctgcacacccactgcagctaccagctgatgctgcccgaggccatcgccatcgtgtgcagccccaagcacaaggacaccggcatcttcagactgaccaacgccggcatgctggaggtgagcgcctgcaagaagaagggcttccacccccacaccaaggagcccagactgttcagcatctgcaagcacgtgctggtgaaggacatcaagatcatcgtgctggacctgagatag

SEQ ID NO: 100891 - DNA, 1311 bp, synthetic construct
  misc_feature 1..1311: note = Description of Artificial Sequence: Synthetic coding sequence
  source 1..1311: mol_type = other DNA
atggaccagcccttcaccgtgaacagcctgaagaagctggccgccatgcccgaccacaccgacgtgagcctgagccccgaggagagagtgagagccctgagcaagctgggctgcaacatcaccatcagcgaggacatcacccccagaagatacttcagaagcggcgtggagatggagagaatggccagcgtgtacctggaggagggcaacctggagaacgccttcgtgctgtacaacaagttcatcaccctgttcgtggagaagctgcccaaccacagagactaccagcagtgcgccgtgcccgagaagcaggacatcatgaagaagctgaaggagatcgccttccccagaaccgacgagctgaagaacgacctgctgaagaagtacaacgtggagtaccaggagtacctgcagagcaagaacaagtacaaggccgagatcctgaagaagctggagcaccagagactgatcgaggccgagagaaagagaatcgcccagatgagacagcagcagctggagagcgagcagttcctgttcttcgaggaccagctgaagaagcaggagctggccagaggccagatgagaagccagcagaccagcggcctgagcgagcagatcgacggcagcgccctgagctgcttcagcacccaccagaacaacagcctgctgaacgtgttcgccgaccagcccaacaagagcgacgccaccaactacgccagccacagcccccccgtgaacagagccctgacccccgccgccaccctgagcgccgtgcagaacctggtggtggagggcctgagatgcgtggtgctgcccgaggacctgtgccacaagttcctgcagctggccgagagcaacaccgtgagaggcatcgagacctgcggcatcctgtgcggcaagctgacccacaacgagttcaccatcacccacgtgatcgtgcccaagcagagcgccggccccgactactgcgacatggagaacgtggaggagctgttcaacgtgcaggaccagcacgacctgctgaccctgggctggatccacacccaccccacccagaccgccttcctgagcagcgtggacctgcacacccactgcagctaccagctgatgctgcccgaggccatcgccatcgtgtgcagccccaagcacaaggacaccggcatcttcagactgaccaacgccggcatgctggaggtgagcgcctgcaagaagaagggcttccacccccacaccaaggagcccagactgttcagcatctgcaagcacgtgctggtgaaggacatcaagatcatcgtgctggacctgagatag

SEQ ID NO: 100892 - DNA, 1311 bp, synthetic construct; identical to SEQ ID NO: 100891
  misc_feature 1..1311: note = Description of Artificial Sequence: Synthetic coding sequence
  source 1..1311: mol_type = other DNA

SEQ ID NO: 100893 - DNA, 1386 bp, synthetic construct
  misc_feature 1..1386: note = Description of Artificial Sequence: Synthetic coding sequence
  source 1..1386: mol_type = other DNA
atggaccagcccttcaccgtgaacagcctgaagaagctggccgccatgcccgaccacaccgacgtgagcctgagccccgaggagagagtgagagccctgagcaagctgggctgcaacatcaccatcagcgaggacatcacccccagaagatacttcagaagcggcgtggagatggagagaatggccagcgtgtacctggaggagggcaacctggagaacgccttcgtgctgtacaacaagttcatcaccctgttcgtggagaagctgcccaaccacagagactaccagcagtgcgccgtgcccgagaagcaggacatcatgaagaagctgaaggagatcgccttccccagaaccgacgagctgaagaacgacctgctgaagaagtacaacgtggagtaccaggagtacctgcagagcaagaacaagtacaaggccgagatcctgaagaagctggagcaccagagactgatcgaggccgagagaaagagaatcgcccagatgagacagcagcagctggagagcgagcagttcctgttcttcgaggaccagctgaagaagcaggagctggccagaggccagatgagaagccagcagaccagcggcctgagcgagcagatcgacggcagcgccctgagctgcttcagcacccaccagaacaacagcctgctgaacgtgttcgccgaccagcccaacaagagcgacgccaccaactacgccagccacagcccccccgtgaacagagccctgacccccgccgccaccctgagcgccgtgcagaacctggtggtggagggcctgagatgcgtggtgctgcccgaggacctgtgccacaagttcctgcagctggccgagagcaacaccgtgagaggcatcgagacctgcggcatcctgtgcggcaagctgacccacaacgagttcaccatcacccacgtgatcgtgcccaagcagagcgccggccccgactactgcgacatggagaacgtggaggagctgttcaacgtgcaggaccagcacgacctgctgaccctgggctggatccacacccaccccacccagaccgccttcctgagcagcgtggacctgcacacccactgcagctaccagctgatgctgcccgaggccatcgccatcgtgtgcagccccaagcacaaggacaccggcatcttcagactgaccaacgccggcatgctggaggtgagcgcctgcaagaagaagggcttccacccccacaccaaggagcccagactgttcagcatccagaagttcctgagcggcatcatcagcggcaccgccctggagatggagcccctgaagatcggctacggccccaacggcttccccctgctgggcatcagcagaagcagcagccccagcgagcagctgtag

SEQ ID NO: 100894 - DNA, 267 bp, synthetic construct
  misc_feature 1..267: note = Description of Artificial Sequence: Synthetic coding sequence
  source 1..267: mol_type = other DNA
atgagcatcatggaccacagccccaccaccggcgtggtgaccgtgatcgtgatcctgatcgccatcgccgccctgggcgccctgatcctgggctgctggtgctacctgagactgcagagaatcagccagagcgaggacgaggagagcatcgtgggcgacggcgagaccaaggagcccttcctgctggtgcagtacagcgccaagggcccctgcgtggagagaaaggccaagctgatgacccccaacggccccgaggtgcacggctag

SEQ ID NO: 100895 - DNA, 744 bp, synthetic construct
  misc_feature 1..744: note = Description of Artificial Sequence: Synthetic coding sequence
  source 1..744: mol_type = other DNA
atgctgcagaacagcgccgtgctgctggtgctggtgatcagcgccagcgccacccacgaggccgagcagaacgacagcgtgagccccagaaagagcagagtggccgcccagaacagcgccgaggtggtgagatgcctgaacagcgccctgcaggtgggctgcggcgccttcgcctgcctggagaacagcacctgcgacaccgacggcatgtacgacatctgcaagagcttcctgtacagcgccgccaagttcgacacccagggcaaggccttcgtgaaggagagcctgaagtgcatcgccaacggcgtgaccagcaaggtgttcctggccatcagaagatgcagcaccttccagagaatgatcgccgaggtgcaggaggagtgctacagcaagctgaacgtgtgcagcatcgccaagagaaaccccgaggccatcaccgaggtggtgcagctgcccaaccacttcagcaacagatactacaacagactggtgagaagcctgctggagtgcgacgaggacaccgtgagcaccatcagagacagcctgatggagaagatcggccccaacatggccagcctgttccacatcctgcagaccgaccactgcgcccagacccaccccagagccgacttcaacagaagaagaaccaacgagccccagaagctgaaggtgctgctgagaaacctgagaggcgaggaggacagccccagccacatcaagagaaccagccacgagagcgcctag

SEQ ID NO: 100896 - DNA, 537 bp, synthetic construct
  misc_feature 1..537: note = Description of Artificial Sequence: Synthetic coding sequence
  source 1..537: mol_type = other DNA
atgtacgacatctgcaagagcttcctgtacagcgccgccaagttcgacacccagggcaaggccttcgtgaaggagagcctgaagtgcatcgccaacggcgtgaccagcaaggtgttcctggccatcagaagatgcagcaccttccagagaatgatcgccgaggtgcaggaggagtgctacagcaagctgaacgtgtgcagcatcgccaagagaaaccccgaggccatcaccgaggtggtgcagctgcccaaccacttcagcaacagatactacaacagactggtgagaagcctgctggagtgcgacgaggacaccgtgagcaccatcagagacagcctgatggagaagatcggccccaacatggccagcctgttccacatcctgcagaccgaccactgcgcccagacccaccccagagccgacttcaacagaagaagaaccaacgagccccagaagctgaaggtgctgctgagaaacctgagaggcgaggaggacagccccagccacatcaagagaaccagccacgagagcgcctag

SEQ ID NO: 100897 - DNA, 537 bp, synthetic construct; identical to SEQ ID NO: 100896
  misc_feature 1..537: note = Description of Artificial Sequence: Synthetic coding sequence
  source 1..537: mol_type = other DNA

SEQ ID NO: 100898 - DNA, 2733 bp, synthetic construct
  misc_feature 1..2733: note = Description of Artificial Sequence: Synthetic coding sequence
  source 1..2733: mol_type = other DNA
atggccagcagcgcccagagcggcggcagcagcggcggccccgccgtgcccaccgtgcagagaggcatcatcaagatggtgctgagcggctgcgccatcatcgtgagaggccagcccagaggcggccccccccccgagagacagatcaacctgagcaacatcagagccggcaacctggccagaagagccgccgccacccagcccgacgccaaggacacccccgacgagccctgggccttccccgccagagagttcctgagaaagaagctgatcggcaaggaggtgtgcttcaccatcgagaacaagaccccccagggcagagagtacggcatgatctacctgggcaaggacaccaacggcgagaacatcgccgagagcctggtggccgagggcctggccaccagaagagagggcatgagagccaacaaccccgagcagaacagactgagcgagtgcgaggagcaggccaaggccgccaagaagggcatgtggagcgagggcaacggcagccacaccatcagagacctgaagtacaccatcgagaaccccagacacttcgtggacagccaccaccagaagcccgtgaacgccatcatcgagcacgtgagagacggcagcgtggtgagagccctgctgctgcccgactactacctggtgaccgtgatgctgagcggcatcaagtgccccaccttcagaagagaggccgacggcagcgagacccccgagcccttcgccgccgaggccaagttcttcaccgagagcagactgctgcagagagacgtgcagatcatcctggagagctgccacaaccagaacatcctgggcaccatcctgcaccccaacggcaacatcaccgagctgctgctgaaggagggcttcgccagatgcgtggactggagcatcgccgtgtacaccagaggcgccgagaagctgagagccgccgagagattcgccaaggagagaagactgagaatctggagagactacgtggcccccaccgccaacctggaccagaaggacaagcagttcgtggccaaggtgatgcaggtgctgaacgccgacgccatcgtggtgaagctgaacagcggcgactacaagaccatccacctgagcagcatcagaccccccagactggagggcgagaacacccaggacaagaacaagaagctgagacccctgtacgacatcccctacatgttcgaggccagagagttcctgagaaagaagctgatcggcaagaaggtgaacgtgaccgtggactacatcagacccgccagccccgccaccgagaccgtgcccgccttcagcgagagaacctgcgccaccgtgaccatcggcggcatcaacatcgccgaggccctggtgagcaagggcctggccaccgtgatcagatacagacaggacgacgaccagagaagcagccactacgacgagctgctggccgccgaggccagagccatcaagaacggcaagggcctgcacagcaagaaggaggtgcccatccacagagtggccgacatcagcggcgacacccagaaggccaagcagttcctgcccttcctgcagagagccggcagaagcgaggccgtggtggagtacgtgttcagcggcagcagactgaagctgtacctgcccaaggagacctgcctgatcaccttcctgctggccggcatcgagtgccccagaggcgccagaaacctgcccggcctggtgcaggagggcgagcccttcagcgaggaggccaccctgttcaccaaggagctggtgctgcagagagaggtggaggtggaggtggagagcatggacaaggccggcaacttcatcggctggctgcacatcgacggcgccaacctgagcgtgctgctggtggagcacgccctgagcaaggtgcacttcaccgccgagagaagcagctactacaagagcctgctgagcgccgaggaggccgccaagcagaagaaggagaaggtgtgggcccactacgaggagcagcccgtggaggaggtgatgcccgtgctggaggagaaggagagaagcgccagctacaagcccgtgttcgtgaccgagatcaccgacgacctgcacttctacgtgcaggacgtggagaccggcacccagctggagaagctgatggagaacatgagaaacgacatcgccagccacccccccgtggagggcagctacgcccccagaagaggcgagttctgcatcgccaagttcgtggacggcgagtggtacagagccagagtggagaaggtggagagccccgccaagatccacgtgttctacatcgactacggcaacagagaggtgctgcccagcaccagactgggcaccctgagccccgccttcagcaccagagtgctgcccgcccaggccaccgagtacgccttcgccttcatccaggtgccccaggacgacgacgccagaaccgacgccgtggacagcgtggtgagagacatccagaacacccagtgcctgctgaacgtggagcacctgagcgccggctgcccccacgtgaccctgcagttcgccgacagcaagggcgacgtgggcctgggcctggtgaaggagggcctggtgatggtggaggtgagaaaggagaagcagttccagaaggtgatcaccgagtacctgaacgcccaggagagcgccaagagcgccagactgaacctgtggagatacggcgacttcagagccgacgacgccgacgagttcggctacagcagatag

SEQ ID NO: 100899 - DNA, 2703 bp, synthetic construct
  misc_feature 1..2703: note = Description of Artificial Sequence: Synthetic coding sequence
  source 1..2703: mol_type = other DNA
atggccagcagcgccgtgcccaccgtgcagagaggcatcatcaagatggtgctgagcggctgcgccatcatcgtgagaggccagcccagaggcggccccccccccgagagacagatcaacctgagcaacatcagagccggcaacctggccagaagagccgccgccacccagcccgacgccaaggacacccccgacgagccctgggccttccccgccagagagttcctgagaaagaagctgatcggcaaggaggtgtgcttcaccatcgagaacaagaccccccagggcagagagtacggcatgatctacctgggcaaggacaccaacggcgagaacatcgccgagagcctggtggccgagggcctggccaccagaagagagggcatgagagccaacaaccccgagcagaacagactgagcgagtgcgaggagcaggccaaggccgccaagaagggcatgtggagcgagggcaacggcagccacaccatcagagacctgaagtacaccatcgagaaccccagacacttcgtggacagccaccaccagaagcccgtgaacgccatcatcgagcacgtgagagacggcagcgtggtgagagccctgctgctgcccgactactacctggtgaccgtgatgctgagcggcatcaagtgccccaccttcagaagagaggccgacggcagcgagacccccgagcccttcgccgccgaggccaagttcttcaccgagagcagactgctgcagagagacgtgcagatcatcctggagagctgccacaaccagaacatcctgggcaccatcctgcaccccaacggcaacatcaccgagctgctgctgaaggagggcttcgccagatgcgtggactggagcatcgccgtgtacaccagaggcgccgagaagctgagagccgccgagagattcgccaaggagagaagactgagaatctggagagactacgtggcccccaccgccaacctggaccagaaggacaagcagttcgtggccaaggtgatgcaggtgctgaacgccgacgccatcgtggtgaagctgaacagcggcgactacaagaccatccacctgagcagcatcagaccccccagactggagggcgagaacacccaggacaagaacaagaagctgagacccctgtacgacatcccctacatgttcgaggccagagagttcctgagaaagaagctgatcggcaagaaggtgaacgtgaccgtggactacatcagacccgccagccccgccaccgagaccgtgcccgccttcagcgagagaacctgcgccaccgtgaccatcggcggcatcaacatcgccgaggccctggtgagcaagggcctggccaccgtgatcagatacagacaggacgacgaccagagaagcagccactacgacgagctgctggccgccgaggccagagccatcaagaacggcaagggcctgcacagcaagaaggaggtgcccatccacagagtggccgacatcagcggcgacacccagaaggccaagcagttcctgcccttcctgcagagagccggcagaagcgaggccgtggtggagtacgtgttcagcggcagcagactgaagctgtacctgcccaaggagacctgcctgatcaccttcctgctggccggcatcgagtgccccagaggcgccagaaacctgcccggcctggtgcaggagggcgagcccttcagcgaggaggccaccctgttcaccaaggagctggtgctgcagagagaggtggaggtggaggtggagagcatggacaaggccggcaacttcatcggctggctgcacatcgacggcgccaacctgagcgtgctgctggtggagcacgccctgagcaaggtgcacttcaccgccgagagaagcagctactacaagagcctgctgagcgccgaggaggccgccaagcagaagaaggagaaggtgtgggcccactacgaggagcagcccgtggaggaggtgatgcccgtgctggaggagaaggagagaagcgccagctacaagcccgtgttcgtgaccgagatcaccgacgacctgcacttctacgtgcaggacgtggagaccggcacccagctggagaagctgatggagaacatgagaaacgacatcgccagccacccccccgtggagggcagctacgcccccagaagaggcgagttctgcatcgccaagttcgtggacggcgagtggtacagagccagagtggagaaggtggagagccccgccaagatccacgtgttctacatcgactacggcaacagagaggtgctgcccagcaccagactgggcaccctgagccccgccttcagcaccagagtgctgcccgcccaggccaccgagtacgccttcgccttcatccaggtgccccaggacgacgacgccagaaccgacgccgtggacagcgtggtgagagacatccagaacacccagtgcctgctgaacgtggagcacctgagcgccggctgcccccacgtgaccctgcagttcgccgacagcaagggcgacgtgggcctgggcctggtgaaggagggcctggtgatggtggaggtgagaaaggagaagcagttccagaaggtgatcaccgagtacctgaacgcccaggagagcgccaagagcgccagactgaacctgtggagatacggcgacttcagagccgacgacgccgacgagttcggctacagcagatag

SEQ ID NO: 100900 - DNA, 705 bp, synthetic construct
  misc_feature 1..705: note = Description of Artificial Sequence: Synthetic coding sequence
  source 1..705: mol_type = other DNA
atgaaccacctgcccgaggacatggagaacgccctgaccggcagccagagcagccacgccagcctgagaaacatccacagcatcaaccccacccagctgatggccagaatcgagagctacgagggcagagagaagaagggcatcagcgacgtgagaagaaccttctgcctgttcgtgaccttcgacctgctgttcgtgaccctgctgtggatcatcgagctgaacgtgaacggcggcatcgagaacaccctggagaaggaggtgatgcagtacgactactacagcagctacttcgacatcttcctgctggccgtgttcagattcaaggtgctgatcctggcctacgccgtgtgcagactgagacactggtgggccatcgccctgaccaccgccgtgaccagcgccttcctgctggccaaggtgatcctgagcaagctgttcagccagggcgccttcggctacgtgctgcccatcatcagcttcatcctggcctggatcgagacctggttcctggacttcaaggtgctgccccaggaggccgaggaggagaacagactgctgatcgtgcaggacgccagcgagagagccgccctgatccccggcggcctgagcgacggccagttctacagcccccccgagagcgaggccggcagcgaggaggccgaggagaagcaggacagcgagaagcccctgctggagctgtag

SEQ ID NO: 100901 - DNA, 705 bp, synthetic construct; identical to SEQ ID NO: 100900
  misc_feature 1..705: note = Description of Artificial Sequence: Synthetic coding sequence
  source 1..705: mol_type = other DNA

SEQ ID NO: 100902 - DNA, 621 bp, synthetic construct
  misc_feature 1..621: note = Description of Artificial Sequence: Synthetic coding sequence
  source 1..621: mol_type = other DNA
atgaaccacctgcccgaggacatggagaacgccctgaccggcagccagagcagccacgccagcctgagaaacatccacagcatcaaccccacccagctgatggccagaatcgagagctacgagggcagagagaagaagggcatcagcgacgtgagaagaaccttctgcctgttcgtgaccttcgacctgctgttcgtgaccctgctgtggatcatcgagctgaacgtgaacggcggcatcgagaacaccctggagaaggaggtgatgcagtacgactactacagcagctacttcgacatcttcctgctggccgtgttcagattcaaggtgctgatcctggcctacgccgtgtgcagactgagacactggtgggccatcgccctgaccaccgccgtgaccagcgccttcctgctggccaaggtgatcctgagcaagctgttcagccagggcgccttcggctacgtgctgcccatcatcagcttcatcctggcctggatcgagacctggttcctggacttcaaggtgctgccccaggaggccgaggaggagaacagactgctgatcgtgcaggacgccagcgagagagccgccctgatccccggcggcctgagcgacggctag

SEQ ID NO: 100903 - DNA, 555 bp, synthetic construct
  misc_feature 1..555: note = Description of Artificial Sequence: Synthetic coding sequence
  source 1..555: mol_type = other DNA
atgaaccacctgcccgaggacatggagaacgccctgaccggcagccagagcagccacgccagcctgagaaacatccacagcatcaaccccacccagctgatggccagaatcgagagctacgagggcagagagaagaagggcatcagcgacgtgagaagaaccttctgcctgttcgtgaccttcgacctgctgttcgtgaccctgctgtggatcatcgagctgaacgtgaacggcggcatcgagaacaccctggagaaggaggtgatgcagtacgactactacagcagctacttcgacatcttcctgctggccgtgttcagattcaaggtgctgatcctggcctacgccgtgtgcagactgagacactggtgggccatcgccctgaccaccgccgtgaccagcgccttcctgctggccaaggtgatcctgagcaagctgttcagccagggcgccttcggctacgtgctgcccatcatcagcttcatcctggcctggatcgagacctggttcctggacttcaaggtgctgccccaggaggccgaggaggagaactag

SEQ ID NO: 100904 - DNA, 519 bp, synthetic construct
  misc_feature 1..519: note = Description of Artificial Sequence: Synthetic coding sequence
  source 1..519: mol_type = other DNA
atgaaccacctgcccgaggacatggagaacgccctgaccggcagccagagcagccacgccagcctgagaaacatccacagcatcaaccccacccagctgatggccagaatcgagagctacgagggcagagagaagaagggcatcagcgacgtgagaagaaccttctgcctgttcgtgaccttcgacctgctgttcgtgaccctgctgtggatcatcgagctgaacgtgaacggcggcatcgagaacaccctggagaaggaggtgatgcagtacgactactacagcagctacttcgacatcttcctgctggccgtgttcagattcaaggtgctgatcctggcctacgccgtgtgcagactgagacactggtgggccatcgccctgaccaccgccgtgaccagcgccttcctgctggccaaggtgatcctgagcaagctgttcagccagggcgccttcggctacgtgctgcccatcatcagcttcatcctggcctggatcgagacctggttcctggactag

SEQ ID NO: 100905 - DNA, 684 bp, synthetic construct
  misc_feature 1..684: note = Description of Artificial Sequence: Synthetic coding sequence
  source 1..684: mol_type = other DNA
atggagaacgccctgaccggcagccagagcagccacgccagcctgagaaacatccacagcatcaaccccacccagctgatggccagaatcgagagctacgagggcagagagaagaagggcatcagcgacgtgagaagaaccttctgcctgttcgtgaccttcgacctgctgttcgtgaccctgctgtggatcatcgagctgaacgtgaacggcggcatcgagaacaccctggagaaggaggtgatgcagtacgactactacagcagctacttcgacatcttcctgctggccgtgttcagattcaaggtgctgatcctggcctacgccgtgtgcagactgagacactggtgggccatcgccctgaccaccgccgtgaccagcgccttcctgctggccaaggtgatcctgagcaagctgttcagccagggcgccttcggctacgtgctgcccatcatcagcttcatcctggcctggatcgagacctggttcctggacttcaaggtgctgccccaggaggccgaggaggagaacagactgctgatcgtgcaggacgccagcgagagagccgccctgatccccggcggcctgagcgacggccagttctacagcccccccgagagcgaggccggcagcgaggaggccgaggagaagcaggacagcgagaagcccctgctggagctgtag

SEQ ID NO: 100906 - DNA, 1338 bp, synthetic construct
  misc_feature 1..1338: note = Description of Artificial Sequence: Synthetic coding sequence
  source 1..1338: mol_type = other DNA
atgagcaagctgcccagagagctgaccagagacctggagagaagcctgcccgccgtggccagcctgggcagcagcctgagccacagccagagcctgagcagccacctgctgcccccccccgagaagagaagagccatcagcgacgtgagaagaaccttctgcctgttcgtgaccttcgacctgctgttcatcagcctgctgtggatcatcgagctgaacaccaacaccggcatcagaaagaacctggagcaggagatcatccagtacaacttcaagaccagcttcttcgacatcttcgtgctggccttcttcagattcagcggcctgctgctgggctacgccgtgctgagactgagacactggtgggtgatcgccgtgaccaccctggtgagcagcgccttcctgatcgtgaaggtgatcctgagcgagctgctgagcaagggcgccttcggctacctgctgcccatcgtgagcttcgtgctggcctggctggagacctggttcctggacttcaaggtgctgccccaggaggccgaggaggagagatggtacctggccgcccaggtggccgtggccagaggccccctgctgttcagcggcgccctgagcgagggccagttctacagcccccccgagagcttcgccggcagcgacaacgagagcgacgaggaggtggccggcaagaagagcttcagcgcccaggagagagagtacatcagacagggcaaggaggccaccgccgtggtggaccagatcctggcccaggaggagaactggaagttcgagaagaacaacgagtacggcgacaccgtgtacaccatcgaggtgcccttccacggcaagaccttcatcctgaagaccttcctgccctgccccgccgagctggtgtaccaggaggtgatcctgcagcccgagagaatggtgctgtggaacaagaccgtgaccgcctgccagatcctgcagagagtggaggacaacaccctgatcagctacgacgtgagcgccggcgccgccggcggcgtggtgagccccagagacttcgtgaacgtgagaagaatcgagagaagaagagacagatacctgagcagcggcatcgccaccagccacagcgccaagccccccacccacaagtacgtgagaggcgagaacggccccggcggcttcatcgtgctgaagagcgccagcaaccccagagtgtgcaccttcgtgtggatcctgaacaccgacctgaagggcagactgcccagatacctgatccaccagagcctggccgccaccatgttcgagttcgccttccacctgagacagagaatcagcgagctgggcgccagagcctag

SEQ ID NO: 100907 - DNA, 1284 bp, synthetic construct
  misc_feature 1..1284: note = Description of Artificial Sequence: Synthetic coding sequence
  source 1..1284: mol_type = other DNA
atgagcaagctgcccagagagctgaccagagacctggagagaagcctgcccgccgtggccagcctgggcagcagcctgagccacagccagagcctgagcagccacctgctgcccccccccgagaagagaagagccatcagcgacgtgagaagaaccttctgcctgttcgtgaccttcgacctgctgttcatcagcctgctgtggatcatcgagctgaacaccaacaccggcatcagaaagaacctggagcaggagatcatccagtacaacttcaagaccagcttcttcgacatcttcgtgctggccttcttcagattcagcggcctgctgctgggctacgccgtgctgagactgagacactggtgggtgatcgccctgctgagcaagggcgccttcggctacctgctgcccatcgtgagcttcgtgctggcctggctggagacctggttcctggacttcaaggtgctgccccaggaggccgaggaggagagatggtacctggccgcccaggtggccgtggccagaggccccctgctgttcagcggcgccctgagcgagggccagttctacagcccccccgagagcttcgccggcagcgacaacgagagcgacgaggaggtggccggcaagaagagcttcagcgcccaggagagagagtacatcagacagggcaaggaggccaccgccgtggtggaccagatcctggcccaggaggagaactggaagttcgagaagaacaacgagtacggcgacaccgtgtacaccatcgaggtgcccttccacggcaagaccttcatcctgaagaccttcctgccctgccccgccgagctggtgtaccaggaggtgatcctgcagcccgagagaatggtgctgtggaacaagaccgtgaccgcctgccagatcctgcagagagtggaggacaacaccctgatcagctacgacgtgagcgccggcgccgccggcggcgtggtgagccccagagacttcgtgaacgtgagaagaatcgagagaagaagagacagatacctgagcagcggcatcgccaccagccacagcgccaagccccccacccacaagtacgtgagaggcgagaacggccccggcggcttcatcgtgctgaagagcgccagcaaccccagagtgtgcaccttcgtgtggatcctgaacaccgacctgaagggcagactgcccagatacctgatccaccagagcctggccgccaccatgttcgagttcgccttccacctgagacagagaatcagcgagctgggcgccagagcctag

SEQ ID NO: 100908 - DNA, 591 bp, synthetic construct
  misc_feature 1..591: note = Description of Artificial Sequence: Synthetic coding sequence
  source 1..591: mol_type = other DNA
atgagcaagctgcccagagagctgaccagagacctggagagaagcctgcccgccgtggccagcctgggcagcagcctgagccacagccagagcctgagcagccacctgctgcccccccccgagaagagaagagccatcagcgacgtgagaagaaccttctgcctgttcgtgaccttcgacctgctgttcatcagcctgctgtggatcatcgagctgaacaccaacaccggcatcagaaagaacctggagcaggagatcatccagtacaacttcaagaccagcttcttcgacatcttcgtgctggccttcttcagattcagcggcctgctgctgggctacgccgtgctgagactgagacactggtgggtgatcgccgtgaccaccctggtgagcagcgccttcctgatcgtgaaggtgatcctgagcgagctgctgagcaagggcgccttcggctacctgctgcccatcgtgagcttcgtgctggcctggctggagacctggttcctggacttcaaggtgctgccccaggaggccgaggaggagagatggtacctggccgcccaggtggccgtggccagaggccccctgtag

SEQ ID NO: 100909 - DNA, 1338 bp, synthetic construct
  misc_feature 1..1338: note = Description of Artificial Sequence: Synthetic coding sequence
  source 1..1338: mol_type = other DNA
atgagcaagctgcccagagagctgaccagagacctggagagaagcctgcccgccgtggccagcctgggcagcagcctgagccacagccagagcctgagcagccacctgctgcccccccccgagaagagaagagccatcagcgacgtgagaagaaccttctgcctgttcgtgaccttcgacctgctgttcatcagcctgctgtggatcatcgagctgaacaccaacaccggcatcagaaagaacctggagcaggagatcatccagtacaacttcaagaccagcttcttcgacatcttcgtgctggccttcttcagattcagcggcctgctgctgggctacgccgtgctgagactgagacactggagcagaagatggtgccccgtgcacagcagcctgagcagaagcagcagcctgagctgcagcgccaagggccacctggccacctgcagccccagcagcctgctgagcagccccggctggagacccggcagcctgaccagcaagagctaccccagaaagctgaagagaagcgacagcgccccccccggctacctggccgcccaggtggccgtggccagaggccccctgctgttcagcggcgccctgagcgagggccagttctacagcccccccgagagcttcgccggcagcgacaacgagagcgacgaggaggtggccggcaagaagagcttcagcgcccaggagagagagtacatcagacagggcaaggaggccaccgccgtggtggaccagatcctggcccaggaggagaactggaagttcgagaagaacaacgagtacggcgacaccgtgtacaccatcgaggtgcccttccacggcaagaccttcatcctgaagaccttcctgccctgccccgccgagctggtgtaccaggaggtgatcctgcagcccgagagaatggtgctgtggaacaagaccgtgaccgcctgccagatcctgcagagagtggaggacaacaccctgatcagctacgacgtgagcgccggcgccgccggcggcgtggtgagccccagagacttcgtgaacgtgagaagaatcgagagaagaagagacagatacctgagcagcggcatcgccaccagccacagcgccaagccccccacccacaagtacgtgagaggcgagaacggccccggcggcttcatcgtgctgaagagcgccagcaaccccagagtgtgcaccttcgtgtggatcctgaacaccgacctgaagggcagactgcccagatacctgatccaccagagcctggccgccaccatgttcgagttcgccttccacctgagacagagaatcagcgagctgggcgccagagcctag

SEQ ID NO: 100910 - DNA, 618 bp, synthetic construct
  misc_feature 1..618: note = Description of Artificial Sequence: Synthetic coding sequence
  source 1..618: mol_type = other DNA
atggagggcctgagcgacgtggccagcttcgccaccaagctgaagaacaccctgatccagtaccacagcatcgaggaggacaagtggagagtggccaagaagaccaaggacgtgaccgtgtggagaaagcccagcgaggagttcaacggctacctgtacaaggcccagggcgtgatcgacgacctggtgtacagcatcatcgaccacatcagacccggcccctgcagactggactgggacagcctgatgaccagcctggacatcctggagaacttcgaggagaactgctgcgtgatgagatacaccaccgccggccagctgtggaacatcatcagccccagagagttcgtggacttcagctacaccgtgggctacaaggagggcctgctgagctgcggcatcagcctggactgggacgagaagagacccgagttcgtgagaggctacaaccacccctgcggctggttctgcgtgcccctgaaggacaaccccaaccagagcctgctgaccggctacatccagaccgacctgagaggcatgatcccccagagcgccgtggacaccgccatggccagcaccctgaccaacttctacggcgacctgagaaaggccctgtag

SEQ ID NO: 100911 - DNA, 576 bp, synthetic construct
  misc_feature 1..576: note = Description of Artificial Sequence: Synthetic coding sequence
  source 1..576: mol_type = other DNA
atggagggcctgagcgacgtggccagcttcgccaccaagctgaagaacaccctgatccagtaccacagcatcgaggaggacaagtggagagtggccaagaagaccaaggacgtgaccgtgtggagaaagcccagcgaggagttcaacggctacctgtacaaggcccagggcgtgatcgacgacctggtgtacagcatcatcgaccacatcagacccggcccctgcagactggactgggacagcctgatgaccagcctggacatcctggagaacttcgaggagaactgctgcgtgatgagatacaccaccgccggccagctgtggaacatcatcagccccagagagttcgtggacttcagctacaccgtgggctacaaggagggcctgctgagctgcggcatcagcctggactgggacgagaagagacccgagttcgtgagaggctacaaccacccctgcggctggttctgcgtgcccctgaaggacaaccccaaccagagcctgctgaccggctacatccagaccgacctgagaggcatgatcccccagagcgccgtggacaccgccatggcctag

SEQ ID NO: 100912 - DNA, 642 bp, synthetic construct
  misc_feature 1..642: note = Description of Artificial Sequence: Synthetic coding sequence
  source 1..642: mol_type = other DNA
atggaccccgccctggccgcccagatgagcgaggccgtggccgagaagatgctgcagtacagaagagacaccgccggctggaagatctgcagagagggcaacggcgtgagcgtgagctggagacccagcgtggagttccccggcaacctgtacagaggcgagggcatcgtgtacggcaccctggaggaggtgtgggactgcgtgaagcccgccgtgggcggcctgagagtgaagtgggacgagaacgtgaccggcttcgagatcatccagagcatcaccgacaccctgtgcgtgagcagaaccagcacccccagcgccgccatgaagctgatcagccccagagacttcgtggacctggtgctggtgaagagatacgaggacggcaccatcagcagcaacgccacccacgtggagcaccccctgtgcccccccaagcccggcttcgtgagaggcttcaaccacccctgcggctgcttctgcgagcccctgcccggcgagcccaccaagaccaacctggtgaccttcttccacaccgacctgagcggctacctgccccagaacgtggtggacagcttcttccccagaagcatgaccagattctacgccaacctgcagaaggccgtgaagcagttccacgagtag

SEQ ID NO: 100913 - DNA, 663 bp, synthetic construct
  misc_feature 1..663: note = Description of Artificial Sequence: Synthetic coding sequence
  source 1..663: mol_type = other DNA
atggacttcaaggccatcgcccagcagaccgcccaggaggtgctgggctacaacagagacaccagcggctggaaggtggtgaagaccagcaagaagatcaccgtgagcagcaaggccagcagaaagttccacggcaacctgtacagagtggagggcatcatccccgagagccccgccaagctgagcgacttcctgtaccagaccggcgacagaatcacctgggacaagagcctgcaggtgtacaacatggtgcacagaatcgacagcgacaccttcatctgccacaccatcacccagagcttcgccgtgggcagcatcagccccagagacttcatcgacctggtgtacatcaagagatacgagggcaacatgaacatcatcagcagcaagagcgtggacttccccgagtacccccccagcagcaactacatcagaggctacaaccacccctgcggcttcgtgtgcagccccatggaggagaaccccgcctacagcaagctggtgatgttcgtgcagaccgagatgagaggcaagctgagccccagcatcatcgagaagaccatgcccagcaacctggtgaacttcatcctgaacgccaaggacggcatcaaggcccacagaacccccagcagaagaggcttccaccacaacagccacagctag

SEQ ID NO: 100914 - DNA, 3072 bp, synthetic construct
  misc_feature 1..3072: note = Description of Artificial Sequence: Synthetic coding sequence
  source 1..3072: mol_type = other DNA
atgaccctgaacaactgcgccagcatgaagctggaggtgcacttccagagcaagcagaacgaggacagcgaggaggaggagcagtgcaccatcagcagccactgggccttccagcaggagagcaagtgctggagccccatgggcagcagcgacctgctggccccccccagccccggcctgcccgccaccagcagctgcgagagcgtgctgaccgagctgagcgccaccagcctgcccgtgatcaccgtgagcctgccccccgagcccgccgacctgcccctgcccggcagagcccccagcagcagcgacagacccctgctgagccccacccagggccaggagggcccccaggacaaggccaagaagagacacagaaacagaagcttcctgaagcacctggagagcctgagaagaaaggagaagagcggcagccagcaggccgagcccaagcacagccccgccaccagcgagaaggtgagcaaggccagcagcttcagaagctgcagaggcttcctgagcgccggcttctacagagccaagaactgggccgccaccagcgccggcggcagcggcgccaacaccagaaaggcctgggaggcctggcccgtggccagcttcagacacccccagtggacccacagaggcgactgcctggtgcacgtgcccggcgaccacaagcccggcaccttccccagaagcctgagcatcgagagcctgtgccccgaggacggccacagactggccgactggcagcccggcagaagatggggctgcgagggcagaagaggcagctgcggcagcaccggcagccacgccagcacctacgacaacctgcccgagctgtaccccgccgagcccgtgatggtgggcgccgaggccgaggacgaggacgacgaggagagcggcggcagctacgcccacctggacgacatcctgcagcacgtgtggggcctgcagcagagagtggagctgtggagcagagccatgtaccccgacctgggccccggcgacgaggaggaggaggaggccaccagcagcgtggagatcgccaccgtggaggtgaagtgccaggccgaggccctgagccagatggaggtgcccgcccacggcgagagccccgcctgggcccaggccgaggtgcagcccgccgtgctggcccccgcccaggcccccgccgaggccgagcccgtggcccaggaggaggccgaggcccccgcccccgcccccgcccccgcccccgcccaggacagcgagcaggaggcccacagcggcggcgagcccaccttcgccagcagcctgagcgtggaggagggccacagcatcagcgacaccgtggccagcagcagcgagctggacagcagcggcaacagcatgaacgaggccgaggccgccggccccctggccggcctgcaggccagcatgcccagagagagaagagacagcggcgtgggcgccagcctgaccagaccctgcagaaagctgagatggcacagcttccagaacagccacagacccagcctgaacagcgagagcctggagatcaacagacagttcgccggccagatcaacctgctgcacaagggcagcctgctgagactgaccgccttcatggagaagtacaccgtgccccacaagcagggctgggtgtggagcatgcccaagttcatgagaagaaacaagacccccgactacagaggccagcacgtgttcggcgtgccccccctgatccacgtgcagagaaccggccagcccctgccccagagcatccagcaggccatgagatacctgagaagccagtgcctggaccaggtgggcatcttcagaaagagcggcgtgaagagcagaatccagaacctgagacagatgaacgagaccagccccgacaacgtgtgctacgagggccagagcgcctacgacgtggccgacctgctgaagcagtacttcagagacctgcccgagcccatcttcaccagcaagctgaccaccaccttcctgcagatctaccagctgctgcccaaggaccagtggctggccgccgcccaggccgccaccctgctgctgcccgacgagaacagagaggtgctgcagaccctgctgtacttcctgagcgacatcgccagcgccgaggagaaccagatgaccgccggcaacctggccgtgtgcctggcccccagcatcttccacctgaacgtgagcaagaaggacagccccagccccagaatcaagagcaagagaagcctgatcggcagacccggccccagagacctgagcgacaacatggccgccacccagggcctgagccacatgatcagcgactgcaagaagctgttccaggtgccccaggacatggtgctgcagctgtgcagcagctacagcgccgccgagctgagcccccccggccccgccctggccgagctgagacaggcccaggccgccggcgtgagcctgagcctgtacatggaggagaacatccaggacctgctgagagacgccgccgagagattcaagggctggatgagcgtgcccggcccccagcacaccgagctggcctgcagaaaggcccccgacggccaccccctgagactgtggaaggccagcaccgaggtggccgccccccccgccgtggtgctgcacagagtgctgagagagagagccctgtgggacgaggacctgctgagagcccaggtgctggaggccctgatgcccggcgtggagctgtaccactacgtgaccgacagcatggccccccacccctgcagagacttcgtggtgctgagaatgtggagaagcgacctgcccagaggcggctgcctgctggtgagccagagcctggaccccgagcagcccgtgcccgagagcggcgtgagagccctgatgctgaccagccagtacctgatggagccctgcggcctgggcagaagcagactgacccacatctgcagagccgacctgagaggcagaagccccgactggtacaacaaggtgttcggccacctgtgcgccatggaggtggccaagatcagagacagcttccccaccctgcaggccgccggccccgagaccaagctgtag

SEQ ID NO: 100915 - DNA, 3072 bp, synthetic construct; identical to SEQ ID NO: 100914
  misc_feature 1..3072: note = Description of Artificial Sequence: Synthetic coding sequence
  source 1..3072: mol_type = other DNA

SEQ ID NO: 100916 - DNA, 3312 bp, synthetic construct
  misc_feature 1..3312: note = Description of Artificial Sequence: Synthetic coding sequence
  source 1..3312: mol_type = other DNA
atgcccctgctggacgtgttctggagctgcttcagaaaggtgaagtgcttccccctgctgcaggtgaagaagaacgccgaggccgaggccaagagagcctgcgagtggctgcaggccaccggcttcccccagtacgtgcagctgttcgaggagggcagcttccccctggacatcggcagcgtgaagaagaaccacggcttcctggacgaggacagcctgggcgccctgtgcagaagactgatgaccctgaacaactgcgccagcatgaagctggaggtgcacttccagagcaagcagaacgaggacagcgaggaggaggagcagtgcaccatcagcagccactgggccttccagcaggagagcaagtgctggagccccatgggcagcagcgacctgctggccccccccagccccggcctgcccgccaccagcagctgcgagagcgtgctgaccgagctgagcgccaccagcctgcccgtgatcaccgtgagcctgccccccgagcccgccgacctgcccctgcccggcagagcccccagcagcagcgacagacccctgctgagccccacccagggccaggagggcccccaggacaaggccaagaagagacacagaaacagaagcttcctgaagcacctggagagcctgagaagaaaggagaagagcggcagccagcaggccgagcccaagcacagccccgccaccagcgagaaggtgagcaaggccagcagcttcagaagctgcagaggcttcctgagcgccggcttctacagagccaagaactgggccgccaccagcgccggcggcagcggcgccaacaccagaaaggcctgggaggcctggcccgtggccagcttcagacacccccagtggacccacagaggcgactgcctggtgcacgtgcccggcgaccacaagcccggcaccttccccagaagcctgagcatcgagagcctgtgccccgaggacggccacagactggccgactggcagcccggcagaagatggggctgcgagggcagaagaggcagctgcggcagcaccggcagccacgccagcacctacgacaacctgcccgagctgtaccccgccgagcccgtgatggtgggcgccgaggccgaggacgaggacgacgaggagagcggcggcagctacgcccacctggacgacatcctgcagcacgtgtggggcctgcagcagagagtggagctgtggagcagagccatgtaccccgacctgggccccggcgacgaggaggaggaggaggccaccagcagcgtggagatcgccaccgtggaggtgaagtgccaggccgaggccctgagccagatggaggtgcccgcccacggcgagagccccgcctgggcccaggccgaggtgcagcccgccgtgctggcccccgcccaggcccccgccgaggccgagcccgtggcccaggaggaggccgaggcccccgcccccgcccccgcccccgcccccgcccaggacagcgagcaggaggcccacagcggcggcgagcccaccttcgccagcagcctgagcgtggaggagggccacagcatcagcgacaccgtggccagcagcagcgagctggacagcagcggcaacagcatgaacgaggccgaggccgccggccccctggccggcctgcaggccagcatgcccagagagagaagagacagcggcgtgggcgccagcctgaccagaccctgcagaaagctgagatggcacagcttccagaacagccacagacccagcctgaacagcgagagcctggagatcaacagacagttcgccggccagatcaacctgctgcacaagggcagcctgctgagactgaccgccttcatggagaagtacaccgtgccccacaagcagggctgggtgtggagcatgcccaagttcatgagaagaaacaagacccccgactacagaggccagcacgtgttcggcgtgccccccctgatccacgtgcagagaaccggccagcccctgccccagagcatccagcaggccatgagatacctgagaagccagtgcctggaccaggtgggcatcttcagaaagagcggcgtgaagagcagaatccagaacctgagacagatgaacgagaccagccccgacaacgtgtgctacgagggccagagcgcctacgacgtggccgacctgctgaagcagtacttcagagacctgcccgagcccatcttcaccagcaagctgaccaccaccttcctgcagatctaccagctgctgcccaaggaccagtggctggccgccgcccaggccgccaccctgctgctgcccgacgagaacagagaggtgctgcagaccctgctgtacttcctgagcgacatcgccagcgccgaggagaaccagatgaccgccggcaacctggccgtgtgcctggcccccagcatcttccacctgaacgtgagcaagaaggacagccccagccccagaatcaagagcaagagaagcctgatcggcagacccggccccagagacctgagcgacaacatggccgccacccagggcctgagccacatgatcagcgactgcaagaagctgttccaggtgccccaggacatggtgctgcagctgtgcagcagctacagcgccgccgagctgagcccccccggccccgccctggccgagctgagacaggcccaggccgccggcgtgagcctgagcctgtacatggaggagaacatccaggacctgctgagagacgccgccgagagattcaagggctggatgagcgtgcccggcccccagcacaccgagctggcctgcagaaaggcccccgacggccaccccctgagactgtggaaggccagcaccgaggtggccgccccccccgccgtggtgctgcacagagtgctgagagagagagccctgtgggacgaggacctgctgagagcccaggtgctggaggccctgatgcccggcgtggagctgtaccactacgtgaccgacagcatggccccccacccctgcagagacttcgtggtgctgagaatgtggagaagcgacctgcccagaggcggctgcctgctggtgagccagagcctggaccccgagcagcccgtgcccgagagcggcgtgagagccctgatgctgaccagccagtacctgatggagccctgcggcctgggcagaagcagactgacccacatctgcagagccgacctgagaggcagaagccccgactggtacaacaaggtgttcggccacctgtgcgccatggaggtggccaagatcagagacagcttccccaccctgcaggccgccggccccgagaccaagctgtag

SEQ ID NO: 100917 - DNA, 159 bp, synthetic construct
  misc_feature 1..159: note = Description of Artificial Sequence: Synthetic coding sequence
  source 1..159: mol_type = other DNA
atgcccctgctggacgtgttctggagctgcttcagaaaggtgaagtgcttccccctgctgcaggtgaagaagaacgccgaggccgaggccaagagagcctgcgagtggctgcaggccaccggcttcccccagtacgtgcagctgttcgagggcggctag

SEQ ID NO: 100918 - DNA, 189 bp, synthetic construct
  misc_feature 1..189: note = Description of Artificial Sequence: Synthetic coding sequence
  source 1..189: mol_type = other DNA
atgaagttcctggtgttcgccttcatcctggccctgatggtgagcatgatcggcgccgacagcagcgaggagaagttcctgagaagaatcggcagattcggctacggctacggcccctaccagcccgtgcccgagcagcccctgtacccccagccctaccagccccagtaccagcagtacaccttctag

SEQ ID NO: 100919 - DNA, 159 bp, synthetic construct
  misc_feature 1..159: note = Description of Artificial Sequence: Synthetic coding sequence
  source 1..159: mol_type = other DNA
atgaagttcctggtgttcgccttcatcctggccctgatggtgagcatgatcggcgccgacagcagcgaggagtacggctacggcccctaccagcccgtgcccgagcagcccctgtacccccagccctaccagccccagtaccagcagtacaccttctag

SEQ ID NO: 100920 - DNA, 843 bp, synthetic construct
  misc_feature 1..843: note = Description of Artificial Sequence: Synthetic coding sequence
  source 1..843: mol_type = other DNA
atgagatggttcctgccctggaccctggccgccgtgaccgccgccgccgccagcaccgtgctggccaccgccctgagccccgcccccaccaccatggacttcacccccgcccccctggaggacaccagcagcagaccccagttctgcaagtggccctgcgagtgcccccccagcccccccagatgccccctgggcgtgagcctgatcaccgacggctgcgagtgctgcaagatgtgcgcccagcagctgggcgacaactgcaccgaggccgccatctgcgacccccacagaggcctgtactgcgactacagcggcgacagacccagatacgccatcggcgtgtgcgcccacgccgtgggcgaggtggaggcctggcacagaaactgcatcgcctacaccagcccctggagcccctgcagcaccagctgcggcctgggcgtgagcaccagaatcagcaacgtgaacgcccagtgctggcccgagcaggagagcagactgtgcaacctgagaccctgcgacgtggacatccacaccctgatcaaggccggcaagaagtgcctggccgtgtaccagcccgaggccagcatgaacttcaccctggccggctgcatcagcaccagaagctaccagcccaagtactgcggcgtgtgcatggacaacagatgctgcatcccctacaagagcaagaccatcgacgtgagcttccagtgccccgacggcctgggcttcagcagacaggtgctgtggatcaacgcctgcttctgcaacctgagctgcagaaaccccaacgacatcttcgccgacctggagagctaccccgacttcagcgagatcgccaactag

SEQ ID NO: 100921 - DNA, 507 bp, synthetic construct
  misc_feature 1..507: note = Description of Artificial Sequence: Synthetic coding sequence
  source 1..507: mol_type = other DNA
atggccaagaccgccatggcctacaaggagaagatgaaggagctgagcatgctgagcctgatctgcagctgcttctaccccgagcccagaaacatcaacatctacacctacgacgacatggaggtgaagcagatcaacaagagagccagcggccaggccttcgagctgatcctgaagccccccagccccaagaagaaggacctgagcctggaggagatccagaagaagctggaggccgccgaggagagaagaaagagccaggaggcccaggtgctgaagcagctggccgagaagagagagcacgagagagaggtgctgcagaaggccctggaggagaacaacaacttcagcaagatggccgaggagaagctgatcctgaagatggagcagatcaaggagaacagagaggccaacctggccgccatcatcgagagactgcaggagaaggagagacacgccgccgaggtgagaagaaacaaggagctgcaggtggagctgagcggctag

SEQ ID NO: 100922 - DNA, 564 bp, synthetic construct
  misc_feature 1..564: note = Description of Artificial Sequence: Synthetic coding sequence
  source 1..564: mol_type = other DNA
atggccaagaccgccatggcctacaaggagaagatgaaggagctgagcatgctgagcctgatctgcagctgcttctaccccgagcccagaaacatcaacatctacacctacgacgacatggaggtgaagcagatcaacaagagagccagcggccaggccttcgagctgatcctgaagccccccagccccatcagcgaggcccccagaaccctggccagccccaagaagaaggacctgagcctggaggagatccagaagaagctggaggccgccgaggagagaagaaagagccaggaggcccaggtgctgaagcagctggccgagaagagagagcacgagagagaggtgctgcagaaggccctggaggagaacaacaacttcagcaagatggccgaggagaagctgatcctgaagatggagcagatcaaggagaacagagaggccaacctggccgccatcatcgagagactgcaggagaagctggtgaagttcatcagcagcgagctgaaggagagcatcgagagccagttcctggagctgcagagagagggcgagaagcagtag

SEQ ID NO: 100923 - DNA, 543 bp, synthetic construct
  misc_feature 1..543: note = Description of Artificial Sequence: Synthetic coding sequence
  source 1..543: mol_type = other DNA
atggccagcaccatcagcgcctacaaggagaagatgaaggagctgagcgtgctgagcctgatctgcagctgcttctacacccagccccaccccaacaccgtgtaccagtacggcgacatggaggtgaagcagctggacaagagagccagcggccagagcttcgaggtgatcctgaagagccccagcgacctgagccccgagagccccatgctgagcagcccccccaagaagaaggacaccagcctggaggagctgcagaagagactggaggccgccgaggagagaagaaagacccaggaggcccaggtgctgaagcagctggccgagagaagagagcacgagagagaggtgctgcacaaggccctggaggagaacaacaacttcagcagacaggccgaggagaagctgaactacaagatggagctgagcaaggagatcagagaggcccacctggccgccctgagagagagactgagagagaaggagctgcacgccgccgaggtgagaagaaacaaggagcagagagaggagatgagcggctag

SEQ ID NO: 100924 - DNA, 510 bp, synthetic construct
  misc_feature 1..510: note = Description of Artificial Sequence: Synthetic coding sequence
  source 1..510: mol_type = other DNA
atgaaggagctgagcgtgctgagcctgatctgcagctgcttctacacccagccccaccccaacaccgtgtaccagtacggcgacatggaggtgaagcagctggacaagagagccagcggccagagcttcgaggtgatcctgaagagccccagcgacctgagccccgagagccccatgctgagcagcccccccaagaagaaggacaccagcctggaggagctgcagaagagactggaggccgccgaggagagaagaaagacccaggaggcccaggtgctgaagcagctggccgagagaagagagcacgagagagaggtgctgcacaaggccctggaggagaacaacaacttcagcagacaggccgaggagaagctgaactacaagatggagctgagcaaggagatcagagaggcccacctggccgccctgagagagagactgagagagaaggagctgcacgccgccgaggtgagaagaaacaaggagcagagagaggagatgagcggctag

SEQ ID NO: 100925 - DNA, 1422 bp, synthetic construct
  misc_feature 1..1422: note = Description of Artificial Sequence: Synthetic coding sequence
  source 1..1422: mol_type = other DNA
atgttcagcgtgcagctgagcctgggcgagcagacctgggagagcgagggcagcagcatcaagaaggcccagcaggccgtggccaacaaggccctgaccgagagcaccctgcccaagcccgtgcagaagccccccaagagcaacgtgaacaacaaccccggcagcatcacccccaccgtggagctgaacggcctggccatgaagagaggcgagcccgccatctacagacccctggaccccaagcccttccccaactacagagccaactacaacttcagaggcatgtacaaccagagataccactgccccgtgcccaagatcttctacgtgcagctgaccgtgggcaacaacgagttcttcggcgagggcaagaccagacaggccgccagacacaacgccgccatgaaggccctgcaggccctgcagaacgagcccatccccgagagaagcccccagaacggcgagagcggcaaggacgtggacgacgacaaggacgccaacaagagcgagatcagcctggtgttcgagatcgccctgaagagaaacatgcccgtgagcttcgaggtgatcaaggagagcggccccccccacatgaagagcttcgtgaccagagtgagcgtgggcgagttcagcgccgagggcgagggcaacagcaagaagctgagcaagaagagagccgccaccaccgtgctgcaggagctgaagaagctgccccccctgcccgtggtggagaagcccaagctgttcttcaagaagagacccaagaccatcgtgaaggccggccccgagtacggccagggcatgaaccccatcagcagactggcccagatccagcaggccaagaaggagaaggagcccgactacgtgctgctgagcgagagaggcatgcccagaagaagagagttcgtgatgcaggtgaaggtgggcaacgaggtggccaccggcaccggccccaacaagaagatcgccaagaagaacgccgccgaggccatgctgctgcagctgggctacaaggccagcaccaacctgcaggaccagctggagaagaccggcgagaacaagggctggagcggccccaagcccggcttccccgagcccaccaacaacacccccaagggcatcctgcacctgagccccgacgtgtaccaggagatggaggccagcagacacaaggtgatcagcggcaccaccctgggctacctgagccccaaggacatgaaccagcccagcagcagcttcttcagcatcagccccaccagcaacagcagcgccaccatcgccagagagctgctgatgaacggcaccagcagcaccgccgaggccatcggcctgaagggcagcagccccacccccccctgcagccccgtgcagcccagcaagcagctggagtacctggccagaatccagggcttccaggtgtag

SEQ ID NO: 100926 - DNA, 1515 bp, synthetic construct
  misc_feature 1..1515: note = Description of Artificial Sequence: Synthetic coding sequence
  source 1..1515: mol_type = other DNA
atgaagagaggcgagcccgccatctacagacccctggaccccaagcccttccccaactacagagccaactacaacttcagaggcatgtacaaccagagataccactgccccgtgcccaagatcttctacgtgcagctgaccgtgggcaacaacgagttcttcggcgagggcaagaccagacaggccgccagacacaacgccgccatgaaggccctgcaggccctgcagaacgagcccatccccgagagaagcccccagaacggcgagagcggcaaggacgtggacgacgacaaggacgccaacaagagcgagatcagcctggtgttcgagatcgccctgaagagaaacatgcccgtgagcttcgaggtgatcaaggagagcggccccccccacatgaagagcttcgtgaccagagtgagcgtgggcgagttcagcgccgagggcgagggcaacagcaagaagctgagcaagaagagagccgccaccaccgtgctgcaggagctgaagaagctgccccccctgcccgtggtggagaagcccaagctgttcttcaagaagagacccaagaccatcgtgaaggccggccccgagtacggccagggcatgaaccccatcagcagactggcccagatccagcaggccaagaaggagaaggagcccgactacgtgctgctgagcgagagaggcatgcccagaagaagagagttcgtgatgcaggtgaaggtgggcaacgaggtggccaccggcaccggccccaacaagaagatcgccaagaagaacgccgccgaggccatgctgctgcagctgggctacaaggccagcaccaacctgcaggaccagctggagaagaccggcgagaacaagggctggagcggccccaagcccggcttccccgagcccaccaacaacacccccaagggcatcctgcacctgagccccgacgtgtaccaggagatggaggccagcagacacaaggtgatcagcggcaccaccctgggctacctgagccccaaggacatgaaccagcccagcagcagcttcttcagcatcagccccaccagcaacagcagcgccaccatcgccagagagctgctgatgaacggcaccagcagcaccgccgaggccatcggcctgaagggcagcagccccacccccccctgcagccccgtgcagcccagcaagcagctggagtacctggccagaatccagggcttccaggtgcactactgcgacagacagagcggcaaggagtgcgtgacctgcctgaccctggcccccgtgcagatgaccttccacgccatcggcagcagcatcgaggccagccacgaccaggccgccctgagcgccctgaagcagttcagcgagcagggcctggaccccatcgacggcgccatgaacatcgagaagggcagcctggagaagcaggccaagcacctgagagagaaggccgacaacaaccaggccccccccggcagcatcgcccaggactgcaagaagagcaacagcgccgtgtag

SEQ ID NO: 100927 - DNA, 1197 bp, synthetic construct
  misc_feature 1..1197: note = Description of Artificial Sequence: Synthetic coding sequence
  source 1..1197: mol_type = other DNA
atgaaggccctgcaggccctgcagaacgagcccatccccgagagaagcccccagaacggcgagagcggcaaggacgtggacgacgacaaggacgccaacaagagcgagatcagcctggtgttcgagatcgccctgaagagaaacatgcccgtgagcttcgaggtgatcaaggagagcggccccccccacatgaagagcttcgtgaccagagtgagcgtgggcgagttcagcgccgagggcgagggcaacagcaagaagctgagcaagaagagagccgccaccaccgtgctgcaggagctgaagaagctgccccccctgcccgtggtggagaagcccaagctgttcttcaagaagagacccaagaccatcgtgaaggccggccccgagtacggccagggcatgaaccccatcagcagactggcccagatccagcaggccaagaaggagaaggagcccgactacgtgctgctgagcgagagaggcatgcccagaagaagagagttcgtgatgcaggtgaaggtgggcaacgaggtggccaccggcaccggccccaacaagaagatcgccaagaagaacgccgccgaggccatgctgctgcagctgggctacaaggccagcaccaacctgcaggaccagctggagaagaccggcgagaacaagggctggagcggccccaagcccggcttccccgagcccaccaacaacacccccaagggcatcctgcacctgagccccgacgtgtaccaggagatggaggccagcagacacaaggtgatcagcggcaccaccctgggctacctgagccccaaggacatgaaccagcccagcagcagcttcttcagcatcagccccaccagcaacagcagcgccaccatcgccagagagctgctgatgaacggcaccagcagcaccgccgaggccatcggcctgaagggcagcagccccacccccccctgcagccccgtgcagcccagcaagcagctggagtacctggccagaatccagggcttccaggccgccctgagcgccctgaagcagttcagcgagcagggcctggaccccatcgacggcgccatgaacatcgagaagggcagcctggagaagcaggccaagcacctgagagagaaggccgacaacaaccaggccccccccggcagcatcgcccaggactgcaagaagagcaacagcgccgtgtag

SEQ ID NO: 100928 - DNA, 1440 bp, synthetic construct
  misc_feature 1..1440: note = Description of Artificial Sequence: Synthetic coding sequence
  source 1..1440: mol_type = other DNA
atgctgcagatcaaccagatgttcagcgtgcagctgagcctgggcgagcagacctgggagagcgagggcagcagcatcaagaaggcccagcaggccgtggccaacaaggccctgaccgagagcaccctgcccaagcccgtgcagaagccccccaagagcaacgtgaacaacaaccccggcagcatcacccccaccgtggagctgaacggcctggccatgaagagaggcgagcccgccatctacagacccctggaccccaagcccttccccaactacagagccaactacaacttcagaggcatgtacaaccagagataccactgccccgtgcccaagatcttctacgtgcagctgaccgtgggcaacaacgagttcttcggcgagggcaagaccagacaggccgccagacacaacgccgccatgaaggccctgcaggccctgcagaacgagcccatccccgagagaagcccccagaacggcgagagcggcaaggacgtggacgacgacaaggacgccaacaagagcgagatcagcctggtgttcgagatcgccctgaagagaaacatgcccgtgagcttcgaggtgatcaaggagagcggccccccccacatgaagagcttcgtgaccagagtgagcgtgggcgagttcagcgccgagggcgagggcaacagcaagaagctgagcaagaagagagccgccaccaccgtgctgcaggagctgaagaagctgccccccctgcccgtggtggagaagcccaagctgttcttcaagaagagacccaagaccatcgtgaaggccggccccgagtacggccagggcatgaaccccatcagcagactggcccagatccagcaggccaagaaggagaaggagcccgactacgtgctgctgagcgagagaggcatgcccagaagaagagagttcgtgatgcaggtgaaggtgggcaacgaggtggccaccggcaccggccccaacaagaagatcgccaagaagaacgccgccgaggccatgctgctgcagctgggctacaaggccagcaccaacctgcaggaccagctggagaagaccggcgagaacaagggctggagcggccccaagcccggcttccccgagcccaccaacaacacccccaagggcatcctgcacctgagccccgacgtgtaccaggagatggaggccagcagacacaaggtgatcagcggcaccaccctgggctacctgagccccaaggacatgaaccagcccagcagcagcttcttcagcatcagccccaccagcaacagcagcgccaccatcgccagagagctgctgatgaacggcaccagcagcaccgccgaggccatcggcctgaagggcagcagccccacccccccctgcagccccgtgcagcccagcaagcagctggagtacctggccagaatccagggcttccaggtgtag

SEQ ID NO: 100929 - DNA, 615 bp, synthetic construct
  misc_feature 1..615: note = Description of Artificial Sequence: Synthetic coding sequence
  source 1..615: mol_type = other DNA
atgctgcagatcaaccagatgttcagcgtgcagctgagcctgggcgagcagacctgggagagcgagggcagcagcatcaagaaggcccagcaggccgtggccaacaaggccctgaccgagagcaccctgcccaagcccgtgcagaagccccccaagagcaacgtgaacaacaaccccggcagcatcacccccaccgtggagctgaacggcctggccatgaagagaggcgagcccgccatctacagacccctggaccccaagcccttccccaactacagagccaactacaacttcagaggcatgtacaaccagagataccactgccccgtgcccaagatcttctacgtgcagctgaccgtgggcaacaacgagttcttcggcgagggcaagaccagacaggccgccagacacaacgccgccatgaaggccctgcaggccctgcagaacgagcccatccccgagagaagcccccagaacggcgagagcggcaaggacgtggacgacgacaaggacgccaacaagagcgagatcagcctggtgttcgagatcgccctgaagagaaacatgcccgtgagcttcgaggtgatcaaggagagcggccccccccacatgtag

SEQ ID NO: 100930 - DNA, 195 bp, synthetic construct
  misc_feature 1..195: note = Description of Artificial Sequence: Synthetic coding sequence
  source 1..195: mol_type = other DNA
atgctgcagatcaaccagatgttcagcgtgcagctgagcctgggcgagcagacctgggagagcgagggcagcagcatcaagaaggcccagcaggccgtggccaacaaggccctgaccgagagcaccctgcccaagcccgtgcagaagccccccaagagcaacgtgaacaacaaccccggcagcatcaccccctag

SEQ ID NO: 100931 - DNA, 1440 bp, synthetic construct; identical to SEQ ID NO: 100928
  misc_feature 1..1440: note = Description of Artificial Sequence: Synthetic coding sequence
  source 1..1440: mol_type = other DNA

SEQ ID NO: 100932 - DNA, 1617 bp, synthetic construct
  misc_feature 1..1617: note = Description of Artificial Sequence: Synthetic coding sequence
  source 1..1617: mol_type = other DNA
atgctgcagatcaaccagatgttcagcgtgcagctgagcctgggcgagcagacctgggagagcgagggcagcagcatcaagaaggcccagcaggccgtggccaacaaggccctgaccgagagcaccctgcccaagcccgtgcagaagccccccaagagcaacgtgaacaacaaccccggcagcatcacccccaccgtggagctgaacggcctggccatgaagagaggcgagcccgccatctacagacccctggaccccaagcccttccccaactacagagccaactacaacttcagaggcatgtacaaccagagataccactgccccgtgcccaagatcttctacgtgcagctgaccgtgggcaacaacgagttcttcggcgagggcaagaccagacaggccgccagacacaacgccgccatgaaggccctgcaggccctgcagaacgagcccatccccgagagaagcccccagaacggcgagagcggcaaggacgtggacgacgacaaggacgccaacaagagcgagatcagcctggtgttcgagatcgccctgaagagaaacatgcccgtgagcttcgaggtgatcaaggagagcggccccccccacatgaagagcttcgtgaccagagtgagcgtgggcgagttcagcgccgagggcgagggcaacagcaagaagctgagcaagaagagagccgccaccaccgtgctgcaggagctgaagaagctgccccccctgcccgtggtggagaagcccaagctgttcttcaagaagagacccaagaccatcgtgaaggccggccccgagtacggccagggcatgaaccccatcagcagactggcccagatccagcaggccaagaaggagaaggagcccgactacgtgctgctgagcgagagaggcatgcccagaagaagagagttcgtgatgcaggtgaaggtgggcaacgaggtggccaccggcaccggccccaacaagaagatcgccaagaagaacgccgccgaggccatgctgctgcagctgggctacaaggccagcaccaacctgcaggaccagctggagaagaccggcgagaacaagggctggagcggccccaagcccggcttccccgagcccaccaacaacacccccaagggcatcctgcacctgagccccgacgtgtaccaggagatggaggccagcagacacaaggtgatcagcggcaccaccctgggctacctgagccccaaggacatgaaccagcccagcagcagcttcttcagcatcagccccaccagcaacagcagcgccaccatcgccagagagctgctgatgaacggcaccagcagcaccgccgaggccatcggcctgaagggcagcagccccacccccccctgcagccccgtgcagcccagcaagcagctggagtacctggccagaatccagggcttccaggccgccctgagcgccctgaagcagttcagcgagcagggcctggaccccatcgacggcgccatgaacatcgagaagggcagcctggagaagcaggccaagcacctgagagagaaggccgacaacaaccaggccccccccggcagcatcgcccaggactgcaagaagagcaacagcgccgtgtag

SEQ ID NO: 100933 - DNA, 318 bp, synthetic construct
  misc_feature 1..318: note = Description of Artificial Sequence: Synthetic coding sequence
  source 1..318: mol_type = other DNA
atgctgcagatcaaccagatgttcagcgtgcagctgagcctgggcgagcagacctgggagagcgagggcagcagcatcaagaaggcccagcaggccgtggccaacaaggccctgaccgagagcaccctgcccaagcccgtgcagaagccccccaagagcaacgtgaacaacaaccccggcagcatcacccccaccgtggagctgaacggcctggccatgaagagaggcgagcccgccatctacagacccctggaccccaagcccttccccaactacagagccaactacaacttcagaggcatgtacaaccagagatag

SEQ ID NO: 100934 - DNA, 1713 bp, synthetic construct
  misc_feature 1..1713: note = Description of Artificial Sequence: Synthetic coding sequence
  source 1..1713: mol_type = other DNA
atggccaaccccaaggagaagaccgccatgtgcctggtgaacgagctggccagattcaacagagtgcagccccagtacaagctgctgaacgagagaggccccgcccacagcaagatgttcagcgtgcagctgagcctgggcgagcagacctgggagagcgagggcagcagcatcaagaaggcccagcaggccgtggccaacaaggccctgaccgagagcaccctgcccaagcccgtgcagaagccccccaagagcaacgtgaacaacaaccccggcagcatcacccccaccgtggagctgaacggcctggccatgaagagaggcgagcccgccatctacagacccctggaccccaagcccttccccaactacagagccaactacaacttcagaggcatgtacaaccagagataccactgccccgtgcccaagatcttctacgtgcagctgaccgtgggcaacaacgagttcttcggcgagggcaagaccagacaggccgccagacacaacgccgccatgaaggccctgcaggccctgcagaacgagcccatccccgagagaagcccccagaacggcgagagcggcaaggacgtggacgacgacaaggacgccaacaagagcgagatcagcctggtgttcgagatcgccctgaagagaaacatgcccgtgagcttcgaggtgatcaaggagagcggccccccccacatgaagagcttcgtgaccagagtgagcgtgggcgagttcagcgccgagggcgagggcaacagcaagaagctgagcaagaagagagccgccaccaccgtgctgcaggagctgaagaagctgccccccctgcccgtggtggagaagcccaagctgttcttcaagaagagacccaagaccatcgtgaaggccggccccgagtacggccagggcatgaaccccatcagcagactggcccagatccagcaggccaagaaggagaaggagcccgactacgtgctgctgagcgagagaggcatgcccagaagaagagagttcgtgatgcaggtgaaggtgggcaacgaggtggccaccggcaccggccccaacaagaagatcgccaagaagaacgccgccgaggccatgctgctgcagctgggctacaaggccagcaccaacctgcaggaccagctggagaagaccggcgagaacaagggctggagcggccccaagcccggcttccccgagcccaccaacaacacccccaagggcatcctgcacctgagccccgacgtgtaccaggagatggaggccagcagacacaaggtgatcagcggcaccaccctgggctacctgagccccaaggacatgaaccagcccagcagcagcttcttcagcatcagccccaccagcaacagcagcgccaccatcgccagagagctgctgatgaacggcaccagcagcaccgccgaggccatcggcctgaagggcagcagccccacccccccctgcagccccgtgcagcccagcaagcagctggagtacctggccagaatccagggcttccaggccgccctgagcgccctgaagcagttcagcgagcagggcctggaccccatcgacggcgccatgaacatcgagaagggcagcctggagaagcaggccaagcacctgagagagaaggccgacaacaaccaggccccccccggcagcatcgcccaggactgcaagaagagcaacagcgccgtgtag

SEQ ID NO: 100935 - DNA, 1044 bp, synthetic construct
  misc_feature 1..1044: note = Description of Artificial Sequence: Synthetic coding sequence
  source 1..1044: mol_type = other DNA
agcctgctgaccaacgacgccagcagcgagagcatcgccagcttcagcaagcaggaggtgatgagcagcttcctgcccgagggcggctgctacgagctgctgaccgtgatcggcaagggcttcgaggacctgatgaccgtgaacctggccagatacaagcccaccggcgagtacgtgaccgtgagaagaatcaacctggaggcctgcagcaacgagatggtgaccttcctgcagggcgagctgcacgtgagcaagctgttcaaccaccccaacatcgtgccctacagagccaccttcatcgccgacaacgagctgtgggtggtgaccagcttcatggcctacggcagcgccaaggacctgatctgcacccacttcatggacggcatgaacgagctggccatcgcctacatcctgcagggcgtgctgaaggccctggactacatccaccacatgggctacgtgcacagaagcgtgaaggccagccacatcctgatcagcgtggacggcaaggtgtacctgagcggcctgagaagcaacctgagcatgatcagccacggccagagacagagagtggtgcacgacttccccaagtacagcgtgaaggtgctgccctggctgagccccgaggtgctgcagcagaacctgcagggctacgacgccaagagcgacatctacagcgtgggcatcaccgcctgcgagctggccaacggccacgtgcccttcaaggacatgcccgccacccagatgctgctggagaagctgaacggcaccgtgccctgcctgctggacaccagcaccatccccgccgaggagctgaccatgagccccagcagaagcgtggccaacagcggcctgagcgacagcctgaccaccagcacccccagacccagcaacggcgacagccccagccacccctaccacagaaccttcagcccccacttccaccacttcgtggagcagtgcctgcagagaaaccccgacgccagatacccctgctggcccggccccggcctgagagagagcagaggctgcagcggcggctag

SEQ ID NO: 100936 - DNA, 1296 bp, synthetic construct
  misc_feature 1..1296: note = Description of Artificial Sequence: Synthetic coding sequence
  source 1..1296: mol_type = other DNA
atgagcttcctggtgagcaagcccgagagaatcagaagatgggtgagcgagaagttcatcgtggagggcctgagagacctggagctgttcggcgagcagccccccggcgacaccagaagaaagaccaacgacgccagcagcgagagcatcgccagcttcagcaagcaggaggtgatgagcagcttcctgcccgagggcggctgctacgagctgctgaccgtgatcggcaagggcttcgaggacctgatgaccgtgaacctggccagatacaagcccaccggcgagtacgtgaccgtgagaagaatcaacctggaggcctgcagcaacgagatggtgaccttcctgcagggcgagctgcacgtgagcaagctgttcaaccaccccaacatcgtgccctacagagccaccttcatcgccgacaacgagctgtgggtggtgaccagcttcatggcctacggcagcgccaaggacctgatctgcacccacttcatggacggcatgaacgagctggccatcgcctacatcctgcagggcgtgctgaaggccctggactacatccaccacatgggctacgtgcacagaagcgtgaaggccagccacatcctgatcagcgtggacggcaaggtgtacctgagcggcctgagaagcaacctgagcatgatcagccacggccagagacagagagtggtgcacgacttccccaagtacagcgtgaaggtgctgccctggctgagccccgaggtgctgcagcagaacctgcagggctacgacgccaagagcgacatctacagcgtgggcatcaccgcctgcgagctggccaacggccacgtgcccttcaaggacatgcccgccacccagatgctgctggagaagctgaacggcaccgtgccctgcctgctggacaccagcaccatccccgccgaggagctgaccatgagccccagcagaagcgtggccaacagcggcctgagcgacagcctgaccaccagcacccccagacccagcaacggcgacagccccagccacccctaccacagaaccttcagcccccacttccaccacttcgtggagcagtgcctgcagagaaaccccgacgccagacccagcgccagcaccctgctgaaccacagcttcttcaagcagatcaagagaagagccagcgaggccctgcccgagctgctgagacccgtgacccccatcaccaacttcgagggcagccagagccaggaccacagcggcatcttcggcctggtgaccaacctggaggagctggaggtggacgactgggagttctag

SEQ ID NO: 100937 - DNA, 1122 bp, synthetic construct
  misc_feature 1..1122: note = Description of Artificial Sequence: Synthetic coding sequence
  source 1..1122: mol_type = other DNA
atgagcagcttcctgcccgagggcggctgctacgagctgctgaccgtgatcggcaagggcttcgaggacctgatgaccgtgaacctggccagatacaagcccaccggcgagtacgtgaccgtgagaagaatcaacctggaggcctgcagcaacgagatggtgaccttcctgcagggcgagctgcacgtgagcaagctgttcaaccaccccaacatcgtgccctacagagccaccttcatcgccgacaacgagctgtgggtggtgaccagcttcatggcctacggcagcgccaaggacctgatctgcacccacttcatggacggcatgaacgagctggccatcgcctacatcctgcagggcgtgctgaaggccctggactacatccaccacatgggctacgtgcacagaagcgtgaaggccagccacatcctgatcagcgtggacggcaaggtgtacctgagcggcctgagaagcaacctgagcatgatcagccacggccagagacagagagtggtgcacgacttccccaagtacagcgtgaaggtgctgccctggctgagccccgaggtgctgcagcagaacctgcagggctacgacgccaagagcgacatctacagcgtgggcatcaccgcctgcgagctggccaacggccacgtgcccttcaaggacatgcccgccacccagatgctgctggagaagctgaacggcaccgtgccctgcctgctggacaccagcaccatccccgccgaggagctgaccatgagccccagcagaagcgtggccaacagcggcctgagcgacagcctgaccaccagcacccccagacccagcaacggcgacagccccagccacccctaccacagaaccttcagcccccacttccaccacttcgtggagcagtgcctgcagagaaaccccgacgccagacccagcgccagcaccctgctgaaccacagcttcttcaagcagatcaagagaagagccagcgaggccctgcccgagctgctgagacccgtgacccccatcaccaacttcgagggcagccagagccaggaccacagcggcatcttcggcctggtgaccaacctggaggagctggaggtggacgactgggagttctag

SEQ ID NO: 100938 - DNA, 1047 bp, synthetic construct
  misc_feature 1..1047: note = Description of Artificial Sequence: Synthetic coding sequence
  source 1..1047: mol_type = other DNA
atgagcttcctgaccaacgacgccagcagcgagagcatcgccagcttcagcaagcaggaggtgatgagcagcttcctgcccgagggcggctgctacgagctgctgaccgtgatcggcaagggcttcgaggacctgatgaccgtgaacctggccagatacaagcccaccggcgagtacgtgaccgtgagaagaatcaacctggaggcctgcagcaacgagatggtgaccttcctgcagggcgagctgcacgtgagcaagctgttcaaccaccccaacatcgtgccctacagagccaccttcatcgccgacaacgagctgtgggtggtgaccagcttcatggcctacggcagcgccaaggacctgatctgcacccacttcatggacggcatgaacgagctggccatcgcctacatcctgcagggcgtgctgaaggccctggactacatccaccacatgggctacgtgcacagaagcgtgaaggccagccacatcctgatcagcgtggacggcaaggtgtacctgagcggcctgagaagcaacctgagcatgatcagccacggccagagacagagagtggtgcacgacttccccaagtacagcgtgaaggtgctgccctggctgagccccgaggtgctgcagcagaacctgcagggctacgacgccaagagcgacatctacagcgtgggcatcaccgcctgcgagctggccaacggccacgtgcccttcaaggacatgcccgccacccagatgctgctggagaagctgaacggcaccgtgccctgcctgctggacaccagcaccatccccgccgaggagctgaccatgagccccagcagaagcgtggccaacagcggcctgagcgacagcctgaccaccagcacccccagacccagcaacggcgacagccccagccacccctaccacagaaccttcagcccccacttccaccacttcgtggagcagtgcctgcagagaaaccccgacgccagatacccctgctggcccggccccggcctgagagagagcagaggctgcagcggcggctag

SEQ ID NO: 100939 - DNA, 900 bp, synthetic construct
  misc_feature 1..900: note = Description of Artificial Sequence: Synthetic coding sequence
  source 1..900: mol_type = other DNA
atgagcttcctggtgagcaagcccgagagaatcagaagatgggtgagcgagaagttcatcgtggagggcctgagagacctggagctgttcggcggcaagggcttcgaggacctgatgaccgtgaacctggccagatacaagcccaccggcgagtacgtgaccgtgagaagaatcaacctggaggcctgcagcaacgagatggtgaccttcctgcagggcgagctgcacgtgagcaagctgttcaaccaccccaacatcgtgccctacagagccaccttcatcgccgacaacgagctgtgggtggtgaccagcttcatggcctacggcagcgccaaggacctgatctgcacccacttcatggacggcatgaacgagctggccatcgcctacatcctgcagggcgtgctgaaggccctggactacatccaccacatgggctacgtgcacagaagcgtgaaggccagccacatcctgatcagcgtggacggcaaggtgtacctgagcggcctgagaagcaacctgagcatgatcagccacggccagagacagagagtggtgcacgacttccccaagtacagcgtgaaggtgctgccctggctgagccccgaggtgctgcagcagaacctgcagggctacgacgccaagagcgacatctacagcgtgggcatcaccgcctgcgagctggccaacggccacgtgcccttcaaggacatgcccgccacccagatgctgctggagaagctgaacggcaccgtgccctgcctgctggacaccagcaccatccccgccgaggagctgaccatgagccccagcagaagcgtggccaacagcggcctgagcgacagcctgaccaccagcacccccagacccagcaacggccccgtgcccgcccccagctag

SEQ ID NO: 100940 - DNA, 1257 bp, synthetic construct
  misc_feature 1..1257: note = Description of Artificial Sequence: Synthetic coding sequence
  source 1..1257: mol_type = other DNA
atgagcctgctggactgcttctgcaccagcagaacccaggtggagagcctgagacccgagaagcagagcgagaccagcatccaccagtacctggtggacgagcccaccctgagctggagcagacccagcaccagagccagcgaggtgctgtgcagcaccaacgtgagccactacgagctgcaggtggagatcggcagaggcttcgacaacctgaccagcgtgcacctggccagacacacccccaccggcaccctggtgaccatcaagatcaccaacctggagaactgcaacgaggagagactgaaggccctgcagaaggccgtgatcctgagccacttcttcagacaccccaacatcaccacctactggaccgtgttcaccgtgggcagctggctgtgggtgatcagccccttcatggcctacggcagcgccagccagctgctgagaacctacttccccgagggcatgagcgagaccctgatcagaaacatcctgttcggcgccgtgagaggcctgaactacctgcaccagaacggctgcatccacagaagcatcaaggccagccacatcctgatcagcggcgacggcctggtgaccctgagcggcctgagccacctgcacagcctggtgaagcacggccagagacacagagccgtgtacgacttcccccagttcagcaccagcgtgcagccctggctgagccccgagctgctgagacaggacctgcacggctacaacgtgaagagcgacatctacagcgtgggcatcaccgcctgcgagctggccagcggccaggtgcccttccaggacatgcacagaacccagatgctgctgcagaagctgaagggccccccctacagccccctggacatcagcatcttcccccagagcgagagcagaatgaagaacagccagagcggcgtggacagcggcatcggcgagagcgtgctggtgagcagcggcacccacaccgtgaacagcgacagactgcacacccccagcagcaagaccttcagccccgccttcttcagcctggtgcagctgtgcctgcagcaggaccccgagaagagacccagcgccagcagcctgctgagccacgtgttcttcaagcagatgaaggaggagagccaggacagcatcctgagcctgctgccccccgcctacaacaagcccagcatcagcctgccccccgtgctgccctggaccgagcccgagtgcgacttccccgacgagaaggacagctactgggagttctag

SEQ ID NO: 100941 - DNA, 1134 bp, synthetic construct
  misc_feature 1..1134: note = Description of Artificial Sequence: Synthetic coding sequence
  source 1..1134: mol_type = other DNA
atgagcctgctggactgcttctgcaccagcagaacccaggtggagagcctgagacccgagaagcagagcgagaccagcatccaccagtacctggtggacgagcccaccctgagctggagcagacccagcaccagagccagcgaggtgctgtgcagcaccaacgtgagccactacgagctgcaggtggagatcggcagaggcttcgacaacctgaccagcgtgcacctggccagacacacccccaccggcaccctggtgaccatcaagatcaccaacctggagaactgcaacgaggagagactgaaggccctgcagaaggccgtgatcctgagccacttcttcagacaccccaacatcaccacctactggaccgtgttcaccgtgggcagctggctgtgggtgatcagccccttcatggcctacggcagcgccagccagctgctgagaacctacttccccgagggcatgagcgagaccctgatcagaaacatcctgttcggcgccgtgagaggcctgaactacctgcaccagaacggctgcatccacagaagcatcaaggccagccacatcctgatcagcggcgacggcctggtgaccctgagcggcctgagccacctgcacagcctggtgaagcacggccagagacacagagccgtgtacgacttcccccagttcagcaccagcgtgcagccctggctgagccccgagctgctgagacaggacctgcacggctacaacgtgaagagcgacatctacagcgtgggcatcaccgcctgcgagctggccagcggccaggtgcccttccaggacatgcacagaacccagatgctgctgcagaagctgaagggccccccctacagccccctggacatcagcatcttcccccagagcgagagcagaatgaagaacagccagagcggcgtggacagcggcatcggcgagagcgtgctggtgagcagcggcacccacaccgtgaacagcgacagactgcacacccccagcagcaagaccttcagccccgccttcttcagcctggtgcagctgtgcctgcagcaggaccccgagaagagacccagcgccagcagcctgctgagccacgtgttcttcaagcagccctacttcgagttcctgtag

SEQ ID NO: 100942 - DNA, 843 bp, synthetic construct
  misc_feature 1..843: note = Description of Artificial Sequence: Synthetic coding sequence
  source 1..843: mol_type = other DNA
ctgggctactgcagcgccagccagctgctgagaacctacttccccgagggcatgagcgagaccctgatcagaaacatcctgttcggcgccgtgagaggcctgaactacctgcaccagaacggctgcatccacagaagcatcaaggccagccacatcctgatcagcggcgacggcctggtgaccctgagcggcctgagccacctgcacagcctggtgaagcacggccagagacacagagccgtgtacgacttcccccagttcagcaccagcgtgcagccctggctgagccccgagctgctgagacaggacctgcacggctacaacgtgaagagcgacatctacagcgtgggcatcaccgcctgcgagctggccagcggccaggtgcccttccaggacatgcacagaacccagatgctgctgcagaagctgaagggccccccctacagccccctggacatcagcatcttcccccagagcgagagcagaatgaagaacagccagagcggcgtggacagcggcatcggcgagagcgtgctggtgagcagcggcacccacaccgtgaacagcgacagactgcacacccccagcagcaagaccttcagccccgccttcttcagcctggtgcagctgtgcctgcagcaggaccccgagaagagacccagcgccagcagcctgctgagccacgtgttcttcaagcagatgaaggaggagagccaggacagcatcctgagcctgctgccccccgcctacaacaagcccagcatcagcctgccccccgtgctgccctggaccgagcccgagtgcgacttccccgacgagaaggacagctactgggagttctag

SEQ ID NO: 100943 - DNA, 1257 bp, synthetic construct; identical to SEQ ID NO: 100940
  misc_feature 1..1257: note = Description of Artificial Sequence: Synthetic coding sequence
  source 1..1257: mol_type = other DNA

SEQ ID NO: 100944 - DNA, 1260 bp, synthetic construct
  misc_feature 1..1260: note = Description of Artificial Sequence: Synthetic coding sequence
  source 1..1260: mol_type = other DNA
atggagagcatcagcatgatgggcagccccaagagcctgagcgagaccttcctgcccaacggcatcaacggcatcaaggacgccagaaaggtgaccgtgggcgtgatcggcagcggcgacttcgccaagagcctgaccatcagactgatcagatgcggctaccacgtggtgatcggcagcagaaaccccaagttcgccagcgagttcttcccccacgtggtggacgtgacccaccacgaggacgccctgaccaagaccaacatcatcttcgtggccatccacagagagcactacaccagcctgtgggacctgagacacctgctggtgggcaagatcctgatcgacgtgagcaacaacatgagaatcaaccagtaccccgagagcaacgccgagtacctggccagcctgttccccgacagcctgatcgtgaagggcttcaacgtggtgagcgcctgggccctgcagctgggccccaaggacgccagcagacaggtgtacatctgcagcaacaacatccaggccagacagcaggtgatcgagctggccagacagctgaacttcatccccatcgacctgggcagcctgagcagcgccagagagatcgagaacctgcccctgagactgttcaccctgtggagaggccccgtggtggtggccatcagcctggccaccttcttcttcctgtacagcttcgtgagagacgtgatccacccctacgccagaaaccagcagagcgacttctacaagatccccatcgagatcgtgaacaagaccctgcccatcgtggccatcaccctgctgagcctggtgtacctggccggcctgctggccgccgcctaccagctgtactacggcaccaagtacagaagattccccccctggctggagacctggctgcagtgcagaaagcagctgggcctgctgagcttcttcttcgccatggtgcacgtggcctacagcctgtgcctgcccatgagaagaagcgagagatacctgttcctgaacatggcctaccagcaggtgcacgccaacatcgagaacagctggaacgaggaggaggtgtggagaatcgagatgtacatcagcttcggcatcatgagcctgggcctgctgagcctgctggccgtgaccagcatccccagcgtgagcaacgccctgaactggagagagttcagcttcatccagatcttctgcagcttcgccgacacccagaccgagctggagctggagttcgtgttcctgctgaccctgctgctgtag

SEQ ID NO: 100945 - DNA, 1473 bp, synthetic construct
  misc_feature 1..1473: note = Description of Artificial Sequence: Synthetic coding sequence
  source 1..1473: mol_type = other DNA
atggagagcatcagcatgatgggcagccccaagagcctgagcgagaccttcctgcccaacggcatcaacggcatcaaggacgccagaaaggtgaccgtgggcgtgatcggcagcggcgacttcgccaagagcctgaccatcagactgatcagatgcggctaccacgtggtgatcggcagcagaaaccccaagttcgccagcgagttcttcccccacgtggtggacgtgacccaccacgaggacgccctgaccaagaccaacatcatcttcgtggccatccacagagagcactacaccagcctgtgggacctgagacacctgctggtgggcaagatcctgatcgacgtgagcaacaacatgagaatcaaccagtaccccgagagcaacgccgagtacctggccagcctgttccccgacagcctgatcgtgaagggcttcaacgtggtgagcgcctgggccctgcagctgggccccaaggacgccagcagacaggtgtacatctgcagcaacaacatccaggccagacagcaggtgatcgagctggccagacagctgaacttcatccccatcgacctgggcagcctgagcagcgccagagagatcgagaacctgcccctgagactgttcaccctgtggagaggccccgtggtggtggccatcagcctggccaccttcttcttcctgtacagcttcgtgagagacgtgatccacccctacgccagaaaccagcagagcgacttctacaagatccccatcgagatcgtgaacaagaccctgcccatcgtggccatcaccctgctgagcctggtgtacctggccggcctgctggccgccgcctaccagctgtactacggcaccaagtacagaagattccccccctggctggagacctggctgcagtgcagaaagcagctgggcctgctgagcttcttcttcgccatggtgcacgtggcctacagcctgtgcctgcccatgagaagaagcgagagatacctgttcctgaacatggcctaccagcaggtgcacgccaacatcgagaacagctggaacgaggaggaggtgtggagaatcgagatgtacatcagcttcggcatcatgagcctgggcctgctgagcctgctggccgtgaccagcatccccagcgtgagcaacgccctgaactggagagagttcagcttcatccagagcaccctgggctacgtggccctgctgatcagcaccttccacgtgctgatctacggctggaagagagccttcgaggaggagtactacagattctacaccccccccaacttcgtgctggccctggtgctgcccagcatcgtgatcctgggcaagatcatcctgttcctgccctgcatcagcagaaagctgaagagaatcaagaagggctgggagaagagccagttcctggaggagggcatgggcggcaccatcccccacgtgagccccgagagagtgaccgtgatgtag

SEQ ID NO: 100946 - DNA, 1473 bp, synthetic construct; identical to SEQ ID NO: 100945
  misc_feature 1..1473: note = Description of Artificial Sequence: Synthetic coding sequence
  source 1..1473: mol_type = other DNA

SEQ ID NO: 100947 - DNA, 1473 bp, synthetic construct; identical to SEQ ID NO: 100945
  misc_feature 1..1473: note = Description of Artificial Sequence: Synthetic coding sequence
  source 1..1473: mol_type = other DNA

SEQ ID NO: 100948 - DNA, 1365 bp, synthetic construct
  misc_feature 1..1365: note = Description of Artificial Sequence: Synthetic coding sequence
  source 1..1365: mol_type = other DNA
atggagagcatcagcatgatgggcagccccaagagcctgagcgagaccttcctgcccaacggcatcaacggcatcaaggacgccagaaaggtgaccgtgggcgtgatcggcagcggcgacttcgccaagagcctgaccatcagactgatcagatgcggctaccacgtggtgatcggcagcagaaaccccaagttcgccagcgagttcttcccccacgtggtggacgtgacccaccacgaggacgccctgaccaagaccaacatcatcttcgtggccatccacagagagcactacaccagcctgtgggacctgagacacctgctggtgggcaagatcctgatcgacgtgagcaacaacatgagaatcaaccagtaccccgagagcaacgccgagtacctggccagcctgttccccgacagcctgatcgtgaagggcttcaacgtggtgagcgcctgggccctgcagctgggccccaaggacgccagcagacaggtgtacatctgcagcaacaacatccaggccagacagcaggtgatcgagctggccagacagctgaacttcatccccatcgacctgggcagcctgagcagcgccagagagatcgagaacctgcccctgagactgttcaccctgtggagaggccccgtggtggtggccatcagcctggccaccttcttcttcctgtacagcttcgtgagagacgtgatccacccctacgccagaaaccagcagagcgacttctacaagatccccatcgagatcgtgaacaagaccctgcccatcgtggccatcaccctgctgagcctggtgtacctggccggcctgctggccgccgcctaccagctgtactacggcaccaagtacagaagattccccccctggctggagacctggctgcagtgcagaaagcagctgggcctgctgagcttcttcttcgccatggtgcacgtggcctacagcctgtgcctgcccatgagaagaagcgagagatacctgttcctgaacatggcctaccagcaggtgcacgccaacatcgagaacagctggaacgaggaggaggtgtggagaatcgagatgtacatcagcttcggcatcatgagcctgggcctgctgagcctgctggccgtgaccagcatccccagcgtgagcaacgccctgaactggagagagttcagcttcatccagagcaccctgggctacgtggccctgctgatcagcaccttccacgtgctgatctacggctggaagagagccttcgaggaggagtactacagattctacaccccccccaacttcgtgctggccctggtgctgcccagcatcgtgatcctggacctgctgcagctgtgcagataccccgactag

SEQ ID NO: 100949 - DNA, 1365 bp, synthetic construct; identical to SEQ ID NO: 100948
  misc_feature 1..1365: note = Description of Artificial Sequence: Synthetic coding sequence
  source 1..1365: mol_type = other DNA

SEQ ID NO: 100950 - DNA, 1365 bp, synthetic construct; identical to SEQ ID NO: 100948
  misc_feature 1..1365: note = Description of Artificial Sequence: Synthetic coding sequence
  source 1..1365: mol_type = other DNA

SEQ ID NO: 100951 - DNA, 267 bp, synthetic construct
  misc_feature 1..267: note = Description of Artificial Sequence: Synthetic coding sequence
  source 1..267: mol_type = other DNA
atggagagcatcagcatgatgggcagccccaagagcctgagcgagaccttcctgcccaacggcatcaacggcatcaaggacgccagaaaggtgaccgtgggcgtgatcggcagcggcgacttcgccaagagcctgaccatcagactgatcagatgcggctaccacgtggtgatcggcagcagaaaccccaagttcgccagcgagttcttcccccacgtggtggacgtgacccaccacgaggacgccctgaccaagaccaacatctag

SEQ ID NO: 100952 - DNA, 549 bp, synthetic construct
  misc_feature 1..549: note = Description of Artificial Sequence: Synthetic coding sequence
  source 1..549: mol_type = other DNA
atggagagcatcagcatgatgggcagccccaagagcctgagcgagaccttcctgcccaacggcatcaacggcatcaaggacgccagaaaggtgaccgtgggcgtgatcggcagcggcgacttcgccaagagcctgaccatcagactgatcagatgcggctaccacgtggtgatcggcagcagaaaccccaagttcgccagcgagttcttcccccacgtggtggacgtgacccaccacgaggacgccctgaccaagaccaacatcatcttcgtggccatccacagagagcactacaccagcctgtgggacctgagacacctgctggtgggcaagatcctgatcgacgtgagcaacaacatgagaatcaaccagtaccccgagagcaacgccgagtacctggccagcctgttccccgacagcctgatcgtgaagggcttcaacgtggtgagcgcctgggccctgcagctgggccccaaggacgccagcagacaggtgtacatctgcagcaacaacatccaggccagacagcaggtgatcgagctggcctag

SEQ ID NO: 100953 - DNA, 1467 bp, synthetic construct
  misc_feature 1..1467: note = Description of Artificial Sequence: Synthetic coding sequence
  source 1..1467: mol_type = other DNA
atgcccgaggagatggacaagcccctgatcagcctgcacctggtggacagcgacagcagcctggccaaggtgcccgacgaggcccccaaggtgggcatcctgggcagcggcgacttcgccagaagcctggccaccagactggtgggcagcggcttcaaggtggtggtgggcagcagaaaccccaagagaaccgccagactgttccccagcgccgcccaggtgaccttccaggaggaggccgtgagcagccccgaggtgatcttcgtggccgtgttcagagagcactacagcagcctgtgcagcctgagcgaccagctggccggcaagatcctggtggacgtgagcaaccccaccgagcaggagcacctgcagcacagagagagcaacgccgagtacctggccagcctgttccccacctgcaccgtggtgaaggccttcaacgtgatcagcgcctggaccctgcaggccggccccagagacggcaacagacaggtgcccatctgcggcgaccagcccgaggccaagagagccgtgagcgagatggccctggccatgggcttcatgcccgtggacatgggcagcctggccagcgcctgggaggtggaggccatgcccctgagactgctgcccgcctggaaggtgcccaccctgctggccctgggcctgttcgtgtgcttctacgcctacaacttcgtgagagacgtgctgcagccctacgtgcaggagagccagaacaagttcttcaagctgcccgtgagcgtggtgaacaccaccctgccctgcgtggcctacgtgctgctgagcctggtgtacctgcccggcgtgctggccgccgccctgcagctgagaagaggcaccaagtaccagagattccccgactggctggaccactggctgcagcacagaaagcagatcggcctgctgagcttcttctgcgccgccctgcacgccctgtacagcttctgcctgcccctgagaagagcccacagatacgacctggtgaacctggccgtgaagcaggtgctggccaacaagagccacctgtgggtggaggaggaggtgtggagaatggagatctacctgagcctgggcgtgctggccctgggcaccctgagcctgctggccgtgaccagcctgcccagcatcgccaacagcctgaactggagagagttcagcttcgtgcagagcagcctgggcttcgtggccctggtgctgagcaccctgcacaccctgacctacggctggaccagagccttcgaggagagcagatacaagttctacctgccccccaccttcaccctgaccctgctggtgccctgcgtggtgatcctggccaaggccctgttcctgctgccctgcatcagcagaagactggccagaatcagaagaggctgggagagagagagcaccatcaagttcaccctgcccaccgaccacgccctggccgagaagaccagccacgtgtag

SEQ ID NO: 100954 - DNA, 1467 bp, synthetic construct; identical to SEQ ID NO: 100953
  misc_feature 1..1467: note = Description of Artificial Sequence: Synthetic coding sequence
  source 1..1467: mol_type = other DNA

SEQ ID NO: 100955 - DNA, 1467 bp, synthetic construct; identical to SEQ ID NO: 100953
  misc_feature 1..1467: note = Description of Artificial Sequence: Synthetic coding sequence
  source 1..1467: mol_type = other DNA

SEQ ID NO: 100956 - DNA, 1467 bp, synthetic construct; identical to SEQ ID NO: 100953
  misc_feature 1..1467: note = Description of Artificial Sequence: Synthetic coding sequence
  source 1..1467: mol_type = other DNA

SEQ ID NO: 100957 - DNA, 1497 bp, synthetic construct
  misc_feature 1..1497: note = Description of Artificial Sequence: Synthetic coding sequence
  source 1..1497: mol_type = other DNA
atgagccaccagcccgccgtggccaccaagatgcccgaggagatggacaagcccctgatcagcctgcacctggtggacagcgacagcagcctggccaaggtgcccgacgaggcccccaaggtgggcatcctgggcagcggcgacttcgccagaagcctggccaccagactggtgggcagcggcttcaaggtggtggtgggcagcagaaaccccaagagaaccgccagactgttccccagcgccgcccaggtgaccttccaggaggaggccgtgagcagccccgaggtgatcttcgtggccgtgttcagagagcactacagcagcctgtgcagcctgagcgaccagctggccggcaagatcctggtggacgtgagcaaccccaccgagcaggagcacctgcagcacagagagagcaacgccgagtacctggccagcctgttccccacctgcaccgtggtgaaggccttcaacgtgatcagcgcctggaccctgcaggccggccccagagacggcaacagacaggtgcccatctgcggcgaccagcccgaggccaagagagccgtgagcgagatggccctggccatgggcttcatgcccgtggacatgggcagcctggccagcgcctgggaggtggaggccatgcccctgagactgctgcccgcctggaaggtgcccaccctgctggccctgggcctgttcgtgtgcttctacgcctacaacttcgtgagagacgtgctgcagccctacgtgcaggagagccagaacaagttcttcaagctgcccgtgagcgtggtgaacaccaccctgccctgcgtggcctacgtgctgctgagcctggtgtacctgcccggcgtgctggccgccgccctgcagctgagaagaggcaccaagtaccagagattccccgactggctggaccactggctgcagcacagaaagcagatcggcctgctgagcttcttctgcgccgccctgcacgccctgtacagcttctgcctgcccctgagaagagcccacagatacgacctggtgaacctggccgtgaagcaggtgctggccaacaagagccacctgtgggtggaggaggaggtgtggagaatggagatctacctgagcctgggcgtgctggccctgggcaccctgagcctgctggccgtgaccagcctgcccagcatcgccaacagcctgaactggagagagttcagcttcgtgcagagcagcctgggcttcgtggccctggtgctgagcaccctgcacaccctgacctacggctggaccagagccttcgaggagagcagatacaagttctacctgccccccaccttcaccctgaccctgctggtgccctgcgtggtgatcctggccaaggccctgttcctgctgccctgcatcagcagaagactggccagaatcagaagaggctgggagagagagagcaccatcaagttcaccctgcccaccgaccacgccctggccgagaagaccagccacgtgtag

SEQ ID NO: 100958 - DNA, 1374 bp, synthetic construct
  misc_feature 1..1374: note = Description of Artificial Sequence: Synthetic coding sequence
  source 1..1374: mol_type = other DNA
atgcccgaggagatggacaagcccctgatcagcctgcacctggtggacagcgacagcagcctggccaaggtgcccgacgaggcccccaaggtgggcatcctgggcagcggcgacttcgccagaagcctggccaccagactggtgggcagcggcttcaaggtggtggtgggcagcagaaaccccaagagaaccgccagactgttccccagcgccgcccaggtgaccttccaggaggaggccgtgagcagccccgaggtgatcttcgtggccgtgttcagagagcactacagcagcctgtgcagcctgagcgaccagctggccggcaagatcctggtggacgtgagcaaccccaccgagcaggagcacctgcagcacagagagagcaacgccgagtacctggccagcctgttccccacctgcaccgtggtgaaggccttcaacgtgatcagcgcctggaccctgcaggccggccccagagacggcaacagacaggtgcccatctgcggcgaccagcccgaggccaagagagccgtgagcgagatggccctggccatgggcttcatgcccgtggacatgggcagcctggccagcgcctgggaggtggaggccatgcccctgagactgctgcccgcctggaaggtgcccaccctgctggccctgggcctgttcgtgtgcttctacgcctacaacttcgtgagagacgtgctgcagccctacgtgcaggagagccagaacaagttcttcaagctgcccgtgagcgtggtgaacaccaccctgccctgcgtggcctacgtgctgctgagcctggtgtacctgcccggcgtgctggccgccgccctgcagctgagaagaggcaccaagtaccagagattccccgactggctggaccactggctgcagcacagaaagcagatcggcctgctgagcttcttctgcgccgccctgcacgccctgtacagcttctgcctgcccctgagaagagcccacagatacgacctggtgaacctggccgtgaagcaggtgctggccaacaagagccacctgtgggtggaggaggaggtgtggagaatggagatctacctgagcctgggcgtgctggccctgggcaccctgagcctgctggccgtgaccagcctgcccagcatcgccaacagcctgaactggagagagttcagcttcgtgcagtgcgtggccaccagcagcgccggcaacaccggcagcggcaccagaagacccgagagccagagccaggacccccacctgcccgccccccaccaccagaccagcttcctgggccccagaagcttctgctgcagcctggtgcccgtgagcaccccctacggccaccaggaggacctgagctggaccagatag

SEQ ID NO: 100959 - DNA, 1467 bp, synthetic construct; identical to SEQ ID NO: 100953
  misc_feature 1..1467: note = Description of Artificial Sequence: Synthetic coding sequence
  source 1..1467: mol_type = other DNA

SEQ ID NO: 100960 - DNA, 1374 bp, synthetic construct; identical to SEQ ID NO: 100958
  misc_feature 1..1374: note = Description of Artificial Sequence: Synthetic coding sequence
  source 1..1374: mol_type = other DNA

SEQ ID NO: 100961 - DNA, 432 bp, synthetic construct
  misc_feature 1..432: note = Description of Artificial Sequence: Synthetic coding sequence
  source 1..432: mol_type = other DNA
atggagatctacctgagcctgggcgtgctggccctgggcaccctgagcctgctggccgtgaccagcctgcccagcatcgccaacagcctgaactggagagagttcagcttcgtgcagagcagcctgggcttcgtggccctggtgctgagcaccctgcacaccctgacctacggctggaccagagccttcgaggagagcagatacaagttctacctgccccccaccttcaccctgaccctgctggtgccctgcgtggtgatcctggccaaggccctgttcctgctgccctgcatcagcagaagactggccagaatcagaagaggctgggagagagagagcaccatcaagttcaccctgcccaccgaccacgccctgagccccctgggcttcctgttcctggtggtgcagagcggcatcaccgtgtgcaagtag

SEQ ID NO: 100962 - DNA, 852 bp, synthetic construct
  misc_feature 1..852: note = Description of Artificial Sequence: Synthetic coding sequence
  source 1..852: mol_type = other DNA
atggagaagacctgcatcgacgccctgcccctgaccatgaacagcagcgagaagcaggagaccgtgtgcatcttcggcaccggcgacttcggcagaagcctgggcctgaagatgctgcagtgcggctacagcgtggtgttcggcagcagaaacccccagaagaccaccctgctgcccagcggcgccgaggtgctgagctacagcgaggccgccaagaagagcggcatcatcatcatcgccatccacagagagcactacgacttcctgaccgagctgaccgaggtgctgaacggcaagatcctggtggacatcagcaacaacctgaagatcaaccagtaccccgagagcaacgccgagtacctggcccacctggtgcccggcgcccacgtggtgaaggccttcaacaccatcagcgcctgggccctgcagagcggcgccctggacgccagcagacaggccatcctgaagaaggagaaccccttcagcaccagcagcgcctggctgagcgacagctacgtggccctgggcatcctgggcttcttcctgttcgtgctgctgggcatcaccagcctgcccagcgtgagcaacgccgtgaactggagagagttcagattcgtgcagagcaagctgggctacctgaccctgatcctgtgcaccgcccacaccctggtgtacggcggcaagagattcctgagccccagcaacctgagatggtacctgcccgccgcctacgtgctgggcctgatcatcccctgcaccgtgctggtgatcaagttcgtgctgatcatgccctgcgtggacaacaccctgaccagaatcagacagggctgggagagaaacagcaagcactag

SEQ ID NO: 100963 - DNA, 1380 bp, synthetic construct
  misc_feature 1..1380: note = Description of Artificial Sequence: Synthetic coding sequence
  source 1..1380: mol_type = other DNA
atggagaagacctgcatcgacgccctgcccctgaccatgaacagcagcgagaagcaggagaccgtgtgcatcttcggcaccggcgacttcggcagaagcctgggcctgaagatgctgcagtgcggctacagcgtggtgttcggcagcagaaacccccagaagaccaccctgctgcccagcggcgccgaggtgctgagctacagcgaggccgccaagaagagcggcatcatcatcatcgccatccacagagagcactacgacttcctgaccgagctgaccgaggtgctgaacggcaagatcctggtggacatcagcaacaacctgaagatcaaccagtaccccgagagcaacgccgagtacctggcccacctggtgcccggcgcccacgtggtgaaggccttcaacaccatcagcgcctgggccctgcagagcggcgccctggacgccagcagacaggtgttcgtgtgcggcaacgacagcaaggccaagcagagagtgatggacatcgtgagaaacctgggcctgacccccatggaccagggcagcctgatggccgccaaggagatcgagaagtaccccctgcagctgttccccatgtggagattccccttctacctgagcgccgtgctgtgcgtgttcctgttcttctactgcgtgatcagagacgtgatctacccctacgtgtacgagaagaaggacaacaccttcagaatggccatcagcatccccaacagaatcttccccatcaccgccctgaccctgctggccctggtgtacctgcccggcgtgatcgccgccatcctgcagctgtacagaggcaccaagtacagaagattccccgactggctggaccactggatgctgtgcagaaagcagctgggcctggtggccctgggcttcgccttcctgcacgtgctgtacaccctggtgatccccatcagatactacgtgagatggagactgggcaacctgaccgtgacccaggccatcctgaagaaggagaaccccttcagcaccagcagcgcctggctgagcgacagctacgtggccctgggcatcctgggcttcttcctgttcgtgctgctgggcatcaccagcctgcccagcgtgagcaacgccgtgaactggagagagttcagattcgtgcagagcaagctgggctacctgaccctgatcctgtgcaccgcccacaccctggtgtacggcggcaagagattcctgagccccagcaacctgagatggtacctgcccgccgcctacgtgctgggcctgatcatcccctgcaccgtgctggtgatcaagttcgtgctgatcatgccctgcgtggacaacaccctgaccagaatcagacagggctgggagagaaacagcaagcactag

SEQ ID NO: 100964 - DNA, 1080 bp, synthetic construct
  misc_feature 1..1080: note = Description of Artificial Sequence: Synthetic coding sequence
  source 1..1080: mol_type = other DNA
atgcccgcccacctgctgcaggacgacatcagcagcagctacaccaccaccaccaccatcaccgccccccccagcagagtgctgcagaacggcggcgacaagctggagaccatgcccctgtacctggaggacgacatcagacccgacatcaaggacgacatctacgaccccacctacaaggacaaggagggccccagccccaaggtggagtacgtgtggagaaacatcatcctgatgagcctgctgcacctgggcgccctgtacggcatcaccctgatccccacctgcaagttctacacctggctgtggggcgtgttctactacttcgtgagcgccctgggcatcaccgccggcgcccacagactgtggagccacagaagctacaaggccagactgcccctgagactgttcctgatcatcgccaacaccatggccttccagaacgacgtgtacgagtgggccagagaccacagagcccaccacaagttcagcgagacccacgccgacccccacaacagcagaagaggcttcttcttcagccacgtgggctggctgctggtgagaaagcaccccgccgtgaaggagaagggcagcaccctggacctgagcgacctggaggccgagaagctggtgatgttccagagaagatactacaagcccggcctgctgatgatgtgcttcatcctgcccaccctggtgccctggtacttctggggcgagaccttccagaacagcgtgttcgtggccaccttcctgagatacgccgtggtgctgaacgccacctggctggtgaacagcgccgcccacctgttcggctacagaccctacgacaagaacatcagccccagagagaacatcctggtgagcctgggcgccgtgggcgagggcttccacaactaccaccacagcttcccctacgactacagcgccagcgagtacagatggcacatcaacttcaccaccttcttcatcgactgcatggccgccctgggcctggcctacgacagaaagaaggtgagcaaggccgccatcctggccagaatcaagagaaccggcgacggcaactacaagagcggctag

SEQ ID NO: 100965 - DNA, 729 bp, synthetic construct
  misc_feature 1..729: note = Description of Artificial Sequence: Synthetic coding sequence
  source 1..729: mol_type = other DNA
atgcccgcccacctgctgcaggacgacatcagcagcagctacaccaccaccaccaccatcaccgccccccccagcagagtgctgcagaacggcggcgacaagctggagaccatgcccctgtacctggaggacgacatcagacccgacatcaaggacgacatctacgaccccacctacaaggacaaggagggccccagccccaaggtggagtacgtgtggagaaacatcatcctgatgagcctgctgcacctgggcgccctgtacggcatcaccctgatccccacctgcaagttctacacctggctgtggggcgtgttctactacttcgtgagcgccctgggcatcaccgccggcgcccacagactgtggagccacagaagctacaaggccagactgcccctgagactgttcctgatcatcgccaacaccatggccttccagaacgacgtgtacgagtgggccagagaccacagagcccaccacaagttcagcgagacccacgccgacccccacaacagcagaagaggcttcttcttcagccacgtgggctggctgctggtgagaaagcaccccgccgtgaaggagaagggcagcaccctggacctgagcgacctggaggccgagaagctggtgatgttccagagaagatactacaagcccggcctgctgatgatgtgcttcatcctgcccaccctggtgccctggtacttctggggcgagaccttctag

SEQ ID NO: 100966 - DNA, 813 bp, synthetic construct
  misc_feature 1..813: note = Description of Artificial Sequence: Synthetic coding sequence
  source 1..813: mol_type = other DNA
atggcctgcagacccagaagcccccccagacaccagagcagatgcgacggcgacgccagcccccccagccccgccagatggagcctgggcagaaagagaagagccgacggcagaagatggagacccgaggacgccgaggaggccgagcacagaggcgccgagagaagacccgagagcttcaccacccccgagggccccaagcccagaagcagatgcagcgactgggccagcgccgtggaggaggacgagatgagaaccagagtgaacaaggagatggccagatacaagagaaagctgctgatcaacgacttcggcagagagagaaagagcagcagcggcagcagcgacagcaaggagagcatgagcaccgtgcccgccgacttcgagaccgacgagagcgtgctgatgagaagacagaagcagatcaactacggcaagaacaccatcgcctacgacagatacatcaaggaggtgcccagacacctgagacagcccggcatccaccccaagacccccaacaagttcaagaagtacagcagaagaagctgggaccagcagatcaagctgtggaaggtggccctgcacttctgggacccccccgccgaggagggctgcgacctgcaggagatccaccccgtggacctggagagcgccgagagcagcagcgagccccagaccagcagccaggacgacttcgacgtgtacagcggcacccccaccaaggtgagacacatggacagccaggtggaggacgagttcgacctggaggcctgcctgaccgagcccctgagagacttcagcgccatgagctag

SEQ ID NO: 100967 - DNA, 5328 bp, synthetic construct
  misc_feature 1..5328: note = Description of Artificial Sequence: Synthetic coding sequence
  source 1..5328: mol_type = other DNA
atggccctgagcctgtggcccctgctgctgctgctgctgctgctgctgctgctgagcttcgccgtgaccctggcccccaccggcccccacagcctggaccccggcctgagcttcctgaagagcctgctgagcaccctggaccaggccccccagggcagcctgagcagaagcagattcttcaccttcctggccaacatcagcagcagcttcgagcccggcagaatgggcgagggccccgtgggcgagcccccccccctgcagccccccgccctgagactgcacgacttcctggtgaccctgagaggcagccccgactgggagcccatgctgggcctgctgggcgacatgctggccctgctgggccaggagcagacccccagagacttcctggtgcaccaggccggcgtgctgggcggcctggtggaggtgctgctgggcgccctggtgcccggcggcccccccacccccaccagacccccctgcaccagagacggccccagcgactgcgtgctggccgccgactggctgcccagcctgctgctgctgctggagggcaccagatggcaggccctggtgcaggtgcagcccagcgtggaccccaccaacgccaccggcctggacggcagagaggccgccccccacttcctgcagggcctgctgggcctgctgacccccaccggcgagctgggcagcaaggaggccctgtggggcggcctgctgagaaccgtgggcgcccccctgtacgccgccttccaggagggcctgctgagagtgacccacagcctgcaggacgaggtgttcagcatcctgggccagcccgagcccgacaccaacggccagtgccagggcggcaacctgcagcagctgctgctgtggggcgtgagacacaacctgagctgggacgtgcaggccctgggcttcctgagcggcagccccccccccccccccgccctgctgcactgcctgagcaccggcgtgcccctgcccagagccagccagcccagcgcccacatcagccccagacagagaagagccatcaccgtggaggccctgtgcgagaaccacctgggccccgcccccccctacagcatcagcaacttcagcatccacctgctgtgccagcacaccaagcccgccaccccccagccccaccccagcaccaccgccatctgccagaccgccgtgtggtacgccgtgagctgggcccccggcgcccagggctggctgcaggcctgccacgaccagttccccgacgagttcctggacgccatctgcagcaacctgagcttcagcgccctgagcggcagcaacagaagactggtgaagagactgtgcgccggcctgctgcccccccccaccagctgccccgagggcctgccccccgtgcccctgacccccgacatcttctggggctgcttcctggagaacgagaccctgtgggccgagagactgtgcggcgaggccagcctgcaggccgtgccccccagcaaccaggcctgggtgcagcacgtgtgccagggccccacccccgacgtgaccgccagccccccctgccacatcggcccctgcggcgagagatgccccgacggcggcagcttcctggtgatggtgtgcgccaacgacaccatgtacgaggtgctggtgcccttctggccctggctggccggccagtgcagaatcagcagaggcggcaacgacacctgcttcctggagggcctgctgggccccctgctgcccagcctgccccccctgggccccagccccctgtgcctgacccccggccccttcctgctgggcatgctgagccagctgcccagatgccagagcagcgtgcccgccctggcccaccccaccagactgcactacctgctgagactgctgaccttcctgctgggccccggcgccggcggcgccgaggcccagggcatgctgggcagagccctgctgctgagcagcctgcccgacaactgcagcttctgggacgccttcagacccgagggcagaagaagcgtgctgagaaccatcggcgagtacctggagcaggacgaggagcagcccacccccagcggcttcgagcccaccgtgaaccccagcagcggcatcagcaagatggagctgctggcctgcttcagccccgtgctgtgggacctgctgcagagagagaagagcgtgtgggccctgcagatcctggtgcaggcctacctgcacatgccccccgagaacctgcagcagctggtgctgagcgccgagagagaggccgcccagggcttcctgaccctgatgctgcagggcaagctgcagggcaagctgcaggtgccccccagcgaggagcaggccctgggcagactgaccgccctgctgctgcagagataccccagactgaccagccagctgttcatcgacctgagccccctgatccccttcctggccgtgagcgacctgatgagattcccccccagcctgctggccaacgacagcgtgctggccgccatcagagactacagccccggcatgagacccgagcagaaggaggccctggccaagagactgctggcccccgagctgttcggcgaggtgcccgcctggccccaggagctgctgtgggccgtgctgcccctgctgccccacctgcccctggagaacttcctgcagctgagcccccaccagatccaggccctggaggacagctggcccgccgccggcctgggccccggccacgccagacacgtgctgagaagcctggtgaaccagagcgtgcaggacggcgaggagcaggtgagaagactgggccccctggcctgcttcctgagccccgaggagctgcagagcctggtgcccctgagcgaccccaccggccccgtggagagaggcctgctggagtgcgccgccaacggcaccctgagccccgagggcagagtggcctacgagctgctgggcgtgctgagaagcagcggcggcgccgtgctgagccccagagagctgagagtgtgggcccccctgttcagccagctgggcctgagattcctgcaggagctgagcgagccccagctgagagccatgctgcccgtgctgcagggcaccagcgtgacccccgcccaggccgtgctgctgctgggcagactgctgcccagacacgacctgagcctggaggagctgtgcagcctgcacctgctgctgcccggcctgagcccccagaccctgcaggccatccccagaagagtgctggtgggcgcctgcagctgcctggcccccgagctgagcagactgagcgcctgccagaccgccgccctgctgcagaccttcagagtgaaggacggcgtgaagaacatgggcaccaccggcgccggccccgccgtgtgcatccccggccagcccatccccaccacctggcccgactgcctgctgcccctgctgcccctgaagctgctgcagctggacagcctggccctgctggccaacagaagaagatactgggagctgccctggagcgagcagcaggcccagttcctgtggaagaagatgcaggtgcccaccaacctgaccctgagaaacctgcaggccctgggcaccctggccggcggcatgagctgcgagttcctgcagcagatcaacagcatggtggacttcctggaggtggtgcacatgatctaccagctgcccaccagagtgagaggcagcctgagagcctgcatctgggccgagctgcagagaagaatggccatgcccgagcccgagtggaccaccgtgggccccgagctgaacggcctggacagcaagctgctgctggacctgcccatccagctgatggacagactgagcaacgagagcatcatgctggtggtggagctggtgcagagagcccccgagcagctgctggccctgacccccctgcaccaggccgccctggccgagagagccctgcagaacctggcccccaaggagacccccgtgagcggcgaggtgctggagaccctgggccccctggtgggcttcctgggcaccgagagcaccagacagatccccctgcagatcctgctgagccacctgagccagctgcagggcttctgcctgggcgagaccttcgccaccgagctgggctggctgctgctgcaggagagcgtgctgggcaagcccgagctgtggagccaggacgaggtggagcaggccggcagactggtgttcaccctgagcaccgaggccatcagcctgatccccagagaggccctgggccccgagaccctggagagactgctggagaagcagcagagctgggagcagagcagagtgggccagctgtgcagagagccccagctggccgccaagaaggccgccctggtggccggcgtggtgagacccgccgccgaggacctgcccgagcccgtgcccaactgcgccgacgtgagaggcaccttccccgccgcctggagcgccacccagatcgccgagatggagctgagcgacttcgaggactgcctgaccctgttcgccggcgaccccggcctgggccccgaggagctgagagccgccatgggcaaggccaagcagctgtggggcccccccagaggcttcagacccgagcagatcctgcagctgggcagactgctgatcggcctgggcgacagagagctgcaggagctgatcctggtggactggggcgtgctgagcaccctgggccagatcgacggctggagcaccacccagctgagaatcgtggtgagcagcttcctgagacagagcggcagacacgtgagccacctggacttcgtgcacctgaccgccctgggctacaccctgtgcggcctgagacccgaggagctgcagcacatcagcagctgggagttcagccaggccgccctgttcctgggcaccctgcacctgcagtgcagcgaggagcagctggaggtgctggcccacctgctggtgctgcccggcggcttcggccccatcagcaactggggccccgagatcttcaccgagatcggcaccatcgccgccggcatccccgacctggccctgagcgccctgctgagaggccagatccagggcgtgacccccctggccatcagcgtgatccccccccccaagttcgccgtggtgttcagccccatccagctgagcagcctgaccagcgcccaggccgtggccgtgacccccgagcagatggccttcctgagccccgagcagagaagagccgtggcctgggcccagcacgagggcaaggagagccccgagcagcagggcagaagcaccgcctggggcctgcaggactggagcagacccagctggagcctggtgctgaccatcagcttcctgggccacctgctgtag

SEQ ID NO: 100968 - DNA, 1056 bp, synthetic construct
  misc_feature 1..1056: note = Description of Artificial Sequence: Synthetic coding sequence
  source 1..1056: mol_type = other DNA
atggccctgagcctgtggcccctgctgctgctgctgctgctgctgctgctgctgagcttcgccgtgaccctggcccccaccggcccccacagcctggaccccggcctgagcttcctgaagagcctgctgagcaccctggaccaggccccccagggcagcctgagcagaagcagattcttcaccttcctggccaacatcagcagcagcttcgagcccggcagaatgggcgagggccccgtgggcgagcccccccccctgcagccccccgccctgagactgcacgacttcctggtgaccctgagaggcagccccgactgggagcccatgctgggcctgctgggcgacatgctggccctgctgggccaggagcagacccccagagacttcctggtgcaccaggccggcgtgctgggcggcctggtggaggtgctgctgggcgccctggtgcccggcggcccccccacccccacccagcccccctgcaccagagacggccccagcgactgcgtgctggccgccgactggctgcccagcctgctgctgctgctggagggcaccagatggcaggccctggtgcaggtgcagcccagcgtggaccccaccaacgccaccggcctggacggcagagaggccgccccccacttcctgcagggcctgctgggcctgctgacccccaccggcgagctgggcagcaaggaggccctgtggggcggcctgctgagaaccgtgggcgcccccctgtacgccgccttccaggagggcctgctgagagtgacccacagcctgcaggacgaggtgttcagcatcctgggccagcccgagcccgacaccaacggccagtgccagggcggcaacctgcagcagctgctgctgtggggcgtgagacacaacctgagctgggacgtgcaggccctgggcttcctgagcggcagccccccccccccccccgccctgctgcactgcctgagcaccggcgtgcccctgcccagagccagccagcccagcgcccacatcagccccagacagagaagagccatcaccgtggaggccctgtag

SEQ ID NO: 100969 - DNA, 5328 bp, synthetic construct; identical to SEQ ID NO: 100967
  misc_feature 1..5328: note = Description of Artificial Sequence: Synthetic coding sequence
  source 1..5328: mol_type = other DNA

SEQ ID NO: 100970 - DNA, 1056 bp, synthetic construct
  misc_feature 1..1056: note = Description of Artificial Sequence: Synthetic coding sequence
  source 1..1056: mol_type = other DNA
atggccctgagcctgtggcccctgctgctgctgctgctgctgctgctgctgctgagcttcgccgtgaccctggcccccaccggcccccacagcctggaccccggcctgagcttcctgaagagcctgctgagcaccctggaccaggccccccagggcagcctgagcagaagcagattcttcaccttcctggccaacatcagcagcagcttcgagcccggcagaatgggcgagggccccgtgggcgagcccccccccctgcagccccccgccctgagactgcacgacttcctggtgaccctgagaggcagccccgactgggagcccatgctgggcctgctgggcgacatgctggccctgctgggccaggagcagacccccagagacttcctggtgcaccaggccggcgtgctgggcggcctggtggaggtgctgctgggcgccctggtgcccggcggcccccccacccccaccagacccccctgcaccagagacggccccagcgactgcgtgctggccgccgactggctgcccagcctgctgctgctgctggagggcaccagatggcaggccctggtgcaggtgcagcccagcgtggaccccaccaacgccaccggcctggacggcagagaggccgccccccacttcctgcagggcctgctgggcctgctgacccccaccggcgagctgggcagcaaggaggccctgtggggcggcctgctgagaaccgtgggcgcccccctgtacgccgccttccaggagggcctgctgagagtgacccacagcctgcaggacgaggtgttcagcatcctgggccagcccgagcccgacaccaacggccagtgccagggcggcaacctgcagcagctgctgctgtggggcgtgagacacaacctgagctgggacgtgcaggccctgggcttcctgagcggcagccccccccccccccccgccctgctgcactgcctgagcaccggcgtgcccctgcccagagccagccagcccagcgcccacatcagccccagacagagaagagccatcaccgtggaggccctgtag

SEQ ID NO: 100971 - DNA, 2100 bp, synthetic construct
  misc_feature 1..2100: note = Description of Artificial Sequence: Synthetic coding sequence
  source 1..2100: mol_type = other DNA
atggccctgagcctgtggcccctgctgctgctgctgctgctgctgctgctgctgagcttcgccgtgaccctggcccccaccggcccccacagcctggaccccggcctgagcttcctgaagagcctgctgagcaccctggaccaggccccccagggcagcctgagcagaagcagattcttcaccttcctggccaacatcagcagcagcttcgagcccggcagaatgggcgagggccccgtgggcgagcccccccccctgcagccccccgccctgagactgcacgacttcctggtgaccctgagaggcagccccgactgggagcccatgctgggcctgctgggcgacatgctggccctgctgggccaggagcagacccccagagacttcctggtgcaccaggccggcgtgctgggcggcctggtggaggtgctgctgggcgccctggtgcccggcggcccccccacccccacccagcccccctgcaccagagacggccccagcgactgcgtgctggccgccgactggctgcccagcctgctgctgctgctggagggcaccagatggcaggccctggtgcaggtgcagcccagcgtggaccccaccaacgccaccggcctggacggcagagaggccgccccccacttcctgcagggcctgctgggcctgctgacccccaccggcgagctgggcagcaaggaggccctgtggggcggcctgctgagaaccgtgggcgcccccctgtacgccgccttccaggagggcctgctgagagtgacccacagcctgcaggacgaggtgttcagcatcctgggccagcccgagcccgacaccaacggccagtgccagggcggcaacctgcagcagctgctgctgtggggcgtgagacacaacctgagctgggacgtgcaggccctgggcttcctgagcggcagccccccccccccccccgccctgctgcactgcctgagcaccggcgtgcccctgcccagagccagccagcccagcgcccacatcagccccagacagagaagagccatcaccgtggaggccctgtgcgagaaccacctgggccccgcccccccctacagcatcagcaacttcagcatccacctgctgtgccagcacaccaagcccgccaccccccagccccaccccagcaccaccgccatctgccagaccgccgtgtggtacgccgtgagctgggcccccggcgcccagggctggctgcaggcctgccacgaccagttccccgacgagttcctggacgccatctgcagcaacctgagcttcagcgccctgagcggcagcaacagaagactggtgaagagactgtgcgccggcctgctgcccccccccaccagctgccccgagggcctgccccccgtgcccctgacccccgacatcttctggggctgcttcctggagaacgagaccctgtgggccgagagactgtgcggcgaggccagcctgcaggccgtgccccccagcaaccaggcctgggtgcagcacgtgtgccagggccccacccccgacgtgaccgccagccccccctgccacatcggcccctgcggcgagagatgccccgacggcggcagcttcctggtgatggtgtgcgccaacgacaccatgtacgaggtgctggtgcccttctggccctggctggccggccagtgcagaatcagcagaggcggcaacgacacctgcttcctggagggcctgctgggccccctgctgcccagcctgccccccctgggccccagccccctgtgcctgacccccggccccttcctgctgggcatgctgagccagctgcccagatgccagagcagcgtgcccgccctggcccaccccaccagactgcactacctgctgagactgctgaccttcctgctgggccccggcgccggcggcgccgaggcccagggcatgctgggcagagccctgctgctgagcagcctgcccgacaactgcagcttctgggacgccttcagacccgagggcagaagaagcgtgctgagaaccatcggcgagtacaacaagatgagaagcagccagccccaccaggccctgaaccccctgagcacccccgccctggtgtag

SEQ ID NO: 100972 - DNA, 3009 bp, synthetic construct
  misc_feature 1..3009: note = Description of Artificial Sequence: Synthetic coding sequence
  source 1..3009: mol_type = other DNA
atggagctgctggcctgcttcagccccgtgctgtgggacctgctgcagagagagaagagcgtgtgggccctgcagatcctggtgcaggcctacctgcacatgccccccgagaacctgcagcagctggtgctgagcgccgagagagaggccgcccagggcttcctgaccctgatgctgcagggcaagctgcagggcaagctgcaggtgccccccagcgaggagcaggccctgggcagactgaccgccctgctgctgcagagataccccagactgaccagccagctgttcatcgacctgagccccctgatccccttcctggccgtgagcgacctgatgagattcccccccagcctgctggccaacgacagcgtgcagcagggctacagaggcagcgaggagaacagcctggaggaggacaagggcctgagacccatgacccccagaagcctggccgccatcagagactacagccccggcatgagacccgagcagaaggaggccctggccaagagactgctggcccccgagctgttcggcgaggtgcccgcctggccccaggagctgctgtgggccgtgctgcccctgctgccccacctgcccctggagaacttcctgcagctgagcccccaccagatccaggccctggaggacagctggcccgccgccggcctgggccccggccacgccagacacgtgctgagaagcctggtgaaccagagcgtgcaggacggcgaggagcaggtgagaagactgggccccctggcctgcttcctgagccccgaggagctgcagagcctggtgcccctgagcgaccccaccggccccgtggagagaggcctgctggagtgcgccgccaacggcaccctgagccccgagggcagagtggcctacgagctgctgggcgtgctgagaagcagcggcggcgccgtgctgagccccagagagctgagagtgtgggcccccctgttcagccagctgggcctgagattcctgcaggagctgagcgagccccagctgagagccatgctgcccgtgctgcagggcaccagcgtgacccccgcccaggccgtgctgctgctgggcagactgctgcccagacacgacctgctgcagctggacagcctggccctgctggccaacagaagaagatactgggagctgccctggagcgagcagcaggcccagttcctgtggaagaagatgcaggtgcccaccaacctgaccctgagaaacctgcaggccctgggcaccctggccggcggcatgagctgcgagttcctgcagcagatcaacagcatggtggacttcctggaggtggtgcacatgatctaccagctgcccaccagagtgagaggcagcctgagagcctgcatctgggccgagctgcagagaagaatggccatgcccgagcccgagtggaccaccgtgggccccgagctgaacggcctggacagcaagctgctgctggacctgcccatccagctgatggacagactgagcaacgagagcatcatgctggtggtggagctggtgcagagagcccccgagcagctgctggccctgacccccctgcaccaggccgccctggccgagagagccctgcagaacctggcccccaaggagacccccgtgagcggcgaggtgctggagaccctgggccccctggtgggcttcctgggcaccgagagcaccagacagatccccctgcagatcctgctgagccacctgagccagctgcagggcttctgcctgggcgagaccttcgccaccgagctgggctggctgctgctgcaggagagcgtgctgggcaagcccgagctgtggagccaggacgaggtggagcaggccggcagactggtgttcaccctgagcaccgaggccatcagcctgatccccagagaggccctgggccccgagaccctggagagactgctggagaagcagcagagctgggagcagagcagagtgggccagctgtgcagagagccccagctggccgccaagaaggccgccctggtggccggcgtggtgagacccgccgccgaggacctgcccgagcccgtgcccaactgcgccgacgtgagaggcaccttccccgccgcctggagcgccacccagatcgccgagatggagctgagcgacttcgaggactgcctgaccctgttcgccggcgaccccggcctgggccccgaggagctgagagccgccatgggcaaggccaagcagctgtggggcccccccagaggcttcagacccgagcagatcctgcagctgggcagactgctgatcggcctgggcgacagagagctgcaggagctgatcctggtggactggggcgtgctgagcaccctgggccagatcgacggctggagcaccacccagctgagaatcgtggtgagcagcttcctgagacagagcggcagacacgtgagccacctggacttcgtgcacctgaccgccctgggctacaccctgtgcggcctgagacccgaggagctgcagcacatcagcagctgggagttcagccaggccgccctgttcctgggcaccctgcacctgcagtgcagcgaggagcagctggaggtgctggcccacctgctggtgctgcccggcggcttcggccccatcagcaactggggccccgagatcttcaccgagatcggcaccatcgccgccggcatccccgacctggccctgagcgccctgctgagaggccagatccagggcgtgacccccctggccatcagcgtgatccccccccccaagttcgccgtggtgttcagccccatccagctgagcagcctgaccagcgcccaggccgtggccgtgacccccgagcagatggccttcctgagccccgagcagagaagagccgtggcctgggcccagcacgagggcaaggagagccccgagcagcagggcagaagcaccgcctggggcctgcaggactggagcagacccagctggagcctggtgctgaccatcagcttcctgggccacctgctgtag

SEQ ID NO: 100973 - DNA, 1890 bp, synthetic construct
  misc_feature 1..1890: note = Description of Artificial Sequence: Synthetic coding sequence
  source 1..1890: mol_type = other DNA
atgttcagagaccaggtgggcgtgctggccggctggttcaagggctggaacgagtgcgagcagaccgtggccctgctgagcctgctgaagagagtgagccagacccaggccagattcctgcagctgtgcctggagcacagcctggccgactgcgccgagctgcacgtgctggagagagaggccaacagccccggcatcatcaaccagtggcagcaggagagcaaggacaaggtgatcagcctgctgctgacccacctgcccctgctgaagcccggcaacctggacgccaaggtggagtacatgaagctgctgcccaagatcctggcccacagcatcgagcacaaccagcacatcgaggagagcagacagctgctgagctacgccctgatccaccccgccaccagcctggaggacagaagcgccctggccatgtggctgaaccacctggaggacagaaccagcaccagcttcggcggccagaacagaggcagaagcgacagcgtggactacggccagacccactactaccaccagagacagaacagcgacgacaagctgaacggctggcagaacagcagagacagcggcatctgcatcaacgccagcaactggcaggacaagagcatgggctgcgagaacggccacgtgcccctgtacagcagcagcagcgtgcccaccaccatcaacaccatcggcaccagcaccagcaccaacgtgcccgcctggctgaagagcctgagactgcacaagtacgccgccctgttcagccagatgacctacgaggagatgatggccctgaccgagtgccagctggaggcccagaacgtgaccaagggcgccagacacaagatcgtgatcagcatccagaagctgaaggagagacagaacctgctgaagagcctggagagagacatcatcgagggcggcagcctgagaatccccctgcaggagctgcaccagatgatcctgacccccatcaaggcctacagcagccccagcaccacccccgaggccagaagaagagagccccaggcccccagacagcccagcctgatgggccccgagagccagagccccgactgcaaggacggcgccgccgccaccggcgccaccgccacccccagcgccggcgccagcggcggcctgcagccccaccagctgagcagctgcgacggcgagctggccgtggcccccctgcccgagggcgacctgcccggccagttcaccagagtgatgggcaaggtgtgcacccagctgctggtgagcagacccgacgaggagaacatcagcagctacctgcagctgatcgacaagtgcctgatccacgaggccttcaccgagacccagaagaagagactgctgagctggaagcagcaggtgcagaagctgttcagaagcttccccagaaagaccctgctggacatcagcggctacagacagcagagaaacagaggcttcggccagagcaacagcctgcccaccgccggcagcgtgggcggcggcatgggcagaagaaaccccagacagtaccagatccccagcagaaacgtgcccagcgccagactgggcctgctgggcaccagcggcttcgtgagcagcaaccagagaaacaccaccgccacccccaccatcatgaagcagggcagacagaacctgtggttcgccaaccccggcggcagcaacagcatgcccagcagaacccacagcagcgtgcagagaaccagaagcctgcccgtgcacaccagcccccagaacatgctgatgttccagcagcccgagttccagctgcccgtgaccgagcccgacatcaacaacagactggagagcctgtgcctgagcatgaccgagcacgccctgggcgacggcgtggacagaaccagcaccatctag

SEQ ID NO: 100974 - DNA, 1893 bp, synthetic construct
  misc_feature 1..1893: note = Description of Artificial Sequence: Synthetic coding sequence
  source 1..1893: mol_type = other DNA
atgatgttcagagaccaggtgggcgtgctggccggctggttcaagggctggaacgagtgcgagcagaccgtggccctgctgagcctgctgaagagagtgagccagacccaggccagattcctgcagctgtgcctggagcacagcctggccgactgcgccgagctgcacgtgctggagagagaggccaacagccccggcatcatcaaccagtggcagcaggagagcaaggacaaggtgatcagcctgctgctgacccacctgcccctgctgaagcccggcaacctggacgccaaggtggagtacatgaagctgctgcccaagatcctggcccacagcatcgagcacaaccagcacatcgaggagagcagacagctgctgagctacgccctgatccaccccgccaccagcctggaggacagaagcgccctggccatgtggctgaaccacctggaggacagaaccagcaccagcttcggcggccagaacagaggcagaagcgacagcgtggactacggccagacccactactaccaccagagacagaacagcgacgacaagctgaacggctggcagaacagcagagacagcggcatctgcatcaacgccagcaactggcaggacaagagcatgggctgcgagaacggccacgtgcccctgtacagcagcagcagcgtgcccaccaccatcaacaccatcggcaccagcaccagcaccaacgtgcccgcctggctgaagagcctgagactgcacaagtacgccgccctgttcagccagatgacctacgaggagatgatggccctgaccgagtgccagctggaggcccagaacgtgaccaagggcgccagacacaagatcgtgatcagcatccagaagctgaaggagagacagaacctgctgaagagcctggagagagacatcatcgagggcggcagcctgagaatccccctgcaggagctgcaccagatgatcctgacccccatcaaggcctacagcagccccagcaccacccccgaggccagaagaagagagccccaggcccccagacagcccagcctgatgggccccgagagccagagccccgactgcaaggacggcgccgccgccaccggcgccaccgccacccccagcgccggcgccagcggcggcctgcagccccaccagctgagcagctgcgacggcgagctggccgtggcccccctgcccgagggcgacctgcccggccagttcaccagagtgatgggcaaggtgtgcacccagctgctggtgagcagacccgacgaggagaacatcagcagctacctgcagctgatcgacaagtgcctgatccacgaggccttcaccgagacccagaagaagagactgctgagctggaagcagcaggtgcagaagctgttcagaagcttccccagaaagaccctgctggacatcagcggctacagacagcagagaaacagaggcttcggccagagcaacagcctgcccaccgccggcagcgtgggcggcggcatgggcagaagaaaccccagacagtaccagatccccagcagaaacgtgcccagcgccagactgggcctgctgggcaccagcggcttcgtgagcagcaaccagagaaacaccaccgccacccccaccatcatgaagcagggcagacagaacctgtggttcgccaaccccggcggcagcaacagcatgcccagcagaacccacagcagcgtgcagagaaccagaagcctgcccgtgcacaccagcccccagaacatgctgatgttccagcagcccgagttccagctgcccgtgaccgagcccgacatcaacaacagactggagagcctgtgcctgagcatgaccgagcacgccctgggcgacggcgtggacagaaccagcaccatctag

SEQ ID NO: 100975 - DNA, 2154 bp, synthetic construct
  misc_feature 1..2154: note = Description of Artificial Sequence: Synthetic coding sequence
  source 1..2154: mol_type = other DNA
atgttcagagaccaggtgggcgtgctggccggctggttcaagggctggaacgagtgcgagcagaccgtggccctgctgagcctgctgaagagagtgagccagacccaggccagattcctgcagctgtgcctggagcacagcctggccgactgcgccgagctgcacgtgctggagagagaggccaacagccccggcatcatcaaccagtggcagcaggagagcaaggacaaggtgatcagcctgctgctgacccacctgcccctgctgaagcccggcaacctggacgccaaggtggagtacatgaagctgctgcccaagatcctggcccacagcatcgagcacaaccagcacatcgaggagagcagacagctgctgagctacgccctgatccaccccgccaccagcctggaggacagaagcgccctggccatgtggctgaaccacctggaggacagaaccagcaccagcttcggcggccagaacagaggcagaagcgacagcgtggactacggccagacccactactaccaccagagacagaacagcgacgacaagctgaacggctggcagaacagcagagacagcggcatctgcatcaacgccagcaactggcaggacaagagcatgggctgcgagaacggccacgtgcccctgtacagcagcagcagcgtgcccaccaccatcaacaccatcggcaccagcaccagcaccatcctgagcggccaggcccaccacagccccctgaagagaagcgtgagcctgaccccccccatgaacgtgcccaaccagcccctgggccacggctggatgagccacgaggacctgagagccagaggcccccagtgcctgcccagcgaccacgcccccctgagcccccagagcagcgtggccagcagcggcagcggcggcagcgagcacctggaggaccagaccaccgccagaaacaccttccaggaggagggcagcggcatgaaggacgtgcccgcctggctgaagagcctgagactgcacaagtacgccgccctgttcagccagatgacctacgaggagatgatggccctgaccgagtgccagctggaggcccagaacgtgaccaagggcgccagacacaagatcgtgatcagcatccagaagctgaaggagagacagaacctgctgaagagcctggagagagacatcatcgagggcggcagcctgagaatccccctgcaggagctgcaccagatgatcctgacccccatcaaggcctacagcagccccagcaccacccccgaggccagaagaagagagccccaggcccccagacagcccagcctgatgggccccgagagccagagccccgactgcaaggacggcgccgccgccaccggcgccaccgccacccccagcgccggcgccagcggcggcctgcagccccaccagctgagcagctgcgacggcgagctggccgtggcccccctgcccgagggcgacctgcccggccagttcaccagagtgatgggcaaggtgtgcacccagctgctggtgagcagacccgacgaggagaacatcagcagctacctgcagctgatcgacaagtgcctgatccacgaggccttcaccgagacccagaagaagagactgctgagctggaagcagcaggtgcagaagctgttcagaagcttccccagaaagaccctgctggacatcagcggctacagacagcagagaaacagaggcttcggccagagcaacagcctgcccaccgccggcagcgtgggcggcggcatgggcagaagaaaccccagacagtaccagatccccagcagaaacgtgcccagcgccagactgggcctgctgggcaccagcggcttcgtgagcagcaaccagagaaacaccaccgccacccccaccatcatgaagcagggcagacagaacctgtggttcgccaaccccggcggcagcaacagcatgcccagcagaacccacagcagcgtgcagagaaccagaagcctgcccgtgcacaccagcccccagaacatgctgatgttccagcagcccgagttccagctgcccgtgaccgagcccgacatcaacaacagactggagagcctgtgcctgagcatgaccgagcacgccctgggcgacggcgtggacagaaccagcaccatctag

SEQ ID NO: 100976 - DNA, 2157 bp, synthetic construct
  misc_feature 1..2157: note = Description of Artificial Sequence: Synthetic coding sequence
  source 1..2157: mol_type = other DNA
atgatgttcagagaccaggtgggcgtgctggccggctggttcaagggctggaacgagtgcgagcagaccgtggccctgctgagcctgctgaagagagtgagccagacccaggccagattcctgcagctgtgcctggagcacagcctggccgactgcgccgagctgcacgtgctggagagagaggccaacagccccggcatcatcaaccagtggcagcaggagagcaaggacaaggtgatcagcctgctgctgacccacctgcccctgctgaagcccggcaacctggacgccaaggtggagtacatgaagctgctgcccaagatcctggcccacagcatcgagcacaaccagcacatcgaggagagcagacagctgctgagctacgccctgatccaccccgccaccagcctggaggacagaagcgccctggccatgtggctgaaccacctggaggacagaaccagcaccagcttcggcggccagaacagaggcagaagcgacagcgtggactacggccagacccactactaccaccagagacagaacagcgacgacaagctgaacggctggcagaacagcagagacagcggcatctgcatcaacgccagcaactggcaggacaagagcatgggctgcgagaacggccacgtgcccctgtacagcagcagcagcgtgcccaccaccatcaacaccatcggcaccagcaccagcaccatcctgagcggccaggcccaccacagccccctgaagagaagcgtgagcctgaccccccccatgaacgtgcccaaccagcccctgggccacggctggatgagccacgaggacctgagagccagaggcccccagtgcctgcccagcgaccacgcccccctgagcccccagagcagcgtggccagcagcggcagcggcggcagcgagcacctggaggaccagaccaccgccagaaacaccttccaggaggagggcagcggcatgaaggacgtgcccgcctggctgaagagcctgagactgcacaagtacgccgccctgttcagccagatgacctacgaggagatgatggccctgaccgagtgccagctggaggcccagaacgtgaccaagggcgccagacacaagatcgtgatcagcatccagaagctgaaggagagacagaacctgctgaagagcctggagagagacatcatcgagggcggcagcctgagaatccccctgcaggagctgcaccagatgatcctgacccccatcaaggcctacagcagccccagcaccacccccgaggccagaagaagagagccccaggcccccagacagcccagcctgatgggccccgagagccagagccccgactgcaaggacggcgccgccgccaccggcgccaccgccacccccagcgccggcgccagcggcggcctgcagccccaccagctgagcagctgcgacggcgagctggccgtggcccccctgcccgagggcgacctgcccggccagttcaccagagtgatgggcaaggtgtgcacccagctgctggtgagcagacccgacgaggagaacatcagcagctacctgcagctgatcgacaagtgcctgatccacgaggccttcaccgagacccagaagaagagactgctgagctggaagcagcaggtgcagaagctgttcagaagcttccccagaaagaccctgctggacatcagcggctacagacagcagagaaacagaggcttcggccagagcaacagcctgcccaccgccggcagcgtgggcggcggcatgggcagaagaaaccccagacagtaccagatccccagcagaaacgtgcccagcgccagactgggcctgctgggcaccagcggcttcgtgagcagcaaccagagaaacaccaccgccacccccaccatcatgaagcagggcagacagaacctgtggttcgccaaccccggcggcagcaacagcatgcccagcagaacccacagcagcgtgcagagaaccagaagcctgcccgtgcacaccagcccccagaacatgctgatgttccagcagcccgagttccagctgcccgtgaccgagcccgacatcaacaacagactggagagcctgtgcctgagcatgaccgagcacgccctgggcgacggcgtggacagaaccagcaccatctag

SEQ ID NO: 100977 - DNA, 2157 bp, synthetic construct; identical to SEQ ID NO: 100976
  misc_feature 1..2157: note = Description of Artificial Sequence: Synthetic coding sequence
  source 1..2157: mol_type = other DNA

SEQ ID NO: 100978 - DNA, 1038 bp, synthetic construct
  misc_feature 1..1038: note = Description of Artificial Sequence: Synthetic coding sequence
  source 1..1038: mol_type = other DNA
atgatcctgacccccatcaaggcctacagcagccccagcaccacccccgaggccagaagaagagagccccaggcccccagacagcccagcctgatgggccccgagagccagagccccgactgcaaggacggcgccgccgccaccggcgccaccgccacccccagcgccggcgccagcggcggcctgcagccccaccagctgagcagctgcgacggcgagctggccgtggcccccctgcccgagggcgacctgcccggccagttcaccagagtgatgggcaaggtgtgcacccagctgctggtgagcagacccgacgaggagaacatcagcagctacctgcagctgatcgacaagtgcctgatccacgaggccttcaccgagacccagaagaagagactgctgagctggaagcagcaggtgcagaagctgttcagaagcttccccagaaagaccctgctggacatcagcggctacagacagcagagaaacagaggcttcggccagagcaacagcctgcccaccgccggcagcgtgggcggcggcatgggcagaagaaaccccagacagtaccagatccccagcagaaacgtgcccagcgccagactgggcctgctgggcaccagcggcttcgtgagcagcaaccagagaaacaccaccgccacccccaccatcatgaagcagggcagacagaacctgtggttcgccaaccccggcggcagcaacagcatgcccagcagaacccacagcagcgtgcagagaaccagaagcctgcccgtgcacaccagcccccagaacatgctgatgttccagcagcccggcagccaggtgcacagcggcctgtgcctgaccgacctgagaggctggctgagcctgagcggcgcccccagcatgcccgccctgaccgtgcccaagagcagccagggcgagttccagctgcccgtgaccgagcccgacatcaacaacagactggagagcctgtgcctgagcatgaccgagcacgccctgggcgacggcgtggacagaaccagcaccatctag

SEQ ID NO: 100979 - DNA, 981 bp, synthetic construct
  misc_feature 1..981: note = Description of Artificial Sequence: Synthetic coding sequence
  source 1..981: mol_type = other DNA
atggccggccccaaccagctgtgcatcagaagatggaccaccaagcacgtggccgtgtggctgaaggacgagggcttcttcgagtacgtggacatcctgtgcaacaagcacagactggacggcatcaccctgctgaccctgaccgagtacgacctgagaagcccccccctggagatcaaggtgctgggcgacatcaagagactgatgctgagcgtgagaaagctgcagaagatccacatcgacgtgctggaggagatgggctacaacagcgacagccccatgggcagcatgacccccttcatcagcgccctgcagagcaccgactggctgtgcaacggcgagctgagccacgactgcgacggccccatcaccgacctgaacagcgaccagtaccagtacatgaacggcaagaacaagcacagcgtgagaagactggaccccgagtactggaagaccatcctgagctgcatctacgtgttcatcgtgttcggcttcaccagcttcatcatggtgatcgtgcacgagagagtgcccgacatgcagacctacccccccctgcccgacatcttcctggacagcgtgcccagaatcccctgggccttcgccatgaccgaggtgtgcggcatgatcctgtgctacatctggctgctggtgctgctgctgcacaagcacagaagcatcctgctgagaagactgtgcagcctgatgggcaccgtgttcctgctgagatgcttcaccatgttcgtgaccagcctgagcgtgcccggccagcacctgcagtgcaccggcaagatctacggcagcgtgtgggagaagctgcacagagccttcgccatctggagcggcttcggcatgaccctgaccggcgtgcacacctgcggcgactacatgttcagcggccacaccgtggtgctgaccatgctgaacttcttcgtgaccgagtgcaagtacctgttcagcgccagcatgagaatcagatag

SEQ ID NO: 100980 - DNA, 1437 bp, synthetic construct
  misc_feature 1..1437: note = Description of Artificial Sequence: Synthetic coding sequence
  source 1..1437: mol_type = other DNA
atgcccgccagaagcagacacagacccagactgcacagcggcagcccccccagagccccccccccccccctggaggccctgcacagcggcgaggccggcagagcccccgacagcgacggcggcagcgacgccgacagcgaggtgggccccggcagccccaccagaaccgccgaggccgccgaggaggagatggccggccccaaccagctgtgcatcagaagatggaccaccaagcacgtggccgtgtggctgaaggacgagggcttcttcgagtacgtggacatcctgtgcaacaagcacagactggacggcatcaccctgctgaccctgaccgagtacgacctgagaagcccccccctggagatcaaggtgctgggcgacatcaagagactgatgctgagcgtgagaaagctgcagaagatccacatcgacgtgctggaggagatgggctacaacagcgacagccccatgggcagcatgacccccttcatcagcgccctgcagagcaccgactggctgtgcaacggcgagctgagccacgactgcgacggccccatcaccgacctgaacagcgaccagtaccagtacatgaacggcaagaacaagcacagcgtgagaagactggaccccgagtactggaagaccatcctgagctgcatctacgtgttcatcgtgttcggcttcaccagcttcatcatggtgatcgtgcacgagagagtgcccgacatgcagacctacccccccctgcccgacatcttcctggacagcgtgcccagaatcccctgggccttcgccatgaccgaggtgtgcggcatgatcctgtgctacatctggctgctggtgctgctgctgcacaagcacagaagcatcctgctgagaagactgtgcagcctgatgggcaccgtgttcctgctgagatgcttcaccatgttcgtgaccagcctgagcgtgcccggccagcacctgcagtgcaccggcaagatctacggcagcgtgtgggagaagctgcacagagccttcgccatctggagcggcttcggcatgaccctgaccggcgtgcacacctgcggcgactacatgttcagcggccacaccgtggtgctgaccatgctgaacttcttcgtgaccgagtacacccccagaagctggaacttcctgcacaccctgagctgggtgctgaacctgttcggcatcttcttcatcctggccgcccacgagcactacagcatcgacgtgttcatcgccttctacatcaccaccagactgttcctgtactaccacaccctggccaacaccagagcctaccagcagagcagaagagccagaatctggttccccatgttcagcttcttcgagtgcaacgtgaacggcaccgtgcccaacgagtactgctggcccttcagcaagcccgccatcatgaagagactgatcggctag

SEQ ID NO: 100981 - DNA, 765 bp, synthetic construct
  misc_feature 1..765: note = Description of Artificial Sequence: Synthetic coding sequence
  source 1..765: mol_type = other DNA
atggccggccccaaccagctgtgcatcagaagatggaccaccaagcacgtggccgtgtggctgaaggacgagggcttcttcgagtacgtggacatcctgtgcaacaagcacagactggacggcatcaccctgctgaccctgaccgagtacgacctgagaagcccccccctggagatcaaggtgctgggcgacatcaagagactgatgctgagcgtgagaaagctgcagaagatccacatcgacgtgctggaggagatgggctacaacagcgacagccccatgggcagcatgacccccttcatcagcgccctgcagagcaccgactggctgtgcaacggcgagctgagccacgactgcgacggccccatcaccgacctgaacagcgaccagtaccagtacatgaacggcaagaacaagcacagcgtgagaagactggaccccgagtactggaagaccatcctgagctgcatctacgtgttcatcgtgttcggcttcaccagcttcatcatggtgatcgtgcacgagagagtgcccgacatgcagacctacccccccctgcccgacatcttcctggacagcgtgcccagaatcccctgggccttcgccatgaccgaggtgtgcggcatgatcctgtgctacatctggctgctggtgctgctgctgcacaagcacagaagcatcctgctgagaagactgtgcagcctgatgggcaccgtgttcctgctgagatgcttcaccatgttcgtgaccagcctgagcgtgtag

SEQ ID NO: 100982 - DNA, 1248 bp, synthetic construct
  misc_feature 1..1248: note = Description of Artificial Sequence: Synthetic coding sequence
  source 1..1248: mol_type = other DNA
atggccggccccaaccagctgtgcatcagaagatggaccaccaagcacgtggccgtgtggctgaaggacgagggcttcttcgagtacgtggacatcctgtgcaacaagcacagactggacggcatcaccctgctgaccctgaccgagtacgacctgagaagcccccccctggagatcaaggtgctgggcgacatcaagagactgatgctgagcgtgagaaagctgcagaagatccacatcgacgtgctggaggagatgggctacaacagcgacagccccatgggcagcatgacccccttcatcagcgccctgcagagcaccgactggctgtgcaacggcgagctgagccacgactgcgacggccccatcaccgacctgaacagcgaccagtaccagtacatgaacggcaagaacaagcacagcgtgagaagactggaccccgagtactggaagaccatcctgagctgcatctacgtgttcatcgtgttcggcttcaccagcttcatcatggtgatcgtgcacgagagagtgcccgacatgcagacctacccccccctgcccgacatcttcctggacagcgtgcccagaatcccctgggccttcgccatgaccgaggtgtgcggcatgatcctgtgctacatctggctgctggtgctgctgctgcacaagcacagaagcatcctgctgagaagactgtgcagcctgatgggcaccgtgttcctgctgagatgcttcaccatgttcgtgaccagcctgagcgtgcccggccagcacctgcagtgcaccggcaagatctacggcagcgtgtgggagaagctgcacagagccttcgccatctggagcggcttcggcatgaccctgaccggcgtgcacacctgcggcgactacatgttcagcggccacaccgtggtgctgaccatgctgaacttcttcgtgaccgagtacacccccagaagctggaacttcctgcacaccctgagctgggtgctgaacctgttcggcatcttcttcatcctggccgcccacgagcactacagcatcgacgtgttcatcgccttctacatcaccaccagactgttcctgtactaccacaccctggccaacaccagagcctaccagcagagcagaagagccagaatctggttccccatgttcagcttcttcgagtgcaacgtgaacggcaccgtgcccaacgagtactgctggcccttcagcaagcccgccatcatgaagagactgatcggctag

SEQ ID NO: 100983 - DNA, 4770 bp, synthetic construct
  misc_feature 1..4770: note = Description of Artificial Sequence: Synthetic coding sequence
  source 1..4770: mol_type = other DNA
atggccaagcagctgaacctgcccgagaacaccgacgactggaccaaggaggacgtgaaccagtggctggagagccacaagatcgaccagaagcacagagagatcctgaccgagcaggacgtgaacggcgccgtgctgaagtggctgaagaaggagcacctggtggacatgggcatcacccacggccccgccatccagatcgaggagctgttcaaggagctgagaaagaccgccatcgaggacagcatccagaccagcaagatgggcaagcccagcaagaacgcccccaaggaccagaccgtgagccagaaggagagaagagagaccagcaagcagaagcagaagggcaaggagaaccccgacatggccaaccccagcgccatgagcaccaccgccaagggcagcaagagcctgaaggtggagctgatcgaggacaagatcgactacaccaaggagagacagcccagcatcgacctgacctgcgtgagctaccccttcgacgagttcagcaacccctacagatacaagctggacttcagcctgcagcccgagaccggccccggcaacctgatcgaccccatccacgagttcaaggccttcaccaacaccgccaccgccaccgaggaggacgtgaagatgaagttcagcaacgaggtgttcagattcgccagcgcctgcatgaacagcagaaccaacggcaccatccacttcggcgtgaaggacaagccccacggcaagatcgtgggcatcaaggtgaccaacgacaccaaggaggccctgatcaaccacttcaacctgatgatcaacaagtacttcgaggaccaccaggtgcagcaggccaagaagtgcatcagagagcccagattcgtggaggtgctgctgcccaacagcaccctgagcgacagattcgtgatcgaggtggacatcatcccccagttcagcgagtgccagtacgactacttccagatcaagatgcagaactacaacaacaagatctgggagcagagcaagaagttcagcctgttcgtgagagacggcaccagcagcaaggacatcaccaagaacaaggtggacttcagagccttcaaggccgacttcaagaccctggccgagagcagaaaggccgccgaggagaagttcagagccaagaccaacaagaaggagagagagggccccaagctggtgaagctgctgaccggcaaccaggacctgctggacaacagctactacgagcagtacatcctggtgaccaacaagtgccaccccgaccagaccaagcacctggacttcctgaaggagatcaagtggttcgccgtgctggagttcgaccccgagagcaacatcaacggcgtggtgaaggcctacaaggagagcagagtggccaacctgcacttccccagcgtgtacgtggagcagaagaccacccccaacgagaccatcagcaccctgaacctgtaccaccagcccagctggatcttctgcaacggcagactggacctggacagcgagaagtacaagcccttcgaccccagcagctggcagagagagagagccagcgacgtgagaaagctgatcagcttcctgacccacgaggacatcatgcccagaggcaagttcctggtggtgttcctgctgctgagcagcgtggacgaccccagagaccccctgatcgagaccttctgcgccttctaccaggacctgaagggcatggagaacatcctgtgcatctgcgtgcacccccacatcttccagggctggaaggacctgctggaggccagactgatcaagcaccaggacgagatcagcagccagtgcatcagcgccctgagcctggaggagatcaacggcaccatcctgaagctgaagagcgtgacccagagcagcaagagactgctgcccagcatcggcctgagcaccgtgctgctgaagaaggaggaggacatcatgaccgccctggagatcatctgcgagaacgagtgcgagggcaccctgctggagaaggacaagaacaagttcctggagttcaaggccagcaaggaggaggacttctacagaggcggcaaggtgagctggtggaacttctacttcagcagcgagagctacagcagccccttcgtgaagagagacaagtacgagagactggaggccatgatccagaactgcgccgacagcagcaagcccaccagcaccaagatcatccacctgtaccaccaccccggctgcggcggcaccaccctggccatgcacatcctgtgggagctgagaaagaagttcagatgcgccgtgctgaagaacaagaccgtggacttcagcgagatcggcgagcaggtgaccagcctgatcacctacggcgccatgaacagacaggagtacgtgcccgtgctgctgctggtggacgacttcgaggagcaggacaacgtgtacctgctgcagtacagcatccagaccgccatcgccaagaagtacatcagatacgagaagcccctggtgatcatcctgaactgcatgagaagccagaaccccgagaagagcgccagaatccccgacagcatcgccgtgatccagcagctgagccccaaggagcagagagccttcgagctgaagctgaaggagatcaaggagcagcacaagaacttcgaggacttctacagcttcatgatcatgaagaccaacttcaacaaggagtacatcgagaacgtggtgagaaacatcctgaagggccagaacatcttcaccaaggaggccaagctgttcagcttcctggccctgctgaacagctacgtgcccgacaccaccatcagcctgagccagtgcgagaagttcctgggcatcggcaacaagaaggccttctggggcaccgagaagttcgaggacaagatgggcacctacagcaccatcctgatcaagaccgaggtgatcgagtgcggcaactactgcggcgtgagaatcatccacagcctgatcgccgagttcagcctggaggagctgaagaagagctaccacctgaacaagagccagatcatgctggacatgctgaccgagaacctgttcttcgacaccggcatgggcaagagcaagttcctgcaggacatgcacaccctgctgctgaccagacacagagacgagcacgagggcgagaccggcaactggttcagccccttcatcgaggccctgcacaaggacgagggcaacgaggccgtggaggccgtgctgctggagagcatccacagattcaaccccaacgccttcatctgccaggccctggccagacacttctacatcaagaagaaggacttcggcaacgccctgaactgggccaagcaggccaagatcatcgagcccgacaacagctacatcagcgacaccctgggccaggtgtacaagagcaagatcagatggtggatcgaggagaacggcggcaacggcaacatcagcgtggacgacctgatcgccctgctggacctggccgagcacgccagcagcgccttcaaggagagccagcagcagagcgaggacagagagtacgaggtgaaggagagactgtaccccaagagcaagagaagatacgacacctacaacatcgccggctaccagggcgagatcgaggtgggcctgtacaccatccagatcctgcagctgatccccttcttcgacaacaagaacgagctgagcaagagatacatggtgaacttcgtgagcggcagcagcgacatccccggcgaccccaacaacgagtacaagctggccctgaagaactacatcccctacctgaccaagctgaagttcagcctgaagaagagcttcgacttcttcgacgagtacttcgtgctgctgaagcccagaaacaacatcaagcagaacgaggaggccaagaccagaagaaaggtggccggctacttcaagaagtacgtggacatcttctgcctgctggaggagagccagaacaacaccggcctgggcagcaagttcagcgagcccctgcaggtggagagatgcagaagaaacctggtggccctgaaggccgacaagttcagcggcctgctggagtacctgatcaagagccaggaggacgccatcagcaccatgaagtgcatcgtgaacgagtacaccttcctgctggagcagtgcaccgtgaagatccagagcaaggagaagctgaacttcatcctggccaacatcatcctgagctgcatccagcccaccagcagactggtgaagcccgtggagaagctgaaggaccagctgagagaggtgctgcagcccatcggcctgacctaccagttcagcgagccctacttcctggccagcctgctgttctggcccgagaaccagcagctggaccagcacagcgagcagatgaaggagtacgcccaggccctgaagaacagcttcaagggccagtacaagcacatgcacagaaccaagcagcccatcgcctacttcttcctgggcaagggcaagagactggagagactggtgcacaagggcaagatcgaccagtgcttcaagaagacccccgacatcaacagcctgtggcagagcggcgacgtgtggaaggaggagaaggtgcaggagctgctgctgagactgcagggcagagccgagaacaactgcctgtacatcgagtacggcatcaacgagaagatcaccatccccatcacccccgccttcctgggccagctgagaagcggcagaagcatcgagaaggtgagcttctacctgggcttcagcatcggcggccccctggcctacgacatcgagatcgtgtag

SEQ ID NO: 100984 - DNA, 3852 bp, synthetic construct
  misc_feature 1..3852: note = Description of Artificial Sequence: Synthetic coding sequence
  source 1..3852: mol_type = other DNA
atggccaagcagctgaacctgcccgagaacaccgacgactggaccaaggaggacgtgaaccagtggctggagagccacaagatcgaccagaagcacagagagatcctgaccgagcaggacgtgaacggcgccgtgctgaagtggctgaagaaggagcacctggtggacatgggcatcacccacggccccgccatccagatcgaggagctgttcaaggagctgagaaagaccgccatcgaggacagcatccagaccagcaagatgggcaagcccagcaagaacgcccccaaggaccagaccgtgagccagaaggagagaagagagaccagcaagcagaagcagaagggcaaggagaaccccgacatggccaaccccagcgccatgagcaccaccgccaagggcagcaagagcctgaaggtggagctgatcgaggacaagatcgactacaccaaggagagacagcccagcatcgacctgacctgcgtgagctaccccttcgacgagttcagcaacccctacagatacaagctggacttcagcctgcagcccgagaccggccccggcaacctgatcgaccccatccacgagttcaaggccttcaccaacaccgccaccgccaccgaggaggacgtgaagatgaagttcagcaacgaggtgttcagattcgccagcgcctgcatgaacagcagaaccaacggcaccatccacttcggcgtgaaggacaagccccacggcaagatcgtgggcatcaaggtgaccaacgacaccaaggaggccctgatcaaccacttcaacctgatgatcaacaagtacttcgaggaccaccaggtgcagcaggccaagaagtgcatcagagagcccagattcgtggaggtgctgctgcccaacagcaccctgagcgacagattcgtgatcgaggtggacatcatcccccagttcagcgagtgccagtacgactacttccagatcaagatgcagaactacaacaacaagatctgggagcagagcaagaagttcagcctgttcgtgagagacggcaccagcagcaaggacatcaccaagaacaaggtggacttcagagccttcaaggccgacttcaagaccctggccgagagcagaaaggccgccgaggagaagttcagagccaagaccaacaagaaggagagagagggccccaagctggtgaagctgctgaccggcaaccaggacctgctggacaacagctactacgagcagtacatcctggtgaccaacaagtgccaccccgaccagaccaagcacctggacttcctgaaggagatcaagtggttcgccgtgctggagttcgaccccgagagcaacatcaacggcgtggtgaaggcctacaaggagagcagagtggccaacctgcacttccccagcgtgtacgtggagcagaagaccacccccaacgagaccatcagcaccctgaacctgtaccaccagcccagctggatcttctgcaacggcagactggacctggacagcgagaagtacaagcccttcgaccccagcagctggcagagagagagagccagcgacgtgagaaagctgatcagcttcctgacccacgaggacatcatgcccagaggcaagttcctggtggtgttcctgctgctgagcagcgtggacgaccccagagaccccctgatcgagaccttctgcgccttctaccaggacctgaagggcatggagaacatcctgtgcatctgcgtgcacccccacatcttccagggctggaaggacctgctggaggccagactgatcaagcaccaggacgagatcagcagccagtgcatcagcgccctgagcctggaggagatcaacggcaccatcctgaagctgaagagcgtgacccagagcagcaagagactgctgcccagcatcggcctgagcaccgtgctgctgaagaaggaggaggacatcatgaccgccctggagatcatctgcgagaacgagtgcgagggcaccctgctggagaaggacaagaacaagttcctggagttcaaggccagcaaggaggaggacttctacagaggcggcaaggtgagctggtggaacttctacttcagcagcgagagctacagcagccccttcgtgaagagagacaagtacgagagactggaggccatgatccagaactgcgccgacagcagcaagcccaccagcaccaagatcatccacctgtaccaccaccccggctgcggcggcaccaccctggccatgcacatcctgtgggagctgagaaagaagttcagatgcgccgtgctgaagaacaagaccgtggacttcagcgagatcggcgagcaggtgaccagcctgatcacctacggcgccatgaacagacaggagtacgtgcccgtgctgctgctggtggacgacttcgaggagcaggacaacgtgtacctgctgcagtacagcatccagaccgccatcgccaagaagtacatcagatacgagaagcccctggtgatcatcctgaactgcatgagaagccagaaccccgagaagagcgccagaatccccgacagcatcgccgtgatccagcagctgagccccaaggagcagagagccttcgagctgaagctgaaggagatcaaggagcagcacaagaacttcgaggacttctacagcttcatgatcatgaagaccaacttcaacaaggagtacatcgagaacgtggtgagaaacatcctgaagggccagaacatcttcaccaaggaggccaagctgttcagcttcctggccctgctgaacagctacgtgcccgacaccaccatcagcctgagccagtgcgagaagttcctgggcatcggcaacaagaaggccttctggggcaccgagaagttcgaggacaagatgggcacctacagcaccatcctgatcaagaccgaggtgatcgagtgcggcaactactgcggcgtgagaatcatccacagcctgatcgccgagttcagcctggaggagctgaagaagagctaccacctgaacaagagccagatcatgctggacatgctgaccgagaacctgttcttcgacaccggcatgggcaagagcaagttcctgcaggacatgcacaccctgctgctgaccagacacagagacgagcacgagggcgagaccggcaactggttcagccccttcatcgaggccctgcacaaggacgagggcaacgaggccgtggaggccgtgctgctggagagcatccacagattcaaccccaacgccttcatctgccaggccctggccagacacttctacatcaagaagaaggacttcggcaacgccctgaactgggccaagcaggccaagatcatcgagcccgacaacagctacatcagcgacaccctgggccaggtgtacaagagcaagatcagatggtggatcgaggagaacggcggcaacggcaacatcagcgtggacgacctgatcgccctgctggacctggccgagcacgccagcagcgccttcaaggagagccagcagcagagcgaggacagagagtacgaggtgaaggagagactgtaccccaagagcaagagaagatacgacacctacaacatcgccggctaccagggcgagatcgaggtgggcctgtacaccatccagatcctgcagctgatccccttcttcgacaacaagaacgagctgagcaagagatacatggtgaacttcgtgagcggcagcagcgacatccccggcgaccccaacaacgagtacaagctggccctgaagaactacatcccctacctgaccaagctgaagttcagcctgaagaagagcttcgacttcttcgacgagtacttcgtgctgctgaagcccagaaacaactag

SEQ ID NO: 100985 - DNA, 4755 bp, synthetic construct
  misc_feature 1..4755: note = Description of Artificial Sequence: Synthetic coding sequence
  source 1..4755: mol_type = other DNA
atgagcaagcaggtgagcctgcccgagatgatcaaggactggaccaaggagcacgtgaagaagtgggtgaacgaggacctgaagatcaacgagcagtacggccagatcctgctgagcgaggaggtgaccggcctggtgctgcaggagctgaccgagaaggacctggtggagatgggcctgccctggggccccgccctgctgatcaagagaagctacaacaagctgaacagcaagagccccgagagcgacaaccacgaccccggccagctggacaacagcaagcccagcaagaccgagcaccagaagaaccccaagcacaccaagaaggaggaggagaacagcatgagcagcaacatcgactacgaccccagagagatcagagacatcaagcaggaggagagcatcctgatgaaggagaacgtgctggacgaggtggccaacgccaagcacaagaagaagggcaagctgaagcccgagcagctgacctgcatgccctaccccttcgaccagttccacgacagccacagatacatcgagcactacaccctgcagcccgagaccggcgccctgaacctgatcgaccccatccacgagttcaaggccctgaccaacaccgagaccgccaccgaggtggacatcaagatgaagttcagcaacgaggtgttcagattcgccagcgcctgcatgaacagcagaaccaacggcaccatccacttcggcgtgaaggacaagccccacggcgagatcgtgggcgtgaagatcaccagcaaggccgccttcatcgaccacttcaacgtgatgatcaagaagtacttcgaggagagcgagatcaacgaggccaagaagtgcatcagagagcccagattcgtggaggtgctgctgcagaacaacacccccagcgacagattcgtgatcgaggtggacaccatccccaagcacagcatctgcaacgacaagtacttctacatccagatgcagatctgcaaggacaagatctggaagcagaaccagaacctgagcctgttcgtgagagagggcgccagcagcagagacatcctggccaacagcaagcagagagacgtggacttcaaggccttcctgcagaacctgaagagcctggtggccagcagaaaggaggccgaggaggagtacggcatgaaggccatgaagaaggagagcgagggcctgaagctggtgaagctgctgatcggcaacagagacagcctggacaacagctactacgactggtacatcctggtgaccaacaagtgccaccccaaccagatcaagcacctggacttcctgaaggagatcaagtggttcgccgtgctggagttcgaccccgagagcatgatcaacggcgtggtgaaggcctacaaggagagcagagtggccaacctgcacttccccaaccagtacgaggacaagaccaccaacatgtgggagaagatcagcaccctgaacctgtaccagcagcccagctggatcttctgcaacggcagaagcgacctgaagagcgagacctacaagcccctggagccccacctgtggcagagagagagagccagcgaggtgagaaagctgatcctgttcctgaccgacgagaacatcatgaccagaggcaagttcctggtggtgttcctgctgctgagcagcgtggagagccccggcgaccccctgatcgagaccttctgggccttctaccaggccctgaagggcatggagaacatgctgtgcatcagcgtgaacagccacatctaccagagatggaaggacctgctgcagaccagaatgaagatggaggacgagctgaccaaccacagcatcagcaccctgaacatcgagctggtgaacagcaccatcctgaagctgaagagcgtgaccagaagcagcagaagattcctgcccgccagaggcagcagcagcgtgatcctggagaagaagaaggaggacgtgctgaccgccctggagatcctgtgcgagaacgagtgcaccgagaccgacatcgagaaggacaagagcaagttcctggagttcaagaagagcaaggaggagcacttctacagaggcggcaaggtgagctggtggaacttctacttcagcagcgagaactacagcagcgacttcgtgaagagagacagctacgagaagctgaaggacctgatccactgctgggccgagagccccaagcccatcttcgccaagatcatcaacctgtaccaccaccccggctgcggcggcaccaccctggccatgcacgtgctgtgggacctgaagaagaacttcagatgcgccgtgctgaagaacaagaccaccgacttcgccgagatcgccgagcaggtgatcaacctggtgacctacagagccaagagccaccaggactacatccccgtgctgctgctggtggacgacttcgaggagcaggagaacgtgtacttcctgcagaacgccatccacagcgtgctggccgagaaggacctgagatacgagaagaccctggtgatcatcctgaactgcatgagaagcagaaaccccgacgagagcgccaagctggccgacagcatcgccctgaactaccagctgagcagcaaggagcagagagccttcggcgccaagctgaaggagatcgagaagcagcacaagaactgcgagaacttctacagcttcatgatcatgaagagcaacttcgacgagacctacatcgagaacgtggtgagaaacatcctgaagggccaggacgtggacagcaaggaggcccagctgatcagcttcctggccctgctgagcagctacgtgaccgacagcaccatcagcgtgagccagtgcgagatcttcctgggcatcatctacaccagcaccccctgggagcccgagagcctggaggacaagatgggcacctacagcaccctgctgatcaagaccgaggtggccgagtacggcagatacaccggcgtgagaatcatccaccccctgatcgccctgtactgcctgaaggagctggagagaagctaccacctggacaagtgccagatcgccctgaacatcctggaggagaacctgttctacgacagcggcatcggcagagacaagttccagcacgacgtgcagaccctgctgctgaccagacagagaaaggtgtacggcgacgagaccgacaccctgttcagccccctgatggaggccctgcagaacaaggacatcgagaaggtgctgagcgccggcagcagaagattcccccagaacgccttcatctgccaggccctggccagacacttctacatcaaggagaaggacttcaacaccgccctggactgggccagacaggccaagatgaaggcccccaagaacagctacatcagcgacaccctgggccaggtgtacaagagcgagatcaagtggtggctggacggcaacaagaactgcagaagcatcaccgtgaacgacctgacccacctgctggaggccgccgagaaggccagcagagccttcaaggagagccagagacagaccgacagcaagaactacgagaccgagaactggagcccccagaagagccagagaagatacgacatgtacaacaccgcctgcttcctgggcgagatcgaggtgggcctgtacaccatccagatcctgcagctgacccccttcttccacaaggagaacgagctgagcaagaagcacatggtgcagttcctgagcggcaagtggaccatcccccccgaccccagaaacgagtgctacctggccctgagcaagttcaccagccacctgaagaacctgcagagcgacctgaagagatgcttcgacttcttcatcgactacatggtgctgctgaagatgagatacacccagaaggagatcgccgagatcatgctgagcaagaaggtgagcagatgcttcagaaagtacaccgagctgttctgccacctggacccctgcctgctgcagagcaaggagagccagctgctgcaggaggagaactgcagaaagaagctggaggccctgagagccgacagattcgccggcctgctggagtacctgaaccccaactacaaggacgccaccaccatggagagcatcgtgaacgagtacgccttcctgctgcagcagaacagcaagaagcccatgaccaacgagaagcagaacagcatcctggccaacatcatcctgagctgcctgaagcccaacagcaagctgatccagcccctgaccaccctgaagaagcagctgagagaggtgctgcagttcgtgggcctgagccaccagtaccccggcccctacttcctggcctgcctgctgttctggcccgagaaccaggagctggaccaggacagcaagctgatcgagaagtacgtgagcagcctgaacagaagcttcagaggccagtacaagagaatgtgcagaagcaagcaggccagcaccctgttctacctgggcaagagaaagggcctgaacagcatcgtgcacaaggccaagatcgagcagtacttcgacaaggcccagaacaccaacagcctgtggcacagcggcgacgtgtggaagaagaacgaggtgaaggacctgctgagaagactgaccggccaggccgagggcaagctgatcagcgtggagtacggcaccgaggagaagatcaagatccccgtgatcagcgtgtacagcggccccctgagaagcggcagaaacatcgagagagtgagcttctacctgggcttcagcatcgagggccccctggcctacgacatcgaggtgatctag

SEQ ID NO: 100986 - DNA, 1221 bp, synthetic construct
  misc_feature 1..1221: note = Description of Artificial Sequence: Synthetic coding sequence
  source 1..1221: mol_type = other DNA
atgagcaagcaggtgagcctgcccgagatgatcaaggactggaccaaggagcacgtgaagaagtgggtgaacgaggacctgaagatcaacgagcagtacggccagatcctgctgagcgaggaggtgaccggcctggtgctgcaggagctgaccgagaaggacctggtggagatgggcctgccctggggccccgccctgctgatcaagagaagctacaacaagctgaacagcaagagccccgagagcgacaaccacgaccccggccagctggacaacagcaagcccagcaagaccgagcaccagaagaaccccaagcacaccaagaaggaggaggagaacagcatgagcagcaacatcgactacgaccccagagagatcagagacatcaagcaggaggagagcatcctgatgaaggagaacgtgctggacgaggtggccaacgccaagcacaagaagaagctggaggccctgagagccgacagattcgccggcctgctggagtacctgaaccccaactacaaggacgccaccaccatggagagcatcgtgaacgagtacgccttcctgctgcagcagaacagcaagaagcccatgaccaacgagaagcagaacagcatcctggccaacatcatcctgagctgcctgaagcccaacagcaagctgatccagcccctgaccaccctgaagaagcagctgagagaggtgctgcagttcgtgggcctgagccaccagtaccccggcccctacttcctggcctgcctgctgttctggcccgagaaccaggagctggaccaggacagcaagctgatcgagaagtacgtgagcagcctgaacagaagcttcagaggccagtacaagagaatgtgcagaagcaagcaggccagcaccctgttctacctgggcaagagaaagggcctgaacagcatcgtgcacaaggccaagatcgagcagtacttcgacaaggcccagaacaccaacagcctgtggcacagcggcgacgtgtggaagaagaacgaggtgaaggacctgctgagaagactgaccggccaggccgagggcaagctgatcagcgtggagtacggcaccgaggagaagatcaagatccccgtgatcagcgtgtacagcggccccctgagaagcggcagaaacatcgagagagtgagcttctacctgggcttcagcatcgagggccccctggcctacgacatcgaggtgatctag

SEQ ID NO: 100987 - DNA, 4755 bp, synthetic construct; identical to SEQ ID NO: 100985
  misc_feature 1..4755: note = Description of Artificial Sequence: Synthetic coding sequence
  source 1..4755: mol_type = other DNA

SEQ ID NO: 100988 - DNA, 213 bp, synthetic construct
  misc_feature 1..213: note = Description of Artificial Sequence: Synthetic coding sequence
  source 1..213: mol_type = other DNA
atgagcaagcaggtgagcctgcccgagatgatcaaggactggaccaaggagcacgtgaagaagtgggtgaacgaggacctgaagatcaacgagcagtacggccagatcctgctgagcgaggaggtgaccggcctggtgctgcaggagctgaccgagaaggacctggtggagatgggcctgccctggggccccgccctgctgatcaagagatag

SEQ ID NO: 100989 - DNA, 4755 bp, synthetic construct; identical to SEQ ID NO: 100985
  misc_feature 1..4755: note = Description of Artificial Sequence: Synthetic coding sequence
  source 1..4755: mol_type = other DNA

SEQ ID NO: 100990 - DNA, 213 bp, synthetic construct; identical to SEQ ID NO: 100988
  misc_feature 1..213: note = Description of Artificial Sequence: Synthetic coding sequence
  source 1..213: mol_type = other DNA

SEQ ID NO: 100991 - DNA, 213 bp, synthetic construct; identical to SEQ ID NO: 100988
  misc_feature 1..213: note = Description of Artificial Sequence: Synthetic coding sequence
  source 1..213: mol_type = other DNA

SEQ ID NO: 100992 - DNA, 213 bp, synthetic construct; identical to SEQ ID NO: 100988
  misc_feature 1..213: note = Description of Artificial Sequence: Synthetic coding sequence
  source 1..213: mol_type = other DNA

SEQ ID NO: 100993 - DNA, 957 bp, synthetic construct
  misc_feature 1..957: note = Description of Artificial Sequence: Synthetic coding sequence
  source 1..957: mol_type = other DNA
atggccccctgggccgaggccgagcacagcgccctgaaccccctgagagccgtgtggctgaccctgaccgccgccttcctgctgaccctgctgctgcagctgctgccccccggcctgctgcccggctgcgccatcttccaggacctgatcagatacggcaagaccaagtgcggcgagcccagcagacccgccgcctgcagagccttcgacgtgcccaagagatacttcagccacttctacatcatcagcgtgctgtggaacggcttcctgctgtggtgcctgacccagagcctgttcctgggcgcccccttccccagctggctgcacggcctgctgagaatcctgggcgccgcccagttccagggcggcgagctggccctgagcgccttcctggtgctggtgttcctgtggctgcacagcctgagaagactgttcgagtgcctgtacgtgagcgtgttcagcaacgtgatgatccacgtggtgcagtactgcttcggcctggtgtactacgtgctggtgggcctgaccgtgctgagccaggtgcccatggacggcagaaacgcctacatcaccggcaagaacctgctgatgcaggccagatggttccacatcctgggcatgatgatgttcatctggagcagcgcccaccagtacaagtgccacgtgatcctgggcaacctgagaaagaacaaggccggcgtggtgatccactgcaaccacagaatccccttcggcgactggttcgagtacgtgagcagccccaactacctggccgagctgatgatctacgtgagcatggccgtgaccttcggcttccacaacctgacctggtggctggtggtgaccaacgtgttcttcaaccaggccctgagcgccttcctgagccaccagttctacaagagcaagttcgtgagctaccccaagcacagaaaggccttcctgcccttcctgttctag

SEQ ID NO: 100994 - DNA, 711 bp, synthetic construct
  misc_feature 1..711: note = Description of Artificial Sequence: Synthetic coding sequence
  source 1..711: mol_type = other DNA
atgaccagatgccccgccggccaggccgaggtggagatggccgagctgtacgtgaagcccggcaacaaggagagaggctggaacgaccccccccagttcagctacggcctgcagacccaggccggcggccccagaagaagcctgctgaccaagagagtggccgccccccaggacggcagccccagagtgcccgccagcgagaccagccccggccccccccccatgggcccccccccccccagcagcaaggcccccagaagcccccccgtgggcagcggccccgccagcggcgtggagcccaccagcttccccgtggagagcgaggccgtgatggaggacgtgctgagacccctggagcaggccctggaggactgcagaggccacaccagaaagcaggtgtgcgacgacatcagcagaagactggccctgctgcaggagcagtgggccggcggcaagctgagcatccccgtgaagaagagaatggccctgctggtgcaggagctgagcagccacagatgggacgccgccgacgacatccacagaagcctgatggtggaccacgtgaccgaggtgagccagtggatggtgggcgtgaagagactgatcgccgagaagagaagcctgttcagcgaggaggccgccaacgaggagaagagcgccgccaccgccgagaagaaccacaccatccccggcttccagcaggccagctag

SEQ ID NO: 100995 - DNA, 681 bp, synthetic construct
  misc_feature 1..681: note = Description of Artificial Sequence: Synthetic coding sequence
  source 1..681: mol_type = other DNA
atggagggctgcgtgagcaacctgatggtgtgcaacctggcctacagcggcaagctggaggagctgaaggagagcatcctggccgacaagagcctggccaccagaaccgaccaggacagcagaaccgccctgcactgggcctgcagcgccggccacaccgagatcgtggagttcctgctgcagctgggcgtgcccgtgaacgacaaggacgacgccggctggagccccctgcacatcgccgccagcgccggcagagacgagatcgtgaaggccctgctgggcaagggcgcccaggtgaacgccgtgaaccagaacggctgcacccccctgcactacgccgccagcaagaacagacacgagatcgccgtgatgctgctggagggcggcgccaaccccgacgccaaggaccactacgaggccaccgccatgcacagagccgccgccaagggcaacctgaagatgatccacatcctgctgtactacaaggccagcaccaacatccaggacaccgagggcaacacccccctgcacctggcctgcgacgaggagagagtggaggaggccaagctgctggtgagccagggcgccagcatctacatcgagaacaaggaggagaagacccccctgcaggtggccaagggcggcctgggcctgatcctgaagagaatggtggagggctag

SEQ ID NO: 100996 - DNA, 780 bp, synthetic construct
  misc_feature 1..780: note = Description of Artificial Sequence: Synthetic coding sequence
  source 1..780: mol_type = other DNA
atggccaccgccaccggcgtggccgaggagagactgctggccgccctggcctacctgcagtgcgccgtgggctgcgccgtgttcgccagaaacagacagaccaacagcgtgtacggcagacacgccctgcccagccacagactgagagtgcccgccagagccgcctgggtggtgcaggagctgcccagcctggccctgcccctgtaccagtacgccagcgagagcgcccccagactgagaagcgcccccaactgcatcctgctggccatgttcctggtgcactacggccacagatgcctgatctaccccttcctgatgagaggcggcaagcccatgcccctgctggcctgcaccatggccatcatgttctgcacctgcaacggctacctgcagagcagatacctgagccactgcgccgtgtacgccgacgactgggtgaccgaccccagattcctgatcggcttcggcctgtggctgaccggcatgctgatcaacatccacagcgaccacatcctgagaaacctgagaaagcccggcgacaccggctacaagatccccagaggcggcctgttcgagtacgtgaccgccgccaactacttcggcgagatcatggagtggtgcggctacgccctggccagctggagcgtgcagggcgccgccttcgccttcttcaccttctgcttcctgagcggcagagccaaggagcaccacgagtggtacctgagaaagttcgaggagtaccccaagttcagaaagatcatcatccccttcctgttctag

SEQ ID NO: 100997 - DNA, 585 bp, synthetic construct
  misc_feature 1..585: note = Description of Artificial Sequence: Synthetic coding sequence
  source 1..585: mol_type = other DNA
atggagcacgccgcccagccctggagatggcagagaagaagaggctggagaagaagcgcctgctggcccagaagccccacctgcagcgccccctgggccgccagaagcagcagagccatcgtgagaagaacccagtgcaccgccgccaccagatgccccgccaccggcagcgagtgcagaagaggcccccccggctggtgcagaagctgccccagatggccctgcagaagcaccagcacccccgccagcccccccagagtgagcgccgccagacccaccgccagcagctggccctgcagcagcagcaccaccggcatcggcaacgtgggcatgcaggccctggccgtgtgcctgcaccccaagtgccagcccatggtgcccatcgtgtgccccgacctgaaccacgacagcaagacccagagagagatcgccggcatcagatgcagctacagcctgctgggcaacaccgccgccagcagaagaatccccaccagcctgatgacccagcacctgaacgcccacctgctggccaacacctgcttcgccgtgaaccagtacgaggtgttcctgggcgtgctggcctag

SEQ ID NO: 100998 - DNA, 639 bp, synthetic construct
  misc_feature 1..639: note = Description of Artificial Sequence: Synthetic coding sequence
  source 1..639: mol_type = other DNA
atggagcacgccgcccagccctggagatggcagagaagaagaggctggagaagaagcgcctgctggcccagaagccccacctgcagcgccccctgggccgccagaagcagcagagccatcgtgagaagaacccagtgcaccgccgccaccagatgccccgccaccggcagcgagtgcagaagaggcccccccggctggtgcagaagctgccccagatggccctgcagaagcaccagcacccccgccagcccccccagagtgagcgccgccagacccaccgccagcagctggccctgcagcagcagcaccaccggcatcggcttcggcctgtggctgaccggcatgctgatcaacatccacagcgaccacatcctgagaaacctgagaaagcccggcgacaccggctacaagatccccagaggcggcctgttcgagtacgtgaccgccgccaactacttcggcgagatcatggagtggtgcggctacgccctggccagctggagcgtgcagggcgccgccttcgccttcttcaccttctgcttcctgagcggcagagccaaggagcaccacgagtggtacctgagaaagttcgaggagtaccccaagttcagaaagatcatcatccccttcctgttctag

SEQ ID NO: 100999 - DNA, 858 bp, synthetic construct
  misc_feature 1..858: note = Description of Artificial Sequence: Synthetic coding sequence
  source 1..858: mol_type = other DNA
atgctgctggccaccttcaagctgtgcgccggcagcagctacagacacatgagaaacatgaagggcctgagacagcaggccgtgatggccatcagccaggagctgaacagaagagccctgggcggccccacccccagcacctggatcaaccaggtgagaagaagaagcagcctgctgggcagcagactggaggagaccctgtacagcgaccaggagctggcctacctgcagcagggcgaggaggccatgcagaaggccctgggcatcctgagcaaccaggagggctggaagaaggagagccagcaggacaacggcgacaaggtgatgagcaaggtggtgcccgacgtgggcaaggtgttcagactggaggtggtggtggaccagcccatggagagactgtacgaggagctggtggagagaatggaggccatgggcgagtggaaccccaacgtgaaggagatcaaggtgctgcagaagatcggcaaggacaccttcatcacccacgagctggccgccgaggccgccggcaacctggtgggccccagagacttcgtgagcgtgagatgcgccaagagaagaggcagcacctgcgtgctggccggcatggccaccgacttcggcaacatgcccgagcagaagggcgtgatcagagccgagcacggccccacctgcatggtgctgcaccccctggccggcagccccagcaagaccaagctgacctggctgctgagcatcgacctgaagggctggctgcccaagagcatcatcaaccaggtgctgagccagacccaggtggacttcgccaaccacctgagaaagagactggagagccaccccgccagcgaggccagatgctag

SEQ ID NO: 101000 - DNA, 744 bp, synthetic construct
  misc_feature 1..744: note = Description of Artificial Sequence: Synthetic coding sequence
  source 1..744: mol_type = other DNA
atgctgctggccaccttcaagctgtgcgccggcagcagctacagacacatgagaaacatgaagggcagcagactggaggagaccctgtacagcgaccaggagctggcctacctgcagcagggcgaggaggccatgcagaaggccctgggcatcctgagcaaccaggagggctggaagaaggagagccagcaggacaacggcgacaaggtgatgagcaaggtggtgcccgacgtgggcaaggtgttcagactggaggtggtggtggaccagcccatggagagactgtacgaggagctggtggagagaatggaggccatgggcgagtggaaccccaacgtgaaggagatcaaggtgctgcagaagatcggcaaggacaccttcatcacccacgagctggccgccgaggccgccggcaacctggtgggccccagagacttcgtgagcgtgagatgcgccaagagaagaggcagcacctgcgtgctggccggcatggccaccgacttcggcaacatgcccgagcagaagggcgtgatcagagccgagcacggccccacctgcatggtgctgcaccccctggccggcagccccagcaagaccaagctgacctggctgctgagcatcgacctgaagggctggctgcccaagagcatcatcaaccaggtgctgagccagacccaggtggacttcgccaaccacctgagaaagagactggagagccaccccgccagcgaggccagatgctag

SEQ ID NO: 101001 - DNA, 969 bp, synthetic construct
  misc_feature 1..969: note = Description of Artificial Sequence: Synthetic coding sequence
  source 1..969: mol_type = other DNA
atgagcagcagcccctgggagcccgccaccctgagaagagtgttcgtggtgggcgtgggcatgaccaagttcgtgaagcccggcgccgagaacagcagagactaccccgacctggccgaggaggccggcaagaaggccctggccgacgcccagatcccctacagcgccgtggaccaggcctgcgtgggctacgtgttcggcgtggccgagtgcgtgctggccctgggcttcgagaagatgagcaagggcagcctgggcatcaagttcagcgacagaaccatccccaccgacaagcacgtggacctgctgatcaacaagtacggcctgagcgcccaccccgtggccccccagatgttcggctacgccggcaaggagcacatggagaagtacggcaccaagatcgagcacttcgccaagatcggctggaagaaccacaagcacagcgtgaacaacccctacagccagttccaggacgagtacagcctggacgaggtgatggccagcaaggaggtgttcgacttcctgaccatcctgcagtgctgccccaccagcgacggcgccgccgccgccatcctggccagcgaggccttcgtgcagaagtacggcctgcagagcaaggccgtggagatcctggcccaggagatgatgaccgacctgcccagcagcttcgaggagaagagcatcatcaagatggtgggcttcgacatgagcaaggaggccgccagaaagtgctacgagaagagcggcctgacccccaacgacatcgacgtgatcgagctgcacgactgcttcagcaccaacgagctgctgacctacgaggccctgggcctgtgccccgagggccagggcgccaccctggtggacagaggcgacaacacctacggcggcaagtgggtgatcaaccccagcggcggcctgatcagcaagggccaccccctgggcgccaccggcggccacagctgcagctag

SEQ ID NO: 101002 - DNA, 1644 bp, synthetic construct
  misc_feature 1..1644: note = Description of Artificial Sequence: Synthetic coding sequence
  source 1..1644: mol_type = other DNA
atgagcagcagcccctgggagcccgccaccctgagaagagtgttcgtggtgggcgtgggcatgaccaagttcgtgaagcccggcgccgagaacagcagagactaccccgacctggccgaggaggccggcaagaaggccctggccgacgcccagatcccctacagcgccgtggaccaggcctgcgtgggctacgtgttcggcgacagcacctgcggccagagagccatctaccacagcctgggcatgaccggcatccccatcatcaacgtgaacaacaactgcgccaccggcagcaccgccctgttcatggccagacagctgatccagggcggcgtggccgagtgcgtgctggccctgggcttcgagaagatgagcaagggcagcctgggcatcaagttcagcgacagaaccatccccaccgacaagcacgtggacctgctgatcaacaagtacggcctgagcgcccaccccgtggccccccagatgttcggctacgccggcaaggagcacatggagaagtacggcaccaagatcgagcacttcgccaagatcggctggaagaaccacaagcacagcgtgaacaacccctacagccagttccaggacgagtacagcctggacgaggtgatggccagcaaggaggtgttcgacttcctgaccatcctgcagtgctgccccaccagcgacggcgccgccgccgccatcctggccagcgaggccttcgtgcagaagtacggcctgcagagcaaggccgtggagatcctggcccaggagatgatgaccgacctgcccagcagcttcgaggagaagagcatcatcaagatggtgggcttcgacatgagcaaggaggccgccagaaagtgctacgagaagagcggcctgacccccaacgacatcgacgtgatcgagctgcacgactgcttcagcaccaacgagctgctgacctacgaggccctgggcctgtgccccgagggccagggcgccaccctggtggacagaggcgacaacacctacggcggcaagtgggtgatcaaccccagcggcggcctgatcagcaagggccaccccctgggcgccaccggcctggcccagtgcgccgagctgtgctggcagctgagaggcgaggccggcaagagacaggtgcccggcgccaaggtggccctgcagcacaacctgggcatcggcggcgccgtggtggtgaccctgtacaagatgggcttccccgaggccgccagcagcttcagaacccaccagatcgaggccgtgcccaccagcagcgccagcgacggcttcaaggccaacctggtgttcaaggagatcgagaagaagctggaggaggagggcgagcagttcgtgaagaagatcggcggcatcttcgccttcaaggtgaaggacggccccggcggcaaggaggccacctgggtggtggacgtgaagaacggcaagggcagcgtgctgcccaacagcgacaagaaggccgactgcaccatcaccatggccgacagcgacttcctggccctgatgaccggcaagatgaacccccagagcgccttcttccagggcaagctgaagatcaccggcaacatgggcctggccatgaagctgcagaacctgcagctgcagcccggcaacgccaagctgtag

SEQ ID NO: 101003 - DNA, 1572 bp, synthetic construct
  misc_feature 1..1572: note = Description of Artificial Sequence: Synthetic coding sequence
  source 1..1572: mol_type = other DNA
atgagcagcagcccctgggagcccgccaccctgagaagagtgttcgtggtgggcgtgggcatgaccaagttcgtgaagcccggcgccgagaacagcagagactaccccgacctggccgaggaggccggcgacagcacctgcggccagagagccatctaccacagcctgggcatgaccggcatccccatcatcaacgtgaacaacaactgcgccaccggcagcaccgccctgttcatggccagacagctgatccagggcggcgtggccgagtgcgtgctggccctgggcttcgagaagatgagcaagggcagcctgggcatcaagttcagcgacagaaccatccccaccgacaagcacgtggacctgctgatcaacaagtacggcctgagcgcccaccccgtggccccccagatgttcggctacgccggcaaggagcacatggagaagtacggcaccaagatcgagcacttcgccaagatcggctggaagaaccacaagcacagcgtgaacaacccctacagccagttccaggacgagtacagcctggacgaggtgatggccagcaaggaggtgttcgacttcctgaccatcctgcagtgctgccccaccagcgacggcgccgccgccgccatcctggccagcgaggccttcgtgcagaagtacggcctgcagagcaaggccgtggagatcctggcccaggagatgatgaccgacctgcccagcagcttcgaggagaagagcatcatcaagatggtgggcttcgacatgagcaaggaggccgccagaaagtgctacgagaagagcggcctgacccccaacgacatcgacgtgatcgagctgcacgactgcttcagcaccaacgagctgctgacctacgaggccctgggcctgtgccccgagggccagggcgccaccctggtggacagaggcgacaacacctacggcggcaagtgggtgatcaaccccagcggcggcctgatcagcaagggccaccccctgggcgccaccggcctggcccagtgcgccgagctgtgctggcagctgagaggcgaggccggcaagagacaggtgcccggcgccaaggtggccctgcagcacaacctgggcatcggcggcgccgtggtggtgaccctgtacaagatgggcttccccgaggccgccagcagcttcagaacccaccagatcgaggccgtgcccaccagcagcgccagcgacggcttcaaggccaacctggtgttcaaggagatcgagaagaagctggaggaggagggcgagcagttcgtgaagaagatcggcggcatcttcgccttcaaggtgaaggacggccccggcggcaaggaggccacctgggtggtggacgtgaagaacggcaagggcagcgtgctgcccaacagcgacaagaaggccgactgcaccatcaccatggccgacagcgacttcctggccctgatgaccggcaagatgaacccccagagcgccttcttccagggcaagctgaagatcaccggcaacatgggcctggccatgaagctgcagaacctgcagctgcagcccggcaacgccaagctgtag

SEQ ID NO: 101004 - DNA, 180 bp, synthetic construct
  misc_feature 1..180: note = Description of Artificial Sequence: Synthetic coding sequence
  source 1..180: mol_type = other DNA
atgggcttccccgaggccgccagcagcttcagaacccaccagatcgaggccgtgcccaccagcagcgccagcgacggcttcaaggccaacctggtgttcaaggagatcgagaagaagctggaggagatcagaagactgaccgcccagagccagtggctgacccagaccagctggctgtag

SEQ ID NO: 101005 - DNA, 423 bp, synthetic construct
  misc_feature 1..423: note = Description of Artificial Sequence: Synthetic coding sequence
  source 1..423: mol_type = other DNA
atgggcttccccgaggccgccagaacccaccagatcgaggccgtgcccaccagcagcgccagcgacggcttcaaggccaacctggtgttcaaggagatcgagaagaagctggaggaggagggcgagcagttcgtgaagaagatcggcggcatcttcgccttcaaggtgaaggacggccccggcggcaaggaggccacctgggtggtggacgtgaagaacggcaagggcagcgtgctgcccaacagcgacaagaaggccgactgcaccatcaccatggccgacagcgacttcctggccctgatgaccggcaagatgaacccccagagcgccttcttccagggcaagctgaagatcaccggcaacatgggcctggccatgaagctgcagaacctgcagctgcagcccggcaacgccaagctgtag

SEQ ID NO: 101006 - DNA, 432 bp, synthetic construct
  misc_feature 1..432: note = Description of Artificial Sequence: Synthetic coding sequence
  source 1..432: mol_type = other DNA
atgggcttccccgaggccgccagcagcttcagaacccaccagatcgaggccgtgcccaccagcagcgccagcgacggcttcaaggccaacctggtgttcaaggagatcgagaagaagctggaggaggagggcgagcagttcgtgaagaagatcggcggcatcttcgccttcaaggtgaaggacggccccggcggcaaggaggccacctgggtggtggacgtgaagaacggcaagggcagcgtgctgcccaacagcgacaagaaggccgactgcaccatcaccatggccgacagcgacttcctggccctgatgaccggcaagatgaacccccagagcgccttcttccagggcaagctgaagatcaccggcaacatgggcctggccatgaagctgcagaacctgcagctgcagcccggcaacgccaagctgtag

SEQ ID NO: 101007 - DNA, 180 bp, synthetic construct; identical to SEQ ID NO: 101004
  misc_feature 1..180: note = Description of Artificial Sequence: Synthetic coding sequence
  source 1..180: mol_type = other DNA

SEQ ID NO: 101008 - DNA, 1401 bp, synthetic construct
  misc_feature 1..1401: note = Description of Artificial Sequence: Synthetic coding sequence
  source 1..1401: mol_type = other DNA
atgaccggcatccccatcatcaacgtgaacaacaactgcgccaccggcagcaccgccctgttcatggccagacagctgatccagggcggcgtggccgagtgcgtgctggccctgggcttcgagaagatgagcaagggcagcctgggcatcaagttcagcgacagaaccatccccaccgacaagcacgtggacctgctgatcaacaagtacggcctgagcgcccaccccgtggccccccagatgttcggctacgccggcaaggagcacatggagaagtacggcaccaagatcgagcacttcgccaagatcggctggaagaaccacaagcacagcgtgaacaacccctacagccagttccaggacgagtacagcctggacgaggtgatggccagcaaggaggtgttcgacttcctgaccatcctgcagtgctgccccaccagcgacggcgccgccgccgccatcctggccagcgaggccttcgtgcagaagtacggcctgcagagcaaggccgtggagatcctggcccaggagatgatgaccgacctgcccagcagcttcgaggagaagagcatcatcaagatggtgggcttcgacatgagcaaggaggccgccagaaagtgctacgagaagagcggcctgacccccaacgacatcgacgtgatcgagctgcacgactgcttcagcaccaacgagctgctgacctacgaggccctgggcctgtgccccgagggccagggcgccaccctggtggacagaggcgacaacacctacggcggcaagtgggtgatcaaccccagcggcggcctgatcagcaagggccaccccctgggcgccaccggcctggcccagtgcgccgagctgtgctggcagctgagaggcgaggccggcaagagacaggtgcccggcgccaaggtggccctgcagcacaacctgggcatcggcggcgccgtggtggtgaccctgtacaagatgggcttccccgaggccgccagcagcttcagaacccaccagatcgaggccgtgcccaccagcagcgccagcgacggcttcaaggccaacctggtgttcaaggagatcgagaagaagctggaggaggagggcgagcagttcgtgaagaagatcggcggcatcttcgccttcaaggtgaaggacggccccggcggcaaggaggccacctgggtggtggacgtgaagaacggcaagggcagcgtgctgcccaacagcgacaagaaggccgactgcaccatcaccatggccgacagcgacttcctggccctgatgaccggcaagatgaacccccagagcgccttcttccagggcaagctgaagatcaccggcaacatgggcctggccatgaagctgcagaacctgcagctgcagcccggcaacgccaagctgtag

SEQ ID NO: 101009 - DNA, 1512 bp, synthetic construct
  misc_feature 1..1512: note = Description of Artificial Sequence: Synthetic coding sequence
  source 1..1512: mol_type = other DNA
atgagcagcagcccctgggagcccgccaccctgagaagagtgttcgtggtgggcgtgggcatgaccaagttcgtgaagcccggcgccgagaacagcagagactaccccgacctggccgaggaggccggcaagaaggccctggccgacgcccagatcccctacagcgccgtggaccaggcctgcgtgggctacgtgttcggcgtggccgagtgcgtgctggccctgggcttcgagaagatgagcaagggcagcctgggcatcaagttcagcgacagaaccatccccaccgacaagcacgtggacctgctgatcaacaagtacggcctgagcgcccaccccgtggccccccagatgttcggctacgccggcaaggagcacatggagaagtacggcaccaagatcgagcacttcgccaagatcggctggaagaaccacaagcacagcgtgaacaacccctacagccagttccaggacgagtacagcctggacgaggtgatggccagcaaggaggtgttcgacttcctgaccatcctgcagtgctgccccaccagcgacggcgccgccgccgccatcctggccagcgaggccttcgtgcagaagtacggcctgcagagcaaggccgtggagatcctggcccaggagatgatgaccgacctgcccagcagcttcgaggagaagagcatcatcaagatggtgggcttcgacatgagcaaggaggccgccagaaagtgctacgagaagagcggcctgacccccaacgacatcgacgtgatcgagctgcacgactgcttcagcaccaacgagctgctgacctacgaggccctgggcctgtgccccgagggccagggcgccaccctggtggacagaggcgacaacacctacggcggcaagtgggtgatcaaccccagcggcggcctgatcagcaagggccaccccctgggcgccaccggcctggcccagtgcgccgagctgtgctggcagctgagaggcgaggccggcaagagacaggtgcccggcgccaaggtggccctgcagcacaacctgggcatcggcggcgccgtggtggtgaccctgtacaagatgggcttccccgaggccgccagcagcttcagaacccaccagatcgaggccgtgcccaccagcagcgccagcgacggcttcaaggccaacctggtgttcaaggagatcgagaagaagctggaggaggagggcgagcagttcgtgaagaagatcggcggcatcttcgccttcaaggtgaaggacggccccggcggcaaggaggccacctgggtggtggacgtgaagaacggcaagggcagcgtgctgcccaacagcgacaagaaggccgactgcaccatcaccatggccgacagcgacttcctggccctgatgaccggcaagatgaacccccagagcgccttcttccagggcaagctgaagatcaccggcaacatgggcctggccatgaagctgcagaacctgcagctgcagcccggcaacgccaagctgtag

SEQ ID NO: 101010 - DNA, 1653 bp, synthetic construct
  misc_feature 1..1653: note = Description of Artificial Sequence: Synthetic coding sequence
  source 1..1653: mol_type = other DNA
atggtgggcgaggagaagatgagcctgagaaacagactgagcaagagcagagagaaccccgaggaggacgaggaccagagaaaccccgccaaggagagcctggagacccccagcaacggcagaatcgacatcaagcagctgatcgccaagaagatcaagctgaccgccgaggccgaggagctgaagcccttcttcatgaaggaggtgggcagccacttcgacgacttcgtgaccaacctgatcgagaagagcgccagcctggacaacggcggctgcgccctgaccaccttcagcgtgctggagggcgagaagaacaaccacagagccaaggacctgagagccccccccgagcagggcaagatcttcatcgccagaagaagcctgctggacgagctgctggaggtggaccacatcagaaccatctaccacatgttcatcgccctgctgatcctgttcatcctgagcaccctggtggtggactacatcgacgagggcagactggtgctggagttcagcctgctgagctacgccttcggcaagttccccaccgtggtgtggacctggtggatcatgttcctgagcaccttcagcgtgccctacttcctgttccagcactgggccaccggctacagcaagagcagccaccccctgatcagaagcctgttccacggcttcctgttcatgatcttccagatcggcgtgctgggcttcggccccacctacgtggtgctggcctacaccctgccccccgccagcagattcatcatcatcttcgagcagatcagattcgtgatgaaggcccacagcttcgtgagagagaacgtgcccagagtgctgaacagcgccaaggagaagagcagcaccgtgcccatccccaccgtgaaccagtacctgtacttcctgttcgcccccaccctgatctacagagacagctaccccagaaaccccaccgtgagatggggctacgtggccatgaagttcgcccaggtgttcggctgcttcttctacgtgtactacatcttcgagagactgtgcgcccccctgttcagaaacatcaagcaggagcccttcagcgccagagtgctggtgctgtgcgtgttcaacagcatcctgcccggcgtgctgatcctgttcctgaccttcttcgccttcctgcactgctggctgaacgccttcgccgagatgctgagattcggcgacagaatgttctacaaggactggtggaacagcaccagctacagcaactactacagaacctggaacgtggtggtgcacgactggctgtactactacgcctacaaggacttcctgtggttcttcagcaagagattcaagagcgccgccatgctggccgtgttcgccgtgagcgccgtggtgcacgagtacgccctggccgtgtgcctgagcttcttctaccccgtgctgttcgtgctgttcatgttcttcggcatggccttcaacttcatcgtgaacgacagcagaaagaagcccatctggaacgtgctgatgtggaccagcctgttcctgggcaacggcgtgctgctgtgcttctacagccaggagtggtacgccagacagcactgccccctgaagaaccccaccttcctggactacgtgagacccagaagctggacctgcagatacgtgttctag

SEQ ID NO: 101011 - DNA, 783 bp, synthetic construct
  misc_feature 1..783: note = Description of Artificial Sequence: Synthetic coding sequence
  source 1..783: mol_type = other DNA
atggtgggcgaggagaagatgagcctgagaaacagactgagcaagagcagagagaaccccgaggaggacgaggaccagagaaaccccgccaaggagagcctggagacccccagcaacggcagaatcgacatcaagcagctgatcgccaagaagatcaagctgaccgccgaggccgaggagctgaagcccttcttcatgaaggaggtgggcagccacttcgacgacttcgtgaccaacctgatcgagaagagcgccagcctggacaacggcggctgcgccctgaccaccttcagcgtgctggagggcgagaagaacaaccacagagccaaggacctgagagccccccccgagcagggcaagatcttcatcgccagaagaagcctgctggacgagctgctggaggtggaccacatcagaaccatctaccacatgttcatcgccctgctgatcctgttcatcctgagcaccctggtggtggactacatcgacgagggcagactggtgctggagttcagcctgctgagctacgccttcggcaagttccccaccgtggtgtggacctggtggatcatgttcctgagcaccttcagcgtgccctacttcctgttccagcactgggccaccggctacagcaagagcagccaccccctgatcagaagcctgttccacggcttcctgttcatgatcttccagatcggcgtgctgggcttcggccccacctacgtggtgctggcctacaccctgccccccgccagcagattcatcatcatcttcgagcagtag

SEQ ID NO: 101012 - DNA, 861 bp, synthetic construct
  misc_feature 1..861: note = Description of Artificial Sequence: Synthetic coding sequence
  source 1..861: mol_type = other DNA
atgaaggcccacagcttcgtgagagagaacgtgcccagagtgctgaacagcgccaaggagaagagcagcaccgtgcccatccccaccgtgaaccagtacctgtacttcctgttcgcccccaccctgatctacagagacagctaccccagaaaccccaccgtgagatggggctacgtggccatgaagttcgcccaggtgttcggctgcttcttctacgtgtactacatcttcgagagactgtgcgcccccctgttcagaaacatcaagcaggagcccttcagcgccagagtgctggtgctgtgcgtgttcaacagcatcctgcccggcgtgctgatcctgttcctgaccttcttcgccttcctgcactgctggctgaacgccttcgccgagatgctgagattcggcgacagaatgttctacaaggactggtggaacagcaccagctacagcaactactacagaacctggaacgtggtggtgcacgactggctgtactactacgcctacaaggacttcctgtggttcttcagcaagagattcaagagcgccgccatgctggccgtgttcgccgtgagcgccgtggtgcacgagtacgccctggccgtgtgcctgagcttcttctaccccgtgctgttcgtgctgttcatgttcttcggcatggccttcaacttcatcgtgaacgacagcagaaagaagcccatctggaacgtgctgatgtggaccagcctgttcctgggcaacggcgtgctgctgtgcttctacagccaggagtggtacgccagacagcactgccccctgaagaaccccaccttcctggactacgtgagacccagaagctggacctgcagatacgtgttctag

SEQ ID NO: 101013 - DNA, 1458 bp, synthetic construct
  misc_feature 1..1458: note = Description of Artificial Sequence: Synthetic coding sequence
  source 1..1458: mol_type = other DNA
atgaaggaggtgggcagccacttcgacgacttcgtgaccaacctgatcgagaagagcgccagcctggacaacggcggctgcgccctgaccaccttcagcgtgctggagggcgagaagaacaaccacagagccaaggacctgagagccccccccgagcagggcaagatcttcatcgccagaagaagcctgctggacgagctgctggaggtggaccacatcagaaccatctaccacatgttcatcgccctgctgatcctgttcatcctgagcaccctggtggtggactacatcgacgagggcagactggtgctggagttcagcctgctgagctacgccttcggcaagttccccaccgtggtgtggacctggtggatcatgttcctgagcaccttcagcgtgccctacttcctgttccagcactgggccaccggctacagcaagagcagccaccccctgatcagaagcctgttccacggcttcctgttcatgatcttccagatcggcgtgctgggcttcggccccacctacgtggtgctggcctacaccctgccccccgccagcagattcatcatcatcttcgagcagatcagattcgtgatgaaggcccacagcttcgtgagagagaacgtgcccagagtgctgaacagcgccaaggagaagagcagcaccgtgcccatccccaccgtgaaccagtacctgtacttcctgttcgcccccaccctgatctacagagacagctaccccagaaaccccaccgtgagatggggctacgtggccatgaagttcgcccaggtgttcggctgcttcttctacgtgtactacatcttcgagagactgtgcgcccccctgttcagaaacatcaagcaggagcccttcagcgccagagtgctggtgctgtgcgtgttcaacagcatcctgcccggcgtgctgatcctgttcctgaccttcttcgccttcctgcactgctggctgaacgccttcgccgagatgctgagattcggcgacagaatgttctacaaggactggtggaacagcaccagctacagcaactactacagaacctggaacgtggtggtgcacgactggctgtactactacgcctacaaggacttcctgtggttcttcagcaagagattcaagagcgccgccatgctggccgtgttcgccgtgagcgccgtggtgcacgagtacgccctggccgtgtgcctgagcttcttctaccccgtgctgttcgtgctgttcatgttcttcggcatggccttcaacttcatcgtgaacgacagcagaaagaagcccatctggaacgtgctgatgtggaccagcctgttcctgggcaacggcgtgctgctgtgcttctacagccaggagtggtacgccagacagcactgccccctgaagaaccccaccttcctggactacgtgagacccagaagctggacctgcagatacgtgttctag

SEQ ID NO: 101014 - DNA, 1479 bp, synthetic construct
  misc_feature 1..1479: note = Description of Artificial Sequence: Synthetic coding sequence
  source 1..1479: mol_type = other DNA
atggagctgaagcccttcttcatgaaggaggtgggcagccacttcgacgacttcgtgaccaacctgatcgagaagagcgccagcctggacaacggcggctgcgccctgaccaccttcagcgtgctggagggcgagaagaacaaccacagagccaaggacctgagagccccccccgagcagggcaagatcttcatcgccagaagaagcctgctggacgagctgctggaggtggaccacatcagaaccatctaccacatgttcatcgccctgctgatcctgttcatcctgagcaccctggtggtggactacatcgacgagggcagactggtgctggagttcagcctgctgagctacgccttcggcaagttccccaccgtggtgtggacctggtggatcatgttcctgagcaccttcagcgtgccctacttcctgttccagcactgggccaccggctacagcaagagcagccaccccctgatcagaagcctgttccacggcttcctgttcatgatcttccagatcggcgtgctgggcttcggccccacctacgtggtgctggcctacaccctgccccccgccagcagattcatcatcatcttcgagcagatcagattcgtgatgaaggcccacagcttcgtgagagagaacgtgcccagagtgctgaacagcgccaaggagaagagcagcaccgtgcccatccccaccgtgaaccagtacctgtacttcctgttcgcccccaccctgatctacagagacagctaccccagaaaccccaccgtgagatggggctacgtggccatgaagttcgcccaggtgttcggctgcttcttctacgtgtactacatcttcgagagactgtgcgcccccctgttcagaaacatcaagcaggagcccttcagcgccagagtgctggtgctgtgcgtgttcaacagcatcctgcccggcgtgctgatcctgttcctgaccttcttcgccttcctgcactgctggctgaacgccttcgccgagatgctgagattcggcgacagaatgttctacaaggactggtggaacagcaccagctacagcaactactacagaacctggaacgtggtggtgcacgactggctgtactactacgcctacaaggacttcctgtggttcttcagcaagagattcaagagcgccgccatgctggccgtgttcgccgtgagcgccgtggtgcacgagtacgccctggccgtgtgcctgagcttcttctaccccgtgctgttcgtgctgttcatgttcttcggcatggccttcaacttcatcgtgaacgacagcagaaagaagcccatctggaacgtgctgatgtggaccagcctgttcctgggcaacggcgtgctgctgtgcttctacagccaggagtggtacgccagacagcactgccccctgaagaaccccaccttcctggactacgtgagacccagaagctggacctgcagatacgtgttctag

SEQ ID NO: 101015 - DNA, 1569 bp, synthetic construct
  misc_feature 1..1569: note = Description of Artificial Sequence: Synthetic coding sequence
  source 1..1569: mol_type = other DNA
atggagcccggcggcgccagactgagactgcagagaaccgagggcctgggcggcgagagagagagacagccctgcggcgacggcaacaccgagacccacagagcccccgacctggtgcagtggaccagacacatggaggccgtgaaggcccagctgctggagcaggcccagggccagctgagagagctgctggacagagccatgagagaggccatccagagctaccccagccaggacaagcccctgcccccccccccccccggcagcctgagcagaacccaggagcccagcctgggcaagcagaaggtgttcatcatcagaaagagcctgctggacgagctgatggaggtgcagcacttcagaaccatctaccacatgttcatcgccggcctgtgcgtgttcatcatcagcaccctggccatcgacttcatcgacgagggcagactgctgctggagttcgacctgctgatcttcagcttcggccagctgcccctggccctggtgacctgggtgcccatgttcctgagcaccctgctggccccctaccaggccctgagactgtgggccagaggcacctggacccaggccaccggcctgggctgcgccctgctggccgcccacgccgtggtgctgtgcgccctgcccgtgcacgtggccgtggagcaccagctgccccccgccagcagatgcgtgctggtgttcgagcaggtgagattcctgatgaagagctacagcttcctgagagaggccgtgcccggcaccctgagagccagaagaggcgagggcatccaggcccccagcttcagcagctacctgtacttcctgttctgccccaccctgatctacagagagacctaccccagaaccccctacgtgagatggaactacgtggccaagaacttcgcccaggccctgggctgcgtgctgtacgcctgcttcatcctgggcagactgtgcgtgcccgtgttcgccaacatgagcagagagcccttcagcaccagagccctggtgctgagcatcctgcacgccaccctgcccggcatcttcatgctgctgctgatcttcttcgccttcctgcactgctggctgaacgccttcgccgagatgctgagattcggcgacagaatgttctacagagactggtggaacagcaccagcttcagcaactactacagaacctggaacgtggtggtgcacgactggctgtacagctacgtgtaccaggacggcctgagactgctgggcgccagagccagaggcgtggccatgctgggcgtgttcctggtgagcgccgtggcccacgagtacatcttctgcttcgtgctgggcttcttctaccccgtgatgctgatcctgttcctggtgatcggcggcatgctgaacttcatgatgcacgaccagagaaccggccccgcctggaacgtgctgatgtggaccatgctgttcctgggccagggcatccaggtgagcctgtactgccaggagtggtacgccagaagacactgccccctgccccaggccaccttctggggcctggtgacccccagaagctggagctgccacacctag

SEQ ID NO: 101016 - DNA, 3426 bp, synthetic construct
  misc_feature 1..3426: note = Description of Artificial Sequence: Synthetic coding sequence
  source 1..3426: mol_type = other DNA
atggacgacagcggcgagctgggcggcctggagaccatggagaccctgaccgagctgggcgacgagctgaccctgggcgacatcgacgagatgctgcagttcgtgagcaaccaggtgggcgagttccccgacctgttcagcgagcagctgtgcagcagcttccccggcagcggcggcagcggcagcagcagcggcagcagcggcagcagcagcagcagcagcaacggcagaggcagcagcagcggcgccgtggaccccagcgtgcagagaagcttcacccaggtgaccctgcccagcttcagccccagcgccgccagcccccaggcccccaccctgcaggtgaaggtgagccccaccagcgtgcccaccacccccagagccacccccatcctgcagcccagaccccagccccagccccagccccagacccagctgcagcagcagaccgtgatgatcacccccaccttcagcaccaccccccagaccagaatcatccagcagcccctgatctaccagaacgccgccaccagcttccaggtgctgcagccccaggtgcagagcctggtgaccagcagccaggtgcagcccgtgaccatccagcagcaggtgcagaccgtgcaggcccagagagtgctgacccagaccgccaacggcaccctgcagaccctggcccccgccaccgtgcagaccgtggccgccccccaggtgcagcaggtgcccgtgctggtgcagccccagatcatcaagaccgacagcctggtgctgaccaccctgaagaccgacggcagccccgtgatggccgccgtgcagaaccccgccctgaccgccctgaccacccccatccagaccgccgccctgcaggtgcccaccctggtgggcagcagcggcaccatcctgaccaccatgcccgtgatgatgggccaggagaaggtgcccatcaagcaggtgcccggcggcgtgaagcagctggagccccccaaggagggcgagagaagaaccacccacaacatcatcgagaagagatacagaagcagcatcaacgacaagatcatcgagctgaaggacctggtgatgggcaccgacgccaagatgcacaagagcggcgtgctgagaaaggccatcgactacatcaagtacctgcagcaggtgaaccacaagctgagacaggagaacatggtgctgaagctggccaaccagaagaacaagctgctgaagggcatcgacctgggcagcctggtggacaacgaggtggacctgaagatcgaggacttcaaccagaacgtgctgctgatgagcccccccgccagcgacagcggcagccaggccggcttcagcccctacagcatcgacagcgagcccggcagccccctgctggacgacgccaaggtgaaggacgagcccgacagcccccccgtggccctgggcatggtggacagaagcagaatcctgctgtgcgtgctgaccttcctgtgcctgagcttcaaccccctgaccagcctgctgcagtggggcggcgcccacgacagcgaccagcacccccacagcggcagcggcagaagcgtgctgagcttcgagagcggcagcggcggctggttcgactggatgatgcccaccctgctgctgtggctggtgaacggcgtgatcgtgctgagcgtgttcgtgaagctgctggtgcacggcgagcccgtgatcagaccccacagcagaagcagcgtgaccttctggagacacagaaagcaggccgacctggacctggccagaggcgacttcgccgccgccgccggcaacctgcagacctgcctggccgtgctgggcagagccctgcccaccagcagactggacctggcctgcagcctgagctggaacgtgatcagatacagcctgcagaagctgagactggtgagatggctgctgaagaaggtgttccagtgcagaagagccacccccgccaccgaggccggcttcgaggacgaggccaagaccagcgccagagacgccgccctggcctaccacagactgcaccagctgcacatcaccggcaagctgcccgccggcagcgcctgcagcgacgtgcacatggccctgtgcgccgtgaacctggccgagtgcgccgaggagaagatcccccccagcaccctggtggagatccacctgaccgccgccatgggcctgaagaccagatgcggcggcaagctgggcttcctggccagctacttcctgagcagagcccagagcctgtgcggccccgagcacagcgccgtgcccgacagcctgagatggctgtgccaccccctgggccagaagttcttcatggagagaagctggagcgtgaagagcgccgccaaggagagcctgtactgcgcccagagaaaccccgccgaccccatcgcccaggtgcaccaggccttctgcaagaacctgctggagagagccatcgagagcctggtgaagccccaggccaagaagaaggccggcgaccaggaggaggagagctgcgagttcagcagcgccctggagtacctgaagctgctgcacagcttcgtggacagcgtgggcgtgatgagcccccccctgagcagaagcagcgtgctgaagagcgccctgggccccgacatcatctgcagatggtggaccagcgccatcaccgtggccatcagctggctgcagggcgacgacgccgccgtgagaagccacttcaccaaggtggagagaatccccaaggccctggaggtgaccgagagccccctggtgaaggccatcttccacgcctgcagagccatgcacgccagcctgcccggcaaggccgacggccagcagagcagcttctgccactgcgagagagccagcggccacctgtggagcagcctgaacgtgagcggcgccaccagcgaccccgccctgaaccacgtggtgcagctgctgacctgcgacctgctgctgagcctgagaaccgccctgtggcagaagcaggccagcgccagccaggccgtgggcgagacctaccacgccagcggcgccgagctggccggcttccagagagacctgggcagcctgagaagactggcccacagcttcagacccgcctacagaaaggtgttcctgcacgaggccaccgtgagactgatggccggcgccagccccaccagaacccaccagctgctggagcacagcctgagaagaagaaccacccagagcaccaagcacggcgaggtggacgcctggcccggccagagagagagagccaccgccatcctgctggcctgcagacacctgcccctgagcttcctgagcagccccggccagagagccgtgctgctggccgaggccgccagaaccctggagaaggtgggcgacagaagaagctgcaacgactgccagcagatgatcgtgaagctgggcggcggcaccgccatcgccgccagctag

SEQ ID NO: 101017 - DNA, 2055 bp, synthetic construct
  misc_feature 1..2055: note = Description of Artificial Sequence: Synthetic coding sequence
  source 1..2055: mol_type = other DNA
atggacgacagcggcgagctgggcggcctggagaccatggagaccctgaccgagctgggcgacgagctgaccctgggcgacatcgacgagatgctgcagttcgtgagcaaccaggtgggcgagttccccgacctgttcagcgagcagctgtgcagcagcttccccggcagcggcggcagcggcagcagcagcggcagcagcggcagcagcagcagcagcagcaacggcagaggcagcagcagcggcgccgtggaccccagcgtgcagagaagcttcacccaggtgaccctgcccagcttcagccccagcgccgccagcccccaggcccccaccctgcaggtgaaggtgagccccaccagcgtgcccaccacccccagagccacccccatcctgcagcccagaccccagccccagccccagccccagacccagctgcagcagcagaccgtgatgatcacccccaccttcagcaccaccccccagaccagaatcatccagcagcccctgatctaccagaacgccgccaccagcttccaggtgctgcagccccaggtgcagagcctggtgaccagcagccaggtgcagcccgtgaccatccagcagcaggtgcagaccgtgcaggcccagagagtgctgacccagaccgccaacggcaccctgcagaccctggcccccgccaccgtgcagaccgtggccgccccccaggtgcagcaggtgcccgtgctggtgcagccccagatcatcaagaccgacagcctggtgctgaccaccctgaagaccgacggcagccccgtgatggccgccgtgcagaaccccgccctgaccgccctgaccacccccatccagaccgccgccctgcaggtgcccaccctggtgggcagcagcggcaccatcctgaccaccatgcccgtgatgatgggccaggagaaggtgcccatcaagcaggtgcccggcggcgtgaagcagctggagccccccaaggagggcgagagaagaaccacccacaacatcatcgagaagagatacagaagcagcatcaacgacaagatcatcgagctgaaggacctggtgatgggcaccgacgccaagatgcacaagagcggcgtgctgagaaaggccatcgactacatcaagtacctgcagcaggtgaaccacaagctgagacaggagaacatggtgctgaagctggccaaccagaagaacaagctgctgaagggcatcgacctgggcagcctggtggacaacgaggtggacctgaagatcgaggacttcaaccagaacgtgctgctgatgagcccccccgccagcgacagcggcagccaggccggcttcagcccctacagcatcgacagcgagcccggcagccccctgctggacgacgccaaggtgaaggacgagcccgacagcccccccgtggccctgggcatggtggacagaagcagaatcctgctgtgcgtgctgaccttcctgtgcctgagcttcaaccccctgaccagcctgctgcagtggggcggcgcccacgacagcgaccagcacccccacagcggcagcggcagaagcgtgctgagcttcgagagcggcagcggcggctggttcgactggatgatgcccaccctgctgctgtggctggtgaacggcgtgatcgtgctgagcgtgttcgtgaagctgctggtgcacggcgagcccgtgatcagaccccacagcagaagcagcgtgaccttctggagacacagaaagcaggccgacctggacctggccagaggcgtgtacggcaagaagagcggcgccacccacagcatcgaggaggagctgaacatccacatcagcagaggcaccagaaccagaaccctgctgagcagcagaagattctgcagctgctgcagacagcccaccaacctgcccggcagcttcggccccggcaccgcccacctgccccccggccccggcctgcagcccctgctggagagagaccccctgcagcccgccgaggccacccccggcgccctggccgcccaggagagcctgcccgtgcccgccggccacgccagccactag

SEQ ID NO: 101018 - DNA, 3309 bp, synthetic construct
  misc_feature 1..3309: note = Description of Artificial Sequence: Synthetic coding sequence
  source 1..3309: mol_type = other DNA
atggacgacagcggcgagctgggcggcctggagaccatggagaccctgaccgagctgggcgacgagctgaccctgggcgacatcgacgagatgctgcagttcgtgagcaaccaggtgggcgagttccccgacctgttcagcgagcagctgtgcagcagcttccccggcagcggcggcagcggcagcagcagcggcagcagcggcagcagcagcagcagcagcaacggcagaggcagcagcagcggcgccgtggaccccagcgtgcagagaagcttcacccaggtgaccctgcccagcttcagccccagcgccgccagcccccaggcccccaccctgcaggtgaaggtgagccccaccagcgtgcccaccacccccagagccacccccatcctgcagcccagaccccagccccagccccagccccagacccagctgcagcagcagaccgtgatgatcacccccaccttcagcaccaccccccagaccagaatcatccagcagcccctgatctaccagaacgccgccaccagcttccaggtgctgcagccccaggtgcagagcctggtgaccagcagccaggtgcagcccgtgaccatccagcagcaggtgcagaccgtgcaggcccagagagtgctgacccagaccgccaacggcaccctgcagaccctggcccccgccaccgtgcagaccgtggccgccccccaggtgcagcaggtgcccgtgctggtgcagccccagatcatcaagaccgacagcctggtgctgaccaccctgaagaccgacggcagccccgtgatggccgccgtgcagaaccccgccctgaccgccctgaccacccccatccagaccgccgccctgcaggtgcccaccctggtgggcagcagcggcaccatcctgaccaccatgcccgtgatgatgggccaggagaaggtgcccatcaagcaggtgcccggcggcgtgaagcagctggagccccccaaggagggcgagagaagaaccacccacaacatcatcgagaagagatacagaagcagcatcaacgacaagatcatcgagctgaaggacctggtgatgggcaccgacgccaagatgcacaagagcggcgtgctgagaaaggccatcgactacatcaagtacctgcagcaggtgaaccacaagctgagacaggagaacatggtgctgaagctggccaaccagaagaacaagctgctgaagggcatcgacctgggcagcctggtggacaacgaggtggacctgaagatcgaggacttcaaccagaacgtgctgctgatgagcccccccgccagcgacagcggcagccaggccggcttcagcccctacagcatcgacagcgagcccggcagccccctgctggacgacgccaaggtgaaggacgagcccgacagcccccccgtggccctgggcatggtggacagaagcagaatcctgctgtgcgtgctgaccttcctgtgcctgagcttcaaccccctgaccagcctgctgcagtggggcggcgcccacgacagcgaccagcacccccacagcggcagcggcagaagcgtgctgagcttcgagagcggcagcggcggctggttcgactggatgatgcccaccctgctgctgtggctggtgaacggcgtgatcgtgctgagcgtgttcgtgaagctgctggtgcacggcgagcccgtgatcagaccccacagcagaagcagcgtgaccttctggagacacagaaagcaggccgacctggacctggccagaggcgacttcgccgccgccgccggcaacctgcagacctgcctggccgtgctgggcagagccctgcccaccagcagactggacctggcctgcagcctgagctggaacgtgatcagatacagcctgcagaagctgagactggtgagatggctgctgaagaaggtgttccagtgcagaagagccacccccgccaccgaggccggcttcgaggacgaggccaagaccagcgccagagacgccgccctggcctaccacagactgcaccagctgcacatcaccggcaagctgcccgccggcagcgcctgcagcgacgtgcacatggccctgtgcgccgtgaacctggccgagtgcgccgaggagaagatcccccccagcaccctggtggagatccacctgaccgccgccatgggcctgaagaccagatgcggcggcaagctgggcttcctggccagctacttcctgagcagagcccagagcctgtgcggccccgagcacagcgccgtgcccgacagcctgagatggctgtgccaccccctgggccagaagttcttcatggagagaagctggagcgtgaagagcgccgccaaggagagcctgtactgcgcccagagaaaccccgccgaccccatcgcccaggtgcaccaggccttctgcaagaacctgctggagagagccatcgagagcctggtgaagccccaggccaagaagaaggccggcgaccaggaggaggagagctgcgagttcagcagcgccctggagtacctgaagctgctgcacagcttcgtggacagcgtgggcgtgatgagcccccccctgagcagaagcagcgtgctgaagagcgccctgggccccgacatcatctgcagatggtggaccagcgccatcaccgtggccatcagctggctgcagggcgacgacgccgccgtgagaagccacttcaccaaggtggagagaatccccaaggccctggaggtgaccgagagccccctggtgaaggccatcttccacgcctgcagagccatgcacgccagcctgcccggcaaggccgacggccagcagagcagcttctgccactgcgagagagccagcggccacctgtggagcagcctgaacgtgagcggcgccaccagcgaccccgccctgaaccacgtggtgcagctgctgacctgcgacctgctgctgagcctgagaaccgccctgtggcagaagcaggccagcgccagccaggccgtgggcgagacctaccacgccagcggcgccgagctggccggcttccagagagacctgggcagcctgagaagactggcccacagcttcagacccgcctacagaaaggtgttcctgcacgaggccaccgtgagactgatggccggcgccagccccaccagaacccaccagctgctggagcacagcctgagaagaagaaccacccagagcaccaagcacggcgaggtggacgcctggcccggccagagagagagagccaccgccatcctgctggcctgcagacacctgcccctgagcttcctgccctgcctgcagcccagctag

SEQ ID NO: 101019 - DNA, 648 bp, synthetic construct
  misc_feature 1..648: note = Description of Artificial Sequence: Synthetic coding sequence
  source 1..648: mol_type = other DNA
atgcacgccagcctgcccggcaaggccgacggccagcagagcagcttctgccactgcgagagagccagcggccacctgtggagcagcctgaacgtgagcggcgccaccagcgaccccgccctgaaccacgtggtgcagctgctgacctgcgacctgctgctgagcctgagaaccgccctgtggcagaagcaggccagcgccagccaggccgtgggcgagacctaccacgccagcggcgccgagctggccggcttccagagagacctgggcagcctgagaagactggcccacagcttcagacccgcctacagaaaggtgttcctgcacgaggccaccgtgagactgatggccggcgccagccccaccagaacccaccagctgctggagcacagcctgagaagaagaaccacccagagcaccaagcacggcgaggtggacgcctggcccggccagagagagagagccaccgccatcctgctggcctgcagacacctgcccctgagcttcctgagcagccccggccagagagccgtgctgctggccgaggccgccagaaccctggagaaggtgggcgacagaagaagctgcaacgactgccagcagatgatcgtgaagctgggcggcggcaccgccatcgccgccagctag

SEQ ID NO: 101020 - DNA, 900 bp, synthetic construct
  misc_feature 1..900: note = Description of Artificial Sequence: Synthetic coding sequence
  source 1..900: mol_type = other DNA
atggacctggtgctgagagtggccgactactacttcttcaccccctacgtgtaccccgccacctggcccgaggacgacatcttcagacaggccatcagcctgctgatcgtgaccaacgtgggcgcctacatcctgtacttcttctgcgccaccctgagctactacttcgtgttcgaccacgccctgatgaagcacccccagttcctgaagaaccaggtgagaagagagatcaagttcaccgtgcaggccctgccctggatcagcatcctgaccgtggccctgttcctgctggagatcagaggctacagcaagctgcacgacgacctgggcgagttcccctacggcctgttcgagctggtggtgagcatcatcagcttcctgttcttcaccgacatgttcatctactggatccacagaggcctgcaccacagactggtgtacaagagactgcacaagccccaccacatctggaagatccccacccccttcgccagccacgccttccaccccatcgacggcttcctgcagagcctgccctaccacatctaccccttcatcttccccctgcacaaggtggtgtacctgagcctgtacatcctggtgaacatctggaccatcagcatccacgacggcgacttcagagtgccccagatcctgcagcccttcatcaacggcagcgcccaccacaccgaccaccacatgttcttcgactacaactacggccagtacttcaccctgtgggacagaatcggcggcagcttcaagaaccccagcagcttcgagggcaagggccccctgagctacgtgaaggagatgaccgagggcaagagaagcagccacagcggcaacggctgcaagaacgagaagctgttcaacggcgagttcaccaagaccgagtag

SEQ ID NO: 101021 - DNA, 900 bp, synthetic construct; identical to SEQ ID NO: 101020
  misc_feature 1..900: note = Description of Artificial Sequence: Synthetic coding sequence
  source 1..900: mol_type = other DNA

SEQ ID NO: 101022 - DNA, 192 bp, synthetic construct
  misc_feature 1..192: note = Description of Artificial Sequence: Synthetic coding sequence
  source 1..192: mol_type = other DNA
atggagggcgccggcgccggcagcggcttcagaaaggagctggtgagcagactgctgcacctgcacttcaaggacgacaagaccaaggaggccgccgtgagaggcgtgagacaggcccaggccgaggacgccctgagagtggacgtggaccagctggagaaggtgctgccccagctgctgctggacttctag

SEQ ID NO: 101023 - DNA, 246 bp, synthetic construct
  misc_feature 1..246: note = Description of Artificial Sequence: Synthetic coding sequence
  source 1..246: mol_type = other DNA
atggagggcgccggcgccggcagcggcttcagaaaggagctggtgagcagactgctgcacctgcacttcaaggacgacaagaccaaggtgagcggcgacgccctgcagctgatggtggagctgctgaaggtgttcgtggtggaggccgccgtgagaggcgtgagacaggcccaggccgaggacgccctgagagtggacgtggaccagctggagaaggtgctgccccagctgctgctggacttctag

SEQ ID NO: 101024 - DNA, 2121 bp, synthetic construct
  misc_feature 1..2121: note = Description of Artificial Sequence: Synthetic coding sequence
  source 1..2121: mol_type = other DNA
atgggcggcaagggcggcggcgacaccagaggccccgtgctgttcccctgccagctggcccaggccctgagccccagaagagccttccccagagagctgaaggagaagggccagagaatgagcagccagcccgccggcaaccagaccagccccggcgccaccgaggactacagctacggcagctggtacatcgacgagccccagggcggcgaggagctgcagcccgagggcgaggtgcccagctgccacaccagcatcccccccggcctgtaccacgcctgcctggccagcctgagcatcctggtgctgctgctgctggccatgctggtgagaagaagacagctgtggcccgactgcgtgagaggcagacccggcctgcccagccccgtggacttcctggccggcgacagacccagagccgtgcccgccgccgtgttcatggtgctgctgagcagcctgtgcctgctgctgcccgacgaggacgccctgcccttcctgaccctggccagcgcccccagccaggacggcaagaccgaggcccccagaggcgcctggaagatcctgggcctgttctactacgccgccctgtactaccccctggccgcctgcgccaccgccggccacaccgccgcccacctgctgggcagcaccctgagctgggcccacctgggcgtgcaggtgtggcagagagccgagtgcccccaggtgcccaagatctacaagtactacagcctgctggccagcctgcccctgctgctgggcctgggcttcctgagcctgtggtaccccgtgcagctggtgagaagcttcagcagaagaaccggcgccggcagcaagggcctgcagagcagctacagcgaggagtacctgagaaacctgctgtgcagaaagaagctgggcagcagctaccacaccagcaagcacggcttcctgagctgggccagagtgtgcctgagacactgcatctacaccccccagcccggcttccacctgcccctgaagctggtgctgagcgccaccctgaccggcaccgccatctaccaggtggccctgctgctgctggtgggcgtggtgcccaccatccagaaggtgagagccggcgtgaccaccgacgtgagctacctgctggccggcttcggcatcgtgctgagcgaggacaagcaggaggtggtggagctggtgaagcaccacctgtgggccctggaggtgtgctacatcagcgccctggtgctgagctgcctgctgaccttcctggtgctgatgagaagcctggtgacccacagaaccaacctgagagccctgcacagaggcgccgccctggacctgagccccctgcacagaagcccccaccccagcagacaggccatcttctgctggatgagcttcagcgcctaccagaccgccttcatctgcctgggcctgctggtgcagcagatcatcttcttcctgggcaccaccgccctggccttcctggtgctgatgcccgtgctgcacggcagaaacctgctgctgttcagaagcctggagagcagctggcccttctggctgaccctggccctggccgtgatcctgcagaacatggccgcccactgggtgttcctggagacccacgacggccacccccagctgaccaacagaagagtgctgtacgccgccaccttcctgctgttccccctgaacgtgctggtgggcgccatggtggccacctggagagtgctgctgagcgccctgtacaacgccatccacctgggccagatggacctgagcctgctgccccccagagccgccaccctggaccccggctactacacctacagaaacttcctgaagatcgaggtgagccagagccaccccgccatgaccgccttctgcagcctgctgctgcaggcccagagcctgctgcccagaaccatggccgccccccaggacagcctgagacccggcgaggaggacgagggcatgcagctgctgcagaccaaggacagcatggccaagggcgccagacccggcgccagcagaggcagagccagatggggcctggcctacaccctgctgcacaaccccaccctgcaggtgttcagaaagaccgccctgctgggcgccaacggcgcccagccctag

SEQ ID NO: 101025 - DNA, 2004 bp, synthetic construct
  misc_feature 1..2004: note = Description of Artificial Sequence: Synthetic coding sequence
  source 1..2004: mol_type = other DNA
atgagcagccagcccgccggcaaccagaccagccccggcgccaccgaggactacagctacggcagctggtacatcgacgagccccagggcggcgaggagctgcagcccgagggcgaggtgcccagctgccacaccagcatcccccccggcctgtaccacgcctgcctggccagcctgagcatcctggtgctgctgctgctggccatgctggtgagaagaagacagctgtggcccgactgcgtgagaggcagacccggcctgcccagccccgtggacttcctggccggcgacagacccagagccgtgcccgccgccgtgttcatggtgctgctgagcagcctgtgcctgctgctgcccgacgaggacgccctgcccttcctgaccctggccagcgcccccagccaggacggcaagaccgaggcccccagaggcgcctggaagatcctgggcctgttctactacgccgccctgtactaccccctggccgcctgcgccaccgccggccacaccgccgcccacctgctgggcagcaccctgagctgggcccacctgggcgtgcaggtgtggcagagagccgagtgcccccaggtgcccaagatctacaagtactacagcctgctggccagcctgcccctgctgctgggcctgggcttcctgagcctgtggtaccccgtgcagctggtgagaagcttcagcagaagaaccggcgccggcagcaagggcctgcagagcagctacagcgaggagtacctgagaaacctgctgtgcagaaagaagctgggcagcagctaccacaccagcaagcacggcttcctgagctgggccagagtgtgcctgagacactgcatctacaccccccagcccggcttccacctgcccctgaagctggtgctgagcgccaccctgaccggcaccgccatctaccaggtggccctgctgctgctggtgggcgtggtgcccaccatccagaaggtgagagccggcgtgaccaccgacgtgagctacctgctggccggcttcggcatcgtgctgagcgaggacaagcaggaggtggtggagctggtgaagcaccacctgtgggccctggaggtgtgctacatcagcgccctggtgctgagctgcctgctgaccttcctggtgctgatgagaagcctggtgacccacagaaccaacctgagagccctgcacagaggcgccgccctggacctgagccccctgcacagaagcccccaccccagcagacaggccatcttctgctggatgagcttcagcgcctaccagaccgccttcatctgcctgggcctgctggtgcagcagatcatcttcttcctgggcaccaccgccctggccttcctggtgctgatgcccgtgctgcacggcagaaacctgctgctgttcagaagcctggagagcagctggcccttctggctgaccctggccctggccgtgatcctgcagaacatggccgcccactgggtgttcctggagacccacgacggccacccccagctgaccaacagaagagtgctgtacgccgccaccttcctgctgttccccctgaacgtgctggtgggcgccatggtggccacctggagagtgctgctgagcgccctgtacaacgccatccacctgggccagatggacctgagcctgctgccccccagagccgccaccctggaccccggctactacacctacagaaacttcctgaagatcgaggtgagccagagccaccccgccatgaccgccttctgcagcctgctgctgcaggcccagagcctgctgcccagaaccatggccgccccccaggacagcctgagacccggcgaggaggacgagggcatgcagctgctgcagaccaaggacagcatggccaagggcgccagacccggcgccagcagaggcagagccagatggggcctggcctacaccctgctgcacaaccccaccctgcaggtgttcagaaagaccgccctgctgggcgccaacggcgcccagccctag

SEQ ID NO: 101026 - DNA, 2004 bp, synthetic construct; identical to SEQ ID NO: 101025
  misc_feature 1..2004: note = Description of Artificial Sequence: Synthetic coding sequence
  source 1..2004: mol_type = other DNA

SEQ ID NO: 101027 - DNA, 1800 bp, synthetic construct
  misc_feature 1..1800: note = Description of Artificial Sequence: Synthetic coding sequence
  source 1..1800: mol_type = other DNA
atgctggtgagaagaagacagctgtggcccgactgcgtgagaggcagacccggcctgcccagccccgtggacttcctggccggcgacagacccagagccgtgcccgccgccgtgttcatggtgctgctgagcagcctgtgcctgctgctgcccgacgaggacgccctgcccttcctgaccctggccagcgcccccagccaggacggcaagaccgaggcccccagaggcgcctggaagatcctgggcctgttctactacgccgccctgtactaccccctggccgcctgcgccaccgccggccacaccgccgcccacctgctgggcagcaccctgagctgggcccacctgggcgtgcaggtgtggcagagagccgagtgcccccaggtgcccaagatctacaagtactacagcctgctggccagcctgcccctgctgctgggcctgggcttcctgagcctgtggtaccccgtgcagctggtgagaagcttcagcagaagaaccggcgccggcagcaagggcctgcagagcagctacagcgaggagtacctgagaaacctgctgtgcagaaagaagctgggcagcagctaccacaccagcaagcacggcttcctgagctgggccagagtgtgcctgagacactgcatctacaccccccagcccggcttccacctgcccctgaagctggtgctgagcgccaccctgaccggcaccgccatctaccaggtggccctgctgctgctggtgggcgtggtgcccaccatccagaaggtgagagccggcgtgaccaccgacgtgagctacctgctggccggcttcggcatcgtgctgagcgaggacaagcaggaggtggtggagctggtgaagcaccacctgtgggccctggaggtgtgctacatcagcgccctggtgctgagctgcctgctgaccttcctggtgctgatgagaagcctggtgacccacagaaccaacctgagagccctgcacagaggcgccgccctggacctgagccccctgcacagaagcccccaccccagcagacaggccatcttctgctggatgagcttcagcgcctaccagaccgccttcatctgcctgggcctgctggtgcagcagatcatcttcttcctgggcaccaccgccctggccttcctggtgctgatgcccgtgctgcacggcagaaacctgctgctgttcagaagcctggagagcagctggcccttctggctgaccctggccctggccgtgatcctgcagaacatggccgcccactgggtgttcctggagacccacgacggccacccccagctgaccaacagaagagtgctgtacgccgccaccttcctgctgttccccctgaacgtgctggtgggcgccatggtggccacctggagagtgctgctgagcgccctgtacaacgccatccacctgggccagatggacctgagcctgctgccccccagagccgccaccctggaccccggctactacacctacagaaacttcctgaagatcgaggtgagccagagccaccccgccatgaccgccttctgcagcctgctgctgcaggcccagagcctgctgcccagaaccatggccgccccccaggacagcctgagacccggcgaggaggacgagggcatgcagctgctgcagaccaaggacagcatggccaagggcgccagacccggcgccagcagaggcagagccagatggggcctggcctacaccctgctgcacaaccccaccctgcaggtgttcagaaagaccgccctgctgggcgccaacggcgcccagccctag

SEQ ID NO: 101028 - DNA, 1977 bp, synthetic construct
  misc_feature 1..1977: note = Description of Artificial Sequence: Synthetic coding sequence
  source 1..1977: mol_type = other DNA
atgagcagccagcccgccggcaaccagaccagccccggcgccaccgaggactacagctacggcagctggtacatcgacgagccccagggcggcgaggagctgcagcccgagggcgaggtgcccagctgccacaccagcatcccccccggcctgtaccacgcctgcctggccagcctgagcatcctggtgctgctgctgctggccatgctggtgagaagaagacagctgtggcccgactgcgtgagaggcagacccggcctgcccagacccagagccgtgcccgccgccgtgttcatggtgctgctgagcagcctgtgcctgctgctgcccgacgaggacgccctgcccttcctgaccctggccagcgcccccagccaggacggcaagaccgaggcccccagaggcgcctggaagatcctgggcctgttctactacgccgccctgtactaccccctggccgcctgcgccaccgccggccacaccgccgcccacctgctgggcagcaccctgagctgggcccacctgggcgtgcaggtgtggcagagagccgagtgcccccaggtgcccaagatctacaagtactacagcctgctggccagcctgcccctgctgctgggcctgggcttcctgagcctgtggtaccccgtgcagctggtgagaagcttcagcagaagaaccggcgccggcagcaagggcctgcagagcagctacagcgaggagtacctgagaaacctgctgtgcagaaagaagctgggcagcagctaccacaccagcaagcacggcttcctgagctgggccagagtgtgcctgagacactgcatctacaccccccagcccggcttccacctgcccctgaagctggtgctgagcgccaccctgaccggcaccgccatctaccaggtggccctgctgctgctggtgggcgtggtgcccaccatccagaaggtgagagccggcgtgaccaccgacgtgagctacctgctggccggcttcggcatcgtgctgagcgaggacaagcaggaggtggtggagctggtgaagcaccacctgtgggccctggaggtgtgctacatcagcgccctggtgctgagctgcctgctgaccttcctggtgctgatgagaagcctggtgacccacagaaccaacctgagagccctgcacagaggcgccgccctggacctgagccccctgcacagaagcccccaccccagcagacaggccatcttctgctggatgagcttcagcgcctaccagaccgccttcatctgcctgggcctgctggtgcagcagatcatcttcttcctgggcaccaccgccctggccttcctggtgctgatgcccgtgctgcacggcagaaacctgctgctgttcagaagcctggagagcagctggcccttctggctgaccctggccctggccgtgatcctgcagaacatggccgcccactgggtgttcctggagacccacgacggccacccccagctgaccaacagaagagtgctgtacgccgccaccttcctgctgttccccctgaacgtgctggtgggcgccatggtggccacctggagagtgctgctgagcgccctgtacaacgccatccacctgggccagatggacctgagcctgctgccccccagagccgccaccctggaccccggctactacacctacagaaacttcctgaagatcgaggtgagccagagccaccccgccatgaccgccttctgcagcctgctgctgcaggcccagagcctgctgcccagaaccatggccgccccccaggacagcctgagacccggcgaggaggacgagggcatgcagctgctgcagaccaaggacagcatggccaagggcgccagacccggcgccagcagaggcagagccagatggggcctggcctacaccctgctgcacaaccccaccctgcaggtgttcagaaagaccgccctgctgggcgccaacggcgcccagccctag

SEQ ID NO: 101029 - DNA, 480 bp, synthetic construct
  misc_feature 1..480: note = Description of Artificial Sequence: Synthetic coding sequence
  source 1..480: mol_type = other DNA
atgagcagccagcccgccggcaaccagaccagccccggcgccaccgaggactacagctacggcagctggtacatcgacgagccccagggcggcgaggagctgcagcccgagggcgaggtgcccagctgccacaccagcatcccccccggcctgtaccacgcctgcctggccagcctgagcatcctggtgctgctgctgctggccatgctggtgagaagaagacagctgtggcccgactgcgtgagaggcagacccggcctgcccagccccgtggacttcctggccggcgacagacccagagccgtgcccgccgccgtgttcatggtgctgctgagcagcctgtgcctgctgctgcccgacgaggacgccctgcccttcctgaccctggccagcgcccccagccaggacggcaagaccgaggcccccagaggcaacctgcccaagatcaccgagctgagactggtgagagcctggatctag

SEQ ID NO: 101030 - DNA, 2121 bp, synthetic construct; identical to SEQ ID NO: 101024
  misc_feature 1..2121: note = Description of Artificial Sequence: Synthetic coding sequence
  source 1..2121: mol_type = other DNA

SEQ ID NO: 101031 - DNA, 2115 bp, synthetic construct
  misc_feature 1..2115: note = Description of Artificial Sequence: Synthetic coding sequence
  source 1..2115: mol_type = other DNA
atgcagatcagactgctgagagccgagctggtggtgcccctgtggcagttcatcagacagtggccccccggcagcgacggctggggccagatggaggagaagggccagagaatgagcagccagcccgccggcaaccagaccagccccggcgccaccgaggactacagctacggcagctggtacatcgacgagccccagggcggcgaggagctgcagcccgagggcgaggtgcccagctgccacaccagcatcccccccggcctgtaccacgcctgcctggccagcctgagcatcctggtgctgctgctgctggccatgctggtgagaagaagacagctgtggcccgactgcgtgagaggcagacccggcctgcccagccccgtggacttcctggccggcgacagacccagagccgtgcccgccgccgtgttcatggtgctgctgagcagcctgtgcctgctgctgcccgacgaggacgccctgcccttcctgaccctggccagcgcccccagccaggacggcaagaccgaggcccccagaggcgcctggaagatcctgggcctgttctactacgccgccctgtactaccccctggccgcctgcgccaccgccggccacaccgccgcccacctgctgggcagcaccctgagctgggcccacctgggcgtgcaggtgtggcagagagccgagtgcccccaggtgcccaagatctacaagtactacagcctgctggccagcctgcccctgctgctgggcctgggcttcctgagcctgtggtaccccgtgcagctggtgagaagcttcagcagaagaaccggcgccggcagcaagggcctgcagagcagctacagcgaggagtacctgagaaacctgctgtgcagaaagaagctgggcagcagctaccacaccagcaagcacggcttcctgagctgggccagagtgtgcctgagacactgcatctacaccccccagcccggcttccacctgcccctgaagctggtgctgagcgccaccctgaccggcaccgccatctaccaggtggccctgctgctgctggtgggcgtggtgcccaccatccagaaggtgagagccggcgtgaccaccgacgtgagctacctgctggccggcttcggcatcgtgctgagcgaggacaagcaggaggtggtggagctggtgaagcaccacctgtgggccctggaggtgtgctacatcagcgccctggtgctgagctgcctgctgaccttcctggtgctgatgagaagcctggtgacccacagaaccaacctgagagccctgcacagaggcgccgccctggacctgagccccctgcacagaagcccccaccccagcagacaggccatcttctgctggatgagcttcagcgcctaccagaccgccttcatctgcctgggcctgctggtgcagcagatcatcttcttcctgggcaccaccgccctggccttcctggtgctgatgcccgtgctgcacggcagaaacctgctgctgttcagaagcctggagagcagctggcccttctggctgaccctggccctggccgtgatcctgcagaacatggccgcccactgggtgttcctggagacccacgacggccacccccagctgaccaacagaagagtgctgtacgccgccaccttcctgctgttccccctgaacgtgctggtgggcgccatggtggccacctggagagtgctgctgagcgccctgtacaacgccatccacctgggccagatggacctgagcctgctgccccccagagccgccaccctggaccccggctactacacctacagaaacttcctgaagatcgaggtgagccagagccaccccgccatgaccgccttctgcagcctgctgctgcaggcccagagcctgctgcccagaaccatggccgccccccaggacagcctgagacccggcgaggaggacgagggcatgcagctgctgcagaccaaggacagcatggccaagggcgccagacccggcgccagcagaggcagagccagatggggcctggcctacaccctgctgcacaaccccaccctgcaggtgttcagaaagaccgccctgctgggcgccaacggcgcccagccctag

SEQ ID NO: 101032 - DNA, 1674 bp, synthetic construct
  misc_feature 1..1674: note = Description of Artificial Sequence: Synthetic coding sequence
  source 1..1674: mol_type = other DNA
atggccgccggcaccagcatgagccccgacgaggacgccctgcccttcctgaccctggccagcgcccccagccaggacggcaagaccgaggcccccagaggcgcctggaagatcctgggcctgttctactacgccgccctgtactaccccctggccgcctgcgccaccgccggccacaccgccgcccacctgctgggcagcaccctgagctgggcccacctgggcgtgcaggtgtggcagagagccgagtgcccccaggtgcccaagatctacaagtactacagcctgctggccagcctgcccctgctgctgggcctgggcttcctgagcctgtggtaccccgtgcagctggtgagaagcttcagcagaagaaccggcgccggcagcaagggcctgcagagcagctacagcgaggagtacctgagaaacctgctgtgcagaaagaagctgggcagcagctaccacaccagcaagcacggcttcctgagctgggccagagtgtgcctgagacactgcatctacaccccccagcccggcttccacctgcccctgaagctggtgctgagcgccaccctgaccggcaccgccatctaccaggtggccctgctgctgctggtgggcgtggtgcccaccatccagaaggtgagagccggcgtgaccaccgacgtgagctacctgctggccggcttcggcatcgtgctgagcgaggacaagcaggaggtggtggagctggtgaagcaccacctgtgggccctggaggtgtgctacatcagcgccctggtgctgagctgcctgctgaccttcctggtgctgatgagaagcctggtgacccacagaaccaacctgagagccctgcacagaggcgccgccctggacctgagccccctgcacagaagcccccaccccagcagacaggccatcttctgctggatgagcttcagcgcctaccagaccgccttcatctgcctgggcctgctggtgcagcagatcatcttcttcctgggcaccaccgccctggccttcctggtgctgatgcccgtgctgcacggcagaaacctgctgctgttcagaagcctggagagcagctggcccttctggctgaccctggccctggccgtgatcctgcagaacatggccgcccactgggtgttcctggagacccacgacggccacccccagctgaccaacagaagagtgctgtacgccgccaccttcctgctgttccccctgaacgtgctggtgggcgccatggtggccacctggagagtgctgctgagcgccctgtacaacgccatccacctgggccagatggacctgagcctgctgccccccagagccgccaccctggaccccggctactacacctacagaaacttcctgaagatcgaggtgagccagagccaccccgccatgaccgccttctgcagcctgctgctgcaggcccagagcctgctgcccagaaccatggccgccccccaggacagcctgagacccggcgaggaggacgagggcatgcagctgctgcagaccaaggacagcatggccaagggcgccagacccggcgccagcagaggcagagccagatggggcctggcctacaccctgctgcacaaccccaccctgcaggtgttcagaaagaccgccctgctgggcgccaacggcgcccagccctag

SEQ ID NO: 101033 - DNA, 1431 bp, synthetic construct
  misc_feature 1..1431: note = Description of Artificial Sequence: Synthetic coding sequence
  source 1..1431: mol_type = other DNA
atgggcaagctgagactgcaggagatctacaagtactacagcctgctggccagcctgcccctgctgctgggcctgggcttcctgagcctgtggtaccccgtgcagctggtgagaagcttcagcagaagaaccggcgccggcagcaagggcctgcagagcagctacagcgaggagtacctgagaaacctgctgtgcagaaagaagctgggcagcagctaccacaccagcaagcacggcttcctgagctgggccagagtgtgcctgagacactgcatctacaccccccagcccggcttccacctgcccctgaagctggtgctgagcgccaccctgaccggcaccgccatctaccaggtggccctgctgctgctggtgggcgtggtgcccaccatccagaaggtgagagccggcgtgaccaccgacgtgagctacctgctggccggcttcggcatcgtgctgagcgaggacaagcaggaggtggtggagctggtgaagcaccacctgtgggccctggaggtgtgctacatcagcgccctggtgctgagctgcctgctgaccttcctggtgctgatgagaagcctggtgacccacagaaccaacctgagagccctgcacagaggcgccgccctggacctgagccccctgcacagaagcccccaccccagcagacaggccatcttctgctggatgagcttcagcgcctaccagaccgccttcatctgcctgggcctgctggtgcagcagatcatcttcttcctgggcaccaccgccctggccttcctggtgctgatgcccgtgctgcacggcagaaacctgctgctgttcagaagcctggagagcagctggcccttctggctgaccctggccctggccgtgatcctgcagaacatggccgcccactgggtgttcctggagacccacgacggccacccccagctgaccaacagaagagtgctgtacgccgccaccttcctgctgttccccctgaacgtgctggtgggcgccatggtggccacctggagagtgctgctgagcgccctgtacaacgccatccacctgggccagatggacctgagcctgctgccccccagagccgccaccctggaccccggctactacacctacagaaacttcctgaagatcgaggtgagccagagccaccccgccatgaccgccttctgcagcctgctgctgcaggcccagagcctgctgcccagaaccatggccgccccccaggacagcctgagacccggcgaggaggacgagggcatgcagctgctgcagaccaaggacagcatggccaagggcgccagacccggcgccagcagaggcagagccagatggggcctggcctacaccctgctgcacaaccccaccctgcaggtgttcagaaagaccgccctgctgggcgccaacggcgcccagccctag

SEQ ID NO: 101034 - DNA, 993 bp, synthetic construct
  misc_feature 1..993: note = Description of Artificial Sequence: Synthetic coding sequence
  source 1..993: mol_type = other DNA
atgggcaagatcgacgtggacaagatcctgttcttcaaccaggagatcagactgtggcagctgatcatggccacccccgaggagaacagcaacccccacgacagagccaccccccagctgcccgcccagctgcaggagctggagcacagagtggccagaagaagactgagccaggccagacacagagccaccctggccgccctgttcaacaacctgagaaagaccgtgtacagccagagcgacctgatcgccagcaagtggcaggtgctgaacaaggccaagagccacatccccgagctggagcagaccctggacaacctgctgaagctgaaggccagcttcaacctggaggacggccacgccagcagcctggaggaggtgaagaaggagtacgccagcatgtacagcggcaacgacagcttcccccagaacggcagcagcccctggtacctgaacttctacaagcagaccatggacctgctgaccggcagcggcatcatcaccccccaggaggccgccctgcccatcgtgagcgccgccatcagccacctgtggcagaacctgagcgaggagagaaaggccagcctgagacaggcctgggcccagaagcacagaggccccgccaccctggccgaggcctgcagagagcccgcctgcgccgagggcagcgtgaaggacagcggcgtggacagccagggcgccagctgcagcctggtgagcacccccgaggagatcctgttcgaggacgccttcgacgtggccagcttcctggacaagagcgaggtgcccagcaccagcagcagcagcagcgtgctggccagctgcaaccccgagaaccccgaggagaagttccagctgtacatgcagatcatcaacttcttcaagggcctgagctgcgccaacacccaggtgaagcaggaggccagcttccccgtggacgaggagatgatcatgctgcagtgcaccgagaccttcgacgacgaggacctgtag

SEQ ID NO: 101035 - DNA, 882 bp, synthetic construct
  misc_feature 1..882: note = Description of Artificial Sequence: Synthetic coding sequence
  source 1..882: mol_type = other DNA
atgggcttccccgccgccgccctgctgtgcgccctgtgctgcggcctgctggcccccgccgccagagccggctacagcgaggagagatgcagctggagaggcagcggcctgacccaggagcccggcagcgtgggccagctggccctggcctgcgccgagggcgccgtggagtggctgtaccccgccggcgccctgagactgaccctgggcggccccgaccccagagccagacccggcatcgcctgcctgagacccgtgagacccttcgccggcgcccaggtgttcgccgagagagccggcggcgccctggagctgctgctggccgagggccccggccccgccggcggcagatgcgtgagatggggccccagagagagaagagccctgttcctgcaggccaccccccaccaggacatcagcagaagagtggccgccttcagattcgagctgagagaggacggcagacccgagctgcccccccaggcccacggcctgggcgtggacggcgcctgcagaccctgcagcgacgccgagctgctgctggccgcctgcaccagcgacttcgtgatccacggcatcatccacggcgtgacccacgacgtggagctgcaggagagcgtgatcaccgtggtggccgccagagtgctgagacagaccccccccctgttccaggccggcagaagcggcgaccagggcctgaccagcatcagaacccccctgagatgcggcgtgcaccccggccccggcaccttcctgttcatgggctggagcagattcggcgaggccagactgggctgcgcccccagattccaggagttcagaagagcctacgaggccgccagagccgcccacctgcacccctgcgaggtggccctgcactag

SEQ ID NO: 101036 - DNA, 1197 bp, synthetic construct
  misc_feature 1..1197: note = Description of Artificial Sequence: Synthetic coding sequence
  source 1..1197: mol_type = other DNA
atgctgggcagaagcggctacagagccctgcccctgggcgacttcgacagattccagcagagcagcttcggcttcctgggcagccagaagggctgcctgagccccgagagaggcggcgtgggcaccggcgccgacgtgccccagagctggcccagctgcctgtgccacggcctgatcagcttcctgggcttcctgctgctgctggtgaccttccccatcagcggctggttcgccctgaagatcgtgcccacctacgagagaatgatcgtgttcagactgggcagaatcagaaccccccagggccccggcatggtgctgctgctgcccttcatcgacagcttccagagagtggacctgagaaccagagccttcaacgtgcccccctgcaagctggccagcaaggacggcgccgtgctgagcgtgggcgccgacgtgcagttcagaatctgggaccccgtgctgagcgtgatgaccgtgaaggacctgaacaccgccaccagaatgaccgcccagaacgccatgaccaaggccctgctgaagagacccctgagagagatccagatggagaagctgaagatcagcgaccagctgctgctggagatcaacgacgtgaccagagcctggggcctggaggtggacagagtggagctggccgtggaggccgtgctgcagcccccccaggacagccccgccggccccaacctggacagcaccctgcagcagctggccctgcacttcctgggcggcagcatgaacagcatggccggcggcgcccccagccccggccccgccgacaccgtggagatggtgagcgaggtggagccccccgccccccaggtgggcgccagaagcagccccaagcagcccctggccgagggcctgctgaccgccctgcagcccttcctgagcgaggccctggtgagccaggtgggcgcctgctaccagttcaacgtggtgctgcccagcggcacccagagcgcctacttcctggacctgaccaccggcagaggcagagtgggccacggcgtgcccgacggcatccccgacgtggtggtggagatggccgaggccgacctgagagccctgctgtgcagagagctgagacccctgggcgcctacatgagcggcagactgaaggtgaagggcgacctggccatggccatgaagctggaggccgtgctgagagccctgaagtag

SEQ ID NO: 101037 - DNA, 1047 bp, synthetic construct
  misc_feature 1..1047: note = Description of Artificial Sequence: Synthetic coding sequence
  source 1..1047: mol_type = other DNA
atgctgggcagaagcggctacagagccctgcccctgggcgacttcgacagattccagcagagcagcttcggcttcctgggcagccagaagggctgcctgagccccgagagaggcggcgtgggcaccggcgccgacgtgccccagagctggcccagctgcctgtgccacggcctgatcagcttcctgggcttcctgctgctgctggtgaccttccccatcagcggctggttcgccctgaagctggccagcaaggacggcgccgtgctgagcgtgggcgccgacgtgcagttcagaatctgggaccccgtgctgagcgtgatgaccgtgaaggacctgaacaccgccaccagaatgaccgcccagaacgccatgaccaaggccctgctgaagagacccctgagagagatccagatggagaagctgaagatcagcgaccagctgctgctggagatcaacgacgtgaccagagcctggggcctggaggtggacagagtggagctggccgtggaggccgtgctgcagcccccccaggacagccccgccggccccaacctggacagcaccctgcagcagctggccctgcacttcctgggcggcagcatgaacagcatggccggcggcgcccccagccccggccccgccgacaccgtggagatggtgagcgaggtggagccccccgccccccaggtgggcgccagaagcagccccaagcagcccctggccgagggcctgctgaccgccctgcagcccttcctgagcgaggccctggtgagccaggtgggcgcctgctaccagttcaacgtggtgctgcccagcggcacccagagcgcctacttcctggacctgaccaccggcagaggcagagtgggccacggcgtgcccgacggcatccccgacgtggtggtggagatggccgaggccgacctgagagccctgctgtgcagagagctgagacccctgggcgcctacatgagcggcagactgaaggtgaagggcgacctggccatggccatgaagctggaggccgtgctgagagccctgaagtag

SEQ ID NO: 101038 - DNA, 984 bp, synthetic construct
  misc_feature 1..984: note = Description of Artificial Sequence: Synthetic coding sequence
  source 1..984: mol_type = other DNA
atgctgggcagaagcggctacagagccctgcccctgggcgacttcgacagattccagcagagcagcttcggcttcctgggcagccagaagggctgcctgagccccgagagaggcggcgtgggcaccggcgccgacgtgccccagagctggcccagctgcctgtgccacggcctgatcagcttcctgggcttcctgctgctgctggtgaccttccccatcagcggctggttcgccctgaagatcgtgcccacctacgagagaatgatcgtgttcagactgggcagaatcagaaccccccagggccccggcatggtgctgctgctgcccttcatcgacagcttccagagagtggacctgagaaccagagccttcaacgtgcccccctgcaagctggccagcaaggacggcgccgtgctgagcgtgggcgccgacgtgcagttcagaatctgggaccccgtgctgagcgtgatgaccgtgaaggacctgaacaccgccaccagaatgaccgcccagaacgccatgaccaaggccctgctgaagagacccctgagagagatccagatggagaagctgaagatcagcgaccagctgctgctggagatcaacgacgtgaccagagcctggggcctggaggtggacagagtggagctggccgtggaggccgtgctgcagcccccccaggacagccccgccggccccaacctggacagcaccctgcagcagctggccctgcacttcctgggcggcagcatgaacagcatggccggcggcgcccccagccccggccccggcagaggcagagtgggccacggcgtgcccgacggcatccccgacgtggtggtggagatggccgaggccgacctgagagccctgctgtgcagagagctgagacccctgggcgcctacatgagcggcagactgaaggtgaagggcgacctggccatggccatgaagctggaggccgtgctgagagccctgaagtag

SEQ ID NO: 101039 - DNA, 1068 bp, synthetic construct
  misc_feature 1..1068: note = Description of Artificial Sequence: Synthetic coding sequence
  source 1..1068: mol_type = other DNA
atgcccgacgtgccccagagctggcccagctgcctgtgccacggcctgatcagcttcctgggcttcctgctgctgctggtgaccttccccatcagcggctggttcgccctgaagatcgtgcccacctacgagagaatgatcgtgttcagactgggcagaatcagaaccccccagggccccggcatggtgctgctgctgcccttcatcgacagcttccagagagtggacctgagaaccagagccttcaacgtgcccccctgcaagctggccagcaaggacggcgccgtgctgagcgtgggcgccgacgtgcagttcagaatctgggaccccgtgctgagcgtgatgaccgtgaaggacctgaacaccgccaccagaatgaccgcccagaacgccatgaccaaggccctgctgaagagacccctgagagagatccagatggagaagctgaagatcagcgaccagctgctgctggagatcaacgacgtgaccagagcctggggcctggaggtggacagagtggagctggccgtggaggccgtgctgcagcccccccaggacagccccgccggccccaacctggacagcaccctgcagcagctggccctgcacttcctgggcggcagcatgaacagcatggccggcggcgcccccagccccggccccgacaccgtggagatggtgagcgaggtggagccccccgccccccaggtgggcgccagaagcagccccaagcagcccctggccgagggcctgctgaccgccctgcagcccttcctgagcgaggccctggtgagccaggtgggcgcctgctaccagttcaacgtggtgctgcccagcggcacccagagcgcctacttcctggacctgaccaccggcagaggcagagtgggccacggcgtgcccgacggcatccccgacgtggtggtggagatggccgaggccgacctgagagccctgctgtgcagagagctgagacccctgggcgcctacatgagcggcagactgaaggtgaagggcgacctggccatggccatgaagctggaggccgtgctgagagccctgaagtag

SEQ ID NO: 101040 - DNA, 933 bp, synthetic construct
  misc_feature 1..933: note = Description of Artificial Sequence: Synthetic coding sequence
  source 1..933: mol_type = other DNA
atgatcgtgttcagactgggcagaatcagaaccccccagggccccggcatggtgctgctgctgcccttcatcgacagcttccagagagtggacctgagaaccagagccttcaacgtgcccccctgcaagctggccagcaaggacggcgccgtgctgagcgtgggcgccgacgtgcagttcagaatctgggaccccgtgctgagcgtgatgaccgtgaaggacctgaacaccgccaccagaatgaccgcccagaacgccatgaccaaggccctgctgaagagacccctgagagagatccagatggagaagctgaagatcagcgaccagctgctgctggagatcaacgacgtgaccagagcctggggcctggaggtggacagagtggagctggccgtggaggccgtgctgcagcccccccaggacagccccgccggccccaacctggacagcaccctgcagcagctggccctgcacttcctgggcggcagcatgaacagcatggccggcggcgcccccagccccggccccgacaccgtggagatggtgagcgaggtggagccccccgccccccaggtgggcgccagaagcagccccaagcagcccctggccgagggcctgctgaccgccctgcagcccttcctgagcgaggccctggtgagccaggtgggcgcctgctaccagttcaacgtggtgctgcccagcggcacccagagcgcctacttcctggacctgaccaccggcagaggcagagtgggccacggcgtgcccgacggcatccccgacgtggtggtggagatggccgaggccgacctgagagccctgctgtgcagagagctgagacccctgggcgcctacatgagcggcagactgaaggtgaagggcgacctggccatggccatgaagctggaggccgtgctgagagccctgaagtag

SEQ ID NO: 101041 - DNA, 1044 bp, synthetic construct
  misc_feature 1..1044: note = Description of Artificial Sequence: Synthetic coding sequence
  source 1..1044: mol_type = other DNA
atgctgggcagaagcggctacagagccctgcccctgggcgacttcgacagattccagcagagcagcttcggcttcctgggcagccagaagggctgcctgagccccgagagaggcggcgtgggcaccggcgccgacgtgccccagagctggcccagctgcctgtgccacggcctgatcagcttcctgggcttcctgctgctgctggtgaccttccccatcagcggctggttcgccctgaagctggccagcaaggacggcgccgtgctgagcgtgggcgccgacgtgcagttcagaatctgggaccccgtgctgagcgtgatgaccgtgaaggacctgaacaccgccaccagaatgaccgcccagaacgccatgaccaaggccctgctgaagagacccctgagagagatccagatggagaagctgaagatcagcgaccagctgctgctggagatcaacgacgtgaccagagcctggggcctggaggtggacagagtggagctggccgtggaggccgtgctgcagcccccccaggacagccccgccggccccaacctggacagcaccctgcagcagctggccctgcacttcctgggcggcagcatgaacagcatggccggcggcgcccccagccccggccccgacaccgtggagatggtgagcgaggtggagccccccgccccccaggtgggcgccagaagcagccccaagcagcccctggccgagggcctgctgaccgccctgcagcccttcctgagcgaggccctggtgagccaggtgggcgcctgctaccagttcaacgtggtgctgcccagcggcacccagagcgcctacttcctggacctgaccaccggcagaggcagagtgggccacggcgtgcccgacggcatccccgacgtggtggtggagatggccgaggccgacctgagagccctgctgtgcagagagctgagacccctgggcgcctacatgagcggcagactgaaggtgaagggcgacctggccatggccatgaagctggaggccgtgctgagagccctgaagtag

SEQ ID NO: 101042 - DNA, 1071 bp, synthetic construct
  misc_feature 1..1071: note = Description of Artificial Sequence: Synthetic coding sequence
  source 1..1071: mol_type = other DNA
atgctggccagagccgccagaggcaccggcgccctgctgctgagaggcagcctgctggccagcggcagagcccccagaagagccagcagcggcctgcccagaaacaccgtggtgctgttcgtgccccagcaggaggcctgggtggtggagagaatgggcagattccacagaatcctggagcccggcctgaacatcctgatccccgtgctggacagaatcagatacgtgcagagcctgaaggagatcgtgatcaacgtgcccgagcagagcgccgtgaccctggacaacgtgaccctgcagatcgacggcgtgctgtacctgagaatcatggacccctacaaggccagctacggcgtggaggaccccgagtacgccgtgacccagctggcccagaccaccatgagaagcgagctgggcaagctgagcctggacaaggtgttcagagagagagagagcctgaacgccagcatcgtggacgccatcaaccaggccgccgactgctggggcatcagatgcctgagatacgagatcaaggacatccacgtgccccccagagtgaaggagagcatgcagatgcaggtggaggccgagagaagaaagagagccaccgtgctggagagcgagggcaccagagagagcgccatcaacgtggccgagggcaagaagcaggcccagatcctggccagcgaggccgagaaggccgagcagatcaaccaggccgccggcgaggccagcgccgtgctggccaaggccaaggccaaggccgaggccatcagaatcctggccgccgccctgacccagcacaacggcgacgccgccgccagcctgaccgtggccgagcagtacgtgagcgccttcagcaagctggccaaggacagcaacaccatcctgctgcccagcaaccccggcgacgtgaccagcatggtggcccaggccatgggcgtgtacggcgccctgaccaaggcccccgtgcccggcacccccgacagcctgagcagcggcagcagcagagacgtgcagggcaccgacgccagcctggacgaggagctggacagagtgaagatgagctag

SEQ ID NO: 101043 - DNA, 936 bp, synthetic construct
  misc_feature 1..936: note = Description of Artificial Sequence: Synthetic coding sequence
  source 1..936: mol_type = other DNA
atgctggccagagccgccagaggcaccggcgccctgctgctgagaggcagcctgctggccagcggcagagcccccagaagagccagcagcggcctgcccagaaacaccgtggtgctgttcgtgccccagcaggaggcctgggtggtggagagaatgggcagattccacagaatcctggagcccggcctgaacatcctgatccccgtgctggacagaatcagatacgtgcagagcctgaaggagatcgtgatcaacgtgcccgagcagagcgccgtgaccctggacaacgtgaccctgcagatcgacggcgtgctgtacctgagaatcatggacccctacaaggccagctacggcgtggaggaccccgagtacgccgtgacccagctggcccagaccaccatgagaagcgagctgggcaagctgagcctggacaaggtgttcagagtggaggccgagagaagaaagagagccaccgtgctggagagcgagggcaccagagagagcgccatcaacgtggccgagggcaagaagcaggcccagatcctggccagcgaggccgagaaggccgagcagatcaaccaggccgccggcgaggccagcgccgtgctggccaaggccaaggccaaggccgaggccatcagaatcctggccgccgccctgacccagcacaacggcgacgccgccgccagcctgaccgtggccgagcagtacgtgagcgccttcagcaagctggccaaggacagcaacaccatcctgctgcccagcaaccccggcgacgtgaccagcatggtggcccaggccatgggcgtgtacggcgccctgaccaaggcccccgtgcccggcacccccgacagcctgagcagcggcagcagcagagacgtgcagggcaccgacgccagcctggacgaggagctggacagagtgaagatgagctag

SEQ ID NO: 101044 - DNA, 876 bp, synthetic construct
  misc_feature 1..876: note = Description of Artificial Sequence: Synthetic coding sequence
  source 1..876: mol_type = other DNA
atggacagcagagtgagcagccccgagaagcaggacaaggagaacttcgtgggcgtgaacaacaagagactgggcgtgtgcggctggatcctgttcagcctgagcttcctgctggtgatcatcaccttccccatcagcatctggatgtgcctgaagatcatcaaggagtacgagagagccgtggtgttcagactgggcagaatccaggccgacaaggccaagggccccggcctgatcctggtgctgccctgcatcgacgtgttcgtgaaggtggacctgagaaccgtgacctgcaacatccccccccaggagatcctgaccagagacagcgtgaccacccaggtggacggcgtggtgtactacagaatctacagcgccgtgagcgccgtggccaacgtgaacgacgtgcaccaggccaccttcctgctggcccagaccaccctgagaaacgtgctgggcacccagaccctgagccagatcctggccggcagagaggagatcgcccacagcatccagaccctgctggacgacgccaccgagctgtggggcatcagagtggccagagtggagatcaaggacgtgagaatccccgtgcagctgcagagaagcatggccgccgaggccgaggccaccagagaggccagagccaaggtgctggccgccgagggcgagatgaacgccagcaagagcctgaagagcgccagcatggtgctggccgagagccccatcgccctgcagctgagatacctgcagaccctgagcaccgtggccaccgagaagaacagcaccatcgtgttccccctgcccatgaacatcctggagggcatcggcggcgtgagctacgacaaccacaagaagctgcccaacaaggcctag

SEQ ID NO: 101045 - DNA, 849 bp, synthetic construct
  misc_feature 1..849: note = Description of Artificial Sequence: Synthetic coding sequence
  source 1..849: mol_type = other DNA
atgaacagcagaggcgagctggtgggcgtgaacaacaagagactgggcgtgtgcggctggatcctgttcagcctgagcttcctgctggtgatcatcaccttccccatcagcatctggatgtgcctgaagatcatcaaggagtacgagagagccgtggtgttcagactgggcagaatccaggccgacaaggccaagggccccggcctgatcctggtgctgccctgcatcgacgtgttcgtgaaggtggacctgagaaccgtgacctgcaacatccccccccaggagatcctgaccagagacagcgtgaccacccaggtggacggcgtggtgtactacagaatctacagcgccgtgagcgccgtggccaacgtgaacgacgtgcaccaggccaccttcctgctggcccagaccaccctgagaaacgtgctgggcacccagaccctgagccagatcctggccggcagagaggagatcgcccacagcatccagaccctgctggacgacgccaccgagctgtggggcatcagagtggccagagtggagatcaaggacgtgagaatccccgtgcagctgcagagaagcatggccgccgaggccgaggccaccagagaggccagagccaaggtgctggccgccgagggcgagatgaacgccagcaagagcctgaagagcgccagcatggtgctggccgagagccccatcgccctgcagctgagatacctgcagaccctgagcaccgtggccaccgagaagaacagcaccatcgtgttccccctgcccatgaacatcctggagggcatcggcggcgtgagctacgacaaccacaagaagctgcccaacaaggcctag

SEQ ID NO: 101046 - DNA, 2970 bp, synthetic construct
  misc_feature 1..2970: note = Description of Artificial Sequence: Synthetic coding sequence
  source 1..2970: mol_type = other DNA
atggccagacccgtgcagctggcccccggcagcctggccctggtgctgtgcagactggaggcccagaaggccgccggcgccgccgaggagcccggcggcagagccgtgttcagagccttcagaagagccaacgccagatgcttctggaacgccagactggccagagccgccagcagactggccttccagggctggctgagaagaggcgtgctgctggtgagagccccccccgcctgcctgcaggtgctgagagacgcctggagaagaagagccctgagaccccccagaggcttcagaatcagagccgtgggcgacgtgttccccgtgcagatgaaccccatcacccagagccagttcgtgcccctgggcgaggtgctgtgctgcgccatcagcgacatgaacaccgcccagatcgtggtgacccaggagagcctgctggagagactgatgaagcactaccccggcatcgccatccccagcgaggacatcctgtacaccaccctgggcaccctgatcaaggagagaaagatctaccacaccggcgagggctacttcatcgtgaccccccagacctacttcatcaccaacaccaccacccaggagaacaagagaatgctgcccagcgacgagagcagactgatgcccgccagcatgacctacctggtgagcatggagagctgcgccgagagcgcccaggagaacgccgcccccatcagccactgccagagctgccagtgcttcagagacatgcacacccaggacgtgcaggaggcccccgtggccgccgaggtgaccagaaagagccacagaggcctgggcgagagcgtgagctgggtgcagaacggcgccgtgagcgtgagcgccgagcaccacatctgcgagagcaccaagcccctgccctacaccagagacaaggagaagggcaagaagttcggcttcagcctgctgtggagaagcctgagcagaaaggagaagcccaagaccgagcacagcagcttcagcgcccagttcccccccgaggagtggcccgtgagagacgaggacgacctggacaacatccccagagacgtggagcacgagatcatcaagagaatcaaccccatcctgaccgtggacaacctgatcaagcacaccgtgctgatgcagaagtacgaggagcagaagaagtacaacagccagggcaccagcaccgacatgctgaccatcggccacaagtaccccagcaaggagggcgtgaagaagagacagggcctgagcgccaagccccagggccagggccacagcagaagagacagacacaaggccagaaaccagggcagcgagttccagcccggcagcatcagactggagaagcaccccaagctgcccgccacccagcccatccccagaatcaagagccccaacgagatggtgggccagaagcccctgggcgagatcaccaccgtgctgggcagccacctgatctacaagaagagaatcagcaaccccttccagggcctgagccacagaggcagcaccatcagcaagggccacaagatccagaagaccagcgacctgaagcccagccagaccggccccaaggagaagcccttccagaagcccagaagcctggacagcagcagaatcttcgacggcaaggccaaggagccctacgccgagcagcccaacgacaagatggaggccgagagcatctacatcaacgaccccaccgtgaagcccatcaacgacgacttcagaggccacctgttcagccacccccagcagagcatgctgcagaacgacggcaagtgctgccccttcatggagagcatgctgagatacgaggtgtacggcggcgagaacgaggtgatccccgaggtgctgagaaagagccacagccacttcgacaagctgggcgagaccaagcagaccccccacagcctgcccagcagaggcgccagcttcagcgacagaacccccagcgcctgcagactggtggacaacaccatccaccagttccagaacctgggcctgctggactaccccgtgggcgtgaaccccctgagacaggccgccagacaggacaaggacagcgaggagctgctgagaaagggcttcgtgcaggacgccgagaccaccagcctggagaacgagcagctgagcaacgacgaccaggccctgtaccagaacgaggtggaggacgacgacggcgcctgcagcagcctgtacctggaggaggacgacatcagcgagaacgacgacctgagacagatgctgcccggccacagccagtacagcttcaccggcggcagccagggcaaccacctgggcaagcagaaggtgatcgagagaagcctgaccgagtacaacagcaccatggagagagtggagagccaggtgctgaagagaaacgagtgctacaagcccaccggcctgcacgccacccccggcgagagccaggagcccaacctgagcgccgagagctgcggcctgaacagcggcgcccagttcggcttcaactacgaggaggagcccagcgtggccaagtgcgtgcaggccagcgcccccgccgacgagagaatcttcgactactacagcgccagaaaggccagcttcgaggccgaggtgatccaggacaccatcggcgacaccggcaagaagcccgccagctggagccagagcccccagaaccaggagatgagaaagcacttcccccagaagttccagctgttcaacaccagccacatgcccgtgctggcccaggacgtgcagtacgagcacagccacctggagggcaccgagaaccacagcatggccggcgacagcggcatcgacagccccagaacccagagcctgggcagcaacaacagcgtgatcctggacggcctgaagagaagacagaacttcctgcagaacgtggagggcaccaagagcagccagcccctgaccagcaacagcctgctgcccctgacccccgtgatcaacgtgtag

SEQ ID NO: 101047 - DNA, 510 bp, synthetic construct
  misc_feature 1..510: note = Description of Artificial Sequence: Synthetic coding sequence
  source 1..510: mol_type = other DNA
atggccagacccgtgcagctggcccccggcagcctggccctggtgctgtgcagactggaggcccagaaggccgccggcgccgccgaggagcccggcggcagagccgtgttcagagccttcagaagagccaacgccagatgcttctggaacgccagactggccagagccgccagcagactggccttccagggctggctgagaagaggcgtgctgctggtgagagccccccccgcctgcctgcaggtgctgagagacgcctggagaagaagagccctgagaccccccagaggcttcagaatcagagccgtgggcgacgtgttccccgtgcagatgaaccccatcacccagagccagttcgtgcccctgggcgaggtgctgtgctgcgccatcagcgacatgaacaccgcccagatcgtggtgacccaggagagcctgctggagagactgatgaagcactaccccggccacagagtgtgggacctgatcatccagagcttctggatggactag

SEQ ID NO: 101048 - DNA, 684 bp, synthetic construct
  misc_feature 1..684: note = Description of Artificial Sequence: Synthetic coding sequence
  source 1..684: mol_type = other DNA
atggccagacccgtgcagctggcccccggcagcctggccctggtgctgtgcagactggaggcccagaaggccgccggcgccgccgaggagcccggcggcagagccgtgttcagagccttcagaagagccaacgccagatgcttctggaacgccagactggccagagccgccagcagactggccttccagggctggctgagaagaggcgtgctgctggtgagagccccccccgcctgcctgcaggtgctgagagacgcctggagaagaagagccctgagaccccccagaggcttcagaatcagagccgtgggcgacgtgttccccgtgcagatgaaccccatcacccagagccagttcgtgcccctgggcgaggtgctgtgctgcgccatcagcgacatgaacaccgcccagatcgtggtgacccaggagagcctgctggagagactgatgaagcactaccccggcatcgccatccccagcgaggacatcctgtacaccaccctgggcaccctgatcaaggagagaaagatctaccacaccggcgagggctacttcatcgtgaccccccagacctacttcatcaccaacaccaccacccaggagaacaagagaatgctgcccagcgacgagagcagactgatgcccgccagcatgacctacctggacaccgagagcggcatctag

SEQ ID NO: 101049 - DNA, 2970 bp, synthetic construct; identical to SEQ ID NO: 101046
  misc_feature 1..2970: note = Description of Artificial Sequence: Synthetic coding sequence
  source 1..2970: mol_type = other DNA

SEQ ID NO: 101050 - DNA, 2640 bp, synthetic construct
  misc_feature 1..2640: note = Description of Artificial Sequence: Synthetic coding sequence
  source 1..2640: mol_type = other DNA
atgaaccccatcacccagagccagttcgtgcccctgggcgaggtgctgtgctgcgccatcagcgacatgaacaccgcccagatcgtggtgacccaggagagcctgctggagagactgatgaagcactaccccggcatcgccatccccagcgaggacatcctgtacaccaccctgggcaccctgatcaaggagagaaagatctaccacaccggcgagggctacttcatcgtgaccccccagacctacttcatcaccaacaccaccacccaggagaacaagagaatgctgcccagcgacgagagcagactgatgcccgccagcatgacctacctggtgagcatggagagctgcgccgagagcgcccaggagaacgccgcccccatcagccactgccagagctgccagtgcttcagagacatgcacacccaggacgtgcaggaggcccccgtggccgccgaggtgaccagaaagagccacagaggcctgggcgagagcgtgagctgggtgcagaacggcgccgtgagcgtgagcgccgagcaccacatctgcgagagcaccaagcccctgccctacaccagagacaaggagaagggcaagaagttcggcttcagcctgctgtggagaagcctgagcagaaaggagaagcccaagaccgagcacagcagcttcagcgcccagttcccccccgaggagtggcccgtgagagacgaggacgacctggacaacatccccagagacgtggagcacgagatcatcaagagaatcaaccccatcctgaccgtggacaacctgatcaagcacaccgtgctgatgcagaagtacgaggagcagaagaagtacaacagccagggcaccagcaccgacatgctgaccatcggccacaagtaccccagcaaggagggcgtgaagaagagacagggcctgagcgccaagccccagggccagggccacagcagaagagacagacacaaggccagaaaccagggcagcgagttccagcccggcagcatcagactggagaagcaccccaagctgcccgccacccagcccatccccagaatcaagagccccaacgagatggtgggccagaagcccctgggcgagatcaccaccgtgctgggcagccacctgatctacaagaagagaatcagcaaccccttccagggcctgagccacagaggcagcaccatcagcaagggccacaagatccagaagaccagcgacctgaagcccagccagaccggccccaaggagaagcccttccagaagcccagaagcctggacagcagcagaatcttcgacggcaaggccaaggagccctacgccgagcagcccaacgacaagatggaggccgagagcatctacatcaacgaccccaccgtgaagcccatcaacgacgacttcagaggccacctgttcagccacccccagcagagcatgctgcagaacgacggcaagtgctgccccttcatggagagcatgctgagatacgaggtgtacggcggcgagaacgaggtgatccccgaggtgctgagaaagagccacagccacttcgacaagctgggcgagaccaagcagaccccccacagcctgcccagcagaggcgccagcttcagcgacagaacccccagcgcctgcagactggtggacaacaccatccaccagttccagaacctgggcctgctggactaccccgtgggcgtgaaccccctgagacaggccgccagacaggacaaggacagcgaggagctgctgagaaagggcttcgtgcaggacgccgagaccaccagcctggagaacgagcagctgagcaacgacgaccaggccctgtaccagaacgaggtggaggacgacgacggcgcctgcagcagcctgtacctggaggaggacgacatcagcgagaacgacgacctgagacagatgctgcccggccacagccagtacagcttcaccggcggcagccagggcaaccacctgggcaagcagaaggtgatcgagagaagcctgaccgagtacaacagcaccatggagagagtggagagccaggtgctgaagagaaacgagtgctacaagcccaccggcctgcacgccacccccggcgagagccaggagcccaacctgagcgccgagagctgcggcctgaacagcggcgcccagttcggcttcaactacgaggaggagcccagcgtggccaagtgcgtgcaggccagcgcccccgccgacgagagaatcttcgactactacagcgccagaaaggccagcttcgaggccgaggtgatccaggacaccatcggcgacaccggcaagaagcccgccagctggagccagagcccccagaaccaggagatgagaaagcacttcccccagaagttccagctgttcaacaccagccacatgcccgtgctggcccaggacgtgcagtacgagcacagccacctggagggcaccgagaaccacagcatggccggcgacagcggcatcgacagccccagaacccagagcctgggcagcaacaacagcgtgatcctggacggcctgaagagaagacagaacttcctgcagaacgtggagggcaccaagagcagccagcccctgaccagcaacagcctgctgcccctgacccccgtgatcaacgtgtag

SEQ ID NO: 101051 - DNA, 4179 bp, synthetic construct
  misc_feature 1..4179: note = Description of Artificial Sequence: Synthetic coding sequence
  source 1..4179: mol_type = other DNA
atggtggagcccggccaggacctgctgctggccgccctgagcgagagcggcatcagccccaacgacctgttcgacatcgacggcggcgacgccggcctggccacccccatgcccacccccagcgtgcagcagagcgtgcccctgagcgccctggagctgggcctggagaccgaggccgccgtgcccgtgaagcaggagcccgagaccgtgcccacccccgccctgctgaacgtgagacagccccccagcaccaccaccttcgtgctgaaccagatcaaccacctgccccccctgggcagcaccatcgtgatgaccaagaccccccccgtgaccaccaacagacagaccatcaccctgaccaagttcatccagaccaccgccagcaccagacccagcgtgagcgcccccaccgtgagaaacgccatgaccagcgcccccagcaaggaccaggtgcagctgaaggacctgctgaagaacaacagcctgaacgagctgatgaagctgaagccccccgccaacatcgcccagcccgtggccaccgccgccaccgacgtgagcaacggcaccgtgaagaaggagagcagcaacaaggagggcgccagaatgtggatcaacgacatgaagatgagaagcttcagccccaccatgaaggtgcccgtggtgaaggaggacgacgagcccgaggaggaggacgaggaggagatgggccacgccgagacctacgccgagtacatgcccatcaagctgaagatcggcctgagacaccccgacgccgtggtggagaccagcagcctgagcagcgtgaccccccccgacgtgtggtacaagaccagcatcagcgaggagaccatcgacaacggctggctgagcgccctgcagctggaggccatcacctacgccgcccagcagcacgagaccttcctgcccaacggcgacagagccggcttcctgatcggcgacggcgccggcgtgggcaagggcagaaccatcgccggcatcatctacgagaactacctgctgagcagaaagagagccctgtggttcagcgtgagcaacgacctgaagtacgacgccgagagagacctgagagacatcggcgccaagaacatcctggtgcacagcctgaacaagttcaagtacggcaagatcagcagcaagcacaacggcagcgtgaagaagggcgtgatcttcgccacctacagcagcctgatcggcgagagccagagcggcggcaagtacaagaccagactgaagcagctgctgcactggtgcggcgacgacttcgacggcgtgatcgtgttcgacgagtgccacaaggccaagaacctgtgccccgtgggcagcagcaagcccaccaagaccggcctggccgtgctggagctgcagaacaagctgcccaaggccagagtggtgtacgccagcgccaccggcgccagcgagcccagaaacatggcctacatgaacagactgggcatctggggcgagggcacccccttcagagagttcagcgacttcatccaggccgtggagagaagaggcgtgggcgccatggagatcgtggccatggacatgaagctgagaggcatgtacatcgccagacagctgagcttcaccggcgtgaccttcaagatcgaggaggtgctgctgagccagagctacgtgaagatgtacaacaaggccgtgaagctgtgggtgatcgccagagagagattccagcaggccgccgacctgatcgacgccgagcagagaatgaagaagagcatgtggggccagttctggagcgcccaccagagattcttcaagtacctgtgcatcgccagcaaggtgaagagagtggtgcagctggccagagaggagatcaagaacggcaagtgcgtggtgatcggcctgcagagcaccggcgaggccagaaccctggaggccctggaggagggcggcggcgagctgaacgacttcgtgagcaccgccaagggcgtgctgcagagcctgatcgagaagcacttccccgcccccgacagaaagaagctgtacagcctgctgggcatcgacctgaccgcccccagcaacaacagcagccccagagacagcccctgcaaggagaacaagatcaagaagagaaagggcgaggagatcaccagagaggccaagaaggccagaaaggtgggcggcctgaccggcagcagcagcgacgacagcggcagcgagagcgacgccagcgacaacgaggagagcgactacgagagcagcaagaacatgagcagcggcgacgacgacgacttcaaccccttcctggacgagagcaacgaggacgacgagaacgacccctggctgatcagaaaggaccacaagaagaacaaggagaagaagaagaagaagagcatcgaccccgacagcatccagagcgccctgctggccagcggcctgggcagcaagagacccagcttcagcagcacccccgtgatcagccccgcccccaacagcacccccgccaacagcaacaccaacagcaacagcagcctgatcaccagccaggacgccgtggagagagcccagcagatgaagaaggacctgctggacaagctggagaagctggccgaggacctgccccccaacaccctggacgagctgatcgacgagctgggcggccccgagaacgtggccgagatgaccggcagaaagggcagagtggtgagcaacgacgacggcagcatcagctacgagagcagaagcgagctggacgtgcccgtggagatcctgaacatcaccgagaagcagagattcatggacggcgacaagaacatcgccatcatcagcgaggccgccagcagcggcatcagcctgcaggccgacagaagagccaagaaccagagaagaagagtgcacatgaccctggagctgccctggagcgccgacagagccatccagcagttcggcagaacccacagaagcaaccaggtgaccgcccccgagtacgtgttcctgatcagcgagctggccggcgagcagagattcgccagcatcgtggccaagagactggagagcctgggcgccctgacccacggcgacagaagagccaccgagagcagagacctgagcagattcaacttcgacaacaagtacggcagaaacgccctggagatcgtgatgaagagcatcgtgaacctggacagccccatggtgagccccccccccgactaccccggcgagttcttcaaggacgtgagacagggcctgatcggcgtgggcctgatcaacgtggaggacagaagcggcatcctgaccctggacaaggactacaacaacatcggcaagttcctgaacagaatcctgggcatggaggtgcaccagcagaacgccctgttccagtacttcgccgacaccctgaccgccgtggtgcagaacgccaagaagaacggcagatacgacatgggcatcctggacctgggcagcggcgacgagaaggtgagaaagagcgacgtgaagaagttcctgacccccggctacagcaccagcggccacgtggagctgtacaccatcagcgtggagagaggcatgagctgggaggaggccaccaagatctgggccgagctgaccggccccgacgacggcttctacctgagcctgcagatcagaaacaacaagaagaccgccatcctggtgaaggaggtgaaccccaagaagaagctgttcctggtgtacagacccaacaccggcaagcagctgaagctggagatctacgccgacctgaagaagaagtacaagaaggtggtgagcgacgacgccctgatgcactggctggaccagtacaacagcagcgccgacacctgcacccacgcctactggagaggcaactgcaagaaggccagcctgggcctggtgtgcgagatcggcctgagatgcagaacctactacgtgctgtgcggcagcgtgctgagcgtgtggaccaaggtggagggcgtgctggccagcgtgagcggcaccaacgtgaagatgcagatcgtgagactgagaaccgaggacggccagagaatcgtgggcctgatcatccccgccaactgcgtgagccccctggtgaacctgctgagcaccagcgaccagagccagcagctggccgtgcagcagaagcagctgtggcagcagcaccacccccagagcatcaccaacctgagcaacgcctag

SEQ ID NO: 101052 - DNA, 4182 bp, synthetic construct
  misc_feature 1..4182: note = Description of Artificial Sequence: Synthetic coding sequence
  source 1..4182: mol_type = other DNA
atggtggagcccggccaggacctgctgctggccgccctgagcgagagcggcatcagccccaacgacctgttcgacatcgacggcggcgacgccggcctggccacccccatgcccacccccagcgtgcagcagagcgtgcccctgagcgccctggagctgggcctggagaccgaggccgccgtgcccgtgaagcaggagcccgagaccgtgcccacccccgccctgctgaacgtgagacagcagccccccagcaccaccaccttcgtgctgaaccagatcaaccacctgccccccctgggcagcaccatcgtgatgaccaagaccccccccgtgaccaccaacagacagaccatcaccctgaccaagttcatccagaccaccgccagcaccagacccagcgtgagcgcccccaccgtgagaaacgccatgaccagcgcccccagcaaggaccaggtgcagctgaaggacctgctgaagaacaacagcctgaacgagctgatgaagctgaagccccccgccaacatcgcccagcccgtggccaccgccgccaccgacgtgagcaacggcaccgtgaagaaggagagcagcaacaaggagggcgccagaatgtggatcaacgacatgaagatgagaagcttcagccccaccatgaaggtgcccgtggtgaaggaggacgacgagcccgaggaggaggacgaggaggagatgggccacgccgagacctacgccgagtacatgcccatcaagctgaagatcggcctgagacaccccgacgccgtggtggagaccagcagcctgagcagcgtgaccccccccgacgtgtggtacaagaccagcatcagcgaggagaccatcgacaacggctggctgagcgccctgcagctggaggccatcacctacgccgcccagcagcacgagaccttcctgcccaacggcgacagagccggcttcctgatcggcgacggcgccggcgtgggcaagggcagaaccatcgccggcatcatctacgagaactacctgctgagcagaaagagagccctgtggttcagcgtgagcaacgacctgaagtacgacgccgagagagacctgagagacatcggcgccaagaacatcctggtgcacagcctgaacaagttcaagtacggcaagatcagcagcaagcacaacggcagcgtgaagaagggcgtgatcttcgccacctacagcagcctgatcggcgagagccagagcggcggcaagtacaagaccagactgaagcagctgctgcactggtgcggcgacgacttcgacggcgtgatcgtgttcgacgagtgccacaaggccaagaacctgtgccccgtgggcagcagcaagcccaccaagaccggcctggccgtgctggagctgcagaacaagctgcccaaggccagagtggtgtacgccagcgccaccggcgccagcgagcccagaaacatggcctacatgaacagactgggcatctggggcgagggcacccccttcagagagttcagcgacttcatccaggccgtggagagaagaggcgtgggcgccatggagatcgtggccatggacatgaagctgagaggcatgtacatcgccagacagctgagcttcaccggcgtgaccttcaagatcgaggaggtgctgctgagccagagctacgtgaagatgtacaacaaggccgtgaagctgtgggtgatcgccagagagagattccagcaggccgccgacctgatcgacgccgagcagagaatgaagaagagcatgtggggccagttctggagcgcccaccagagattcttcaagtacctgtgcatcgccagcaaggtgaagagagtggtgcagctggccagagaggagatcaagaacggcaagtgcgtggtgatcggcctgcagagcaccggcgaggccagaaccctggaggccctggaggagggcggcggcgagctgaacgacttcgtgagcaccgccaagggcgtgctgcagagcctgatcgagaagcacttccccgcccccgacagaaagaagctgtacagcctgctgggcatcgacctgaccgcccccagcaacaacagcagccccagagacagcccctgcaaggagaacaagatcaagaagagaaagggcgaggagatcaccagagaggccaagaaggccagaaaggtgggcggcctgaccggcagcagcagcgacgacagcggcagcgagagcgacgccagcgacaacgaggagagcgactacgagagcagcaagaacatgagcagcggcgacgacgacgacttcaaccccttcctggacgagagcaacgaggacgacgagaacgacccctggctgatcagaaaggaccacaagaagaacaaggagaagaagaagaagaagagcatcgaccccgacagcatccagagcgccctgctggccagcggcctgggcagcaagagacccagcttcagcagcacccccgtgatcagccccgcccccaacagcacccccgccaacagcaacaccaacagcaacagcagcctgatcaccagccaggacgccgtggagagagcccagcagatgaagaaggacctgctggacaagctggagaagctggccgaggacctgccccccaacaccctggacgagctgatcgacgagctgggcggccccgagaacgtggccgagatgaccggcagaaagggcagagtggtgagcaacgacgacggcagcatcagctacgagagcagaagcgagctggacgtgcccgtggagatcctgaacatcaccgagaagcagagattcatggacggcgacaagaacatcgccatcatcagcgaggccgccagcagcggcatcagcctgcaggccgacagaagagccaagaaccagagaagaagagtgcacatgaccctggagctgccctggagcgccgacagagccatccagcagttcggcagaacccacagaagcaaccaggtgaccgcccccgagtacgtgttcctgatcagcgagctggccggcgagcagagattcgccagcatcgtggccaagagactggagagcctgggcgccctgacccacggcgacagaagagccaccgagagcagagacctgagcagattcaacttcgacaacaagtacggcagaaacgccctggagatcgtgatgaagagcatcgtgaacctggacagccccatggtgagccccccccccgactaccccggcgagttcttcaaggacgtgagacagggcctgatcggcgtgggcctgatcaacgtggaggacagaagcggcatcctgaccctggacaaggactacaacaacatcggcaagttcctgaacagaatcctgggcatggaggtgcaccagcagaacgccctgttccagtacttcgccgacaccctgaccgccgtggtgcagaacgccaagaagaacggcagatacgacatgggcatcctggacctgggcagcggcgacgagaaggtgagaaagagcgacgtgaagaagttcctgacccccggctacagcaccagcggccacgtggagctgtacaccatcagcgtggagagaggcatgagctgggaggaggccaccaagatctgggccgagctgaccggccccgacgacggcttctacctgagcctgcagatcagaaacaacaagaagaccgccatcctggtgaaggaggtgaaccccaagaagaagctgttcctggtgtacagacccaacaccggcaagcagctgaagctggagatctacgccgacctgaagaagaagtacaagaaggtggtgagcgacgacgccctgatgcactggctggaccagtacaacagcagcgccgacacctgcacccacgcctactggagaggcaactgcaagaaggccagcctgggcctggtgtgcgagatcggcctgagatgcagaacctactacgtgctgtgcggcagcgtgctgagcgtgtggaccaaggtggagggcgtgctggccagcgtgagcggcaccaacgtgaagatgcagatcgtgagactgagaaccgaggacggccagagaatcgtgggcctgatcatccccgccaactgcgtgagccccctggtgaacctgctgagcaccagcgaccagagccagcagctggccgtgcagcagaagcagctgtggcagcagcaccacccccagagcatcaccaacctgagcaacgcctag

SEQ ID NO: 101053 - DNA, 2199 bp, synthetic construct
  misc_feature 1..2199: note = Description of Artificial Sequence: Synthetic coding sequence
  source 1..2199: mol_type = other DNA
atggtggagcccggccaggacctgctgctggccgccctgagcgagagcggcatcagccccaacgacctgttcgacatcgacggcggcgacgccggcctggccacccccatgcccacccccagcgtgcagcagagcgtgcccctgagcgccctggagctgggcctggagaccgaggccgccgtgcccgtgaagcaggagcccgagaccgtgcccacccccgccctgctgaacgtgagacagccccccagcaccaccaccttcgtgctgaaccagatcaaccacctgccccccctgggcagcaccatcgtgatgaccaagaccccccccgtgaccaccaacagacagaccatcaccctgaccaagttcatccagaccaccgccagcaccagacccagcgtgagcgcccccaccgtgagaaacgccatgaccagcgcccccagcaaggaccaggtgcagctgaaggacctgctgaagaacaacagcctgaacgagctgatgaagctgaagccccccgccaacatcgcccagcccgtggccaccgccgccaccgacgtgagcaacggcaccgtgaagaaggagagcagcaacaaggagggcgccagaatgtggatcaacgacatgaagatgagaagcttcagccccaccatgaaggtgcccgtggtgaaggaggacgacgagcccgaggaggaggacgaggaggagatgggccacgccgagacctacgccgagtacatgcccatcaagctgaagatcggcctgagacaccccgacgccgtggtggagaccagcagcctgagcagcgtgaccccccccgacgtgtggtacaagaccagcatcagcgaggagaccatcgacaacggctggctgagcgccctgcagctggaggccatcacctacgccgcccagcagcacgagaccttcctgcccaacggcgacagagccggcttcctgatcggcgacggcgccggcgtgggcaagggcagaaccatcgccggcatcatctacgagaactacctgctgagcagaaagagagccctgtggttcagcgtgagcaacgacctgaagtacgacgccgagagagacctgagagacatcggcgccaagaacatcctggtgcacagcctgaacaagttcaagtacggcaagatcagcagcaagcacaacggcagcgtgaagaagggcgtgatcttcgccacctacagcagcctgatcggcgagagccagagcggcggcaagtacaagaccagactgaagcagctgctgcactggtgcggcgacgacttcgacggcgtgatcgtgttcgacgagtgccacaaggccaagaacctgtgccccgtgggcagcagcaagcccaccaagaccggcctggccgtgctggagctgcagaacaagctgcccaaggccagagtggtgtacgccagcgccaccggcgccagcgagcccagaaacatggcctacatgaacagactgggcatctggggcgagggcacccccttcagagagttcagcgacttcatccaggccgtggagagaagaggcgtgggcgccatggagatcgtggccatggacatgaagctgagaggcatgtacatcgccagacagctgagcttcaccggcgtgaccttcaagatcgaggaggtgctgctgagccagagctacgtgaagatgtacaacaaggccgtgaagctgtgggtgatcgccagagagagattccagcaggccgccgacctgatcgacgccgagcagagaatgaagaagagcatgtggggccagttctggagcgcccaccagagattcttcaagtacctgtgcatcgccagcaaggtgaagagagtggtgcagctggccagagaggagatcaagaacggcaagtgcgtggtgatcggcctgcagagcaccggcgaggccagaaccctggaggccctggaggagggcggcggcgagctgaacgacttcgtgagcaccgccaagggcgtgctgcagagcctgatcgagaagcacttccccgcccccgacagaaagaagctgtacagcctgctgggcatcgacctgaccgcccccagcaacaacagcagccccagagacagcccctgcaaggagaacaagatcaagaagagaaagggcgaggagatcaccagagaggccaagaaggccagaaagatgagcctgatgagaatgatgaagatggtgagcagctag

SEQ ID NO: 101054 - DNA, 1632 bp, synthetic construct
  misc_feature 1..1632: note = Description of Artificial Sequence: Synthetic coding sequence
  source 1..1632: mol_type = other DNA
atggagcaggtgaacgagctgaaggagaagggcaacaaggccctgagcgtgggcaacatcgacgacgccctgcagtgctacagcgaggccatcaagctggacccccacaaccacgtgctgtacagcaacagaagcgccgcctacgccaagaagggcgactaccagaaggcctacgaggacggctgcaagaccgtggacctgaagcccgactggggcaagggctacagcagaaaggccgccgccctggagttcctgaacagattcgaggaggccaagagaacctacgaggagggcctgaagcacgaggccaacaacccccagctgaaggagggcctgcagaacatggaggccagactggccgagagaaagttcatgaaccccttcaacatgcccaacctgtaccagaagctggagagcgaccccagaaccagaaccctgctgagcgaccccacctacagagagctgatcgagcagctgagaaacaagcccagcgacctgggcaccaagctgcaggaccccagaatcatgaccaccctgagcgtgctgctgggcgtggacctgggcagcatggacgaggaggaggagatcgccacccccccccccccccccccccccaagaaggagaccaagcccgagcccatggaggaggacctgcccgagaacaagaagcaggccctgaaggagaaggagctgggcaacgacgcctacaagaagaaggacttcgacaccgccctgaagcactacgacaaggccaaggagctggaccccaccaacatgacctacatcaccaaccaggccgccgtgtacttcgagaagggcgactacaacaagtgcagagagctgtgcgagaaggccatcgaggtgggcagagagaacagagaggactacagacagatcgccaaggcctacgccagaatcggcaacagctacttcaaggaggagaagtacaaggacgccatccacttctacaacaagagcctggccgagcacagaacccccgacgtgctgaagaagtgccagcaggccgagaagatcctgaaggagcaggagagactggcctacatcaaccccgacctggccctggaggagaagaacaagggcaacgagtgcttccagaagggcgactacccccaggccatgaagcactacaccgaggccatcaagagaaaccccaaggacgccaagctgtacagcaacagagccgcctgctacaccaagctgctggagttccagctggccctgaaggactgcgaggagtgcatccagctggagcccaccttcatcaagggctacaccagaaaggccgccgccctggaggccatgaaggactacaccaaggccatggacgtgtaccagaaggccctggacctggacagcagctgcaaggaggccgccgacggctaccagagatgcatgatggcccagtacaacagacacgacagccccgaggacgtgaagagaagagccatggccgaccccgaggtgcagcagatcatgagcgaccccgccatgagactgatcctggagcagatgcagaaggacccccaggccctgagcgagcacctgaagaaccccgtgatcgcccagaagatccagaagctgatggacgtgggcctgatcgccatcagatag

SEQ ID NO: 101055 - DNA, 1359 bp, synthetic construct
  misc_feature 1..1359: note = Description of Artificial Sequence: Synthetic coding sequence
  source 1..1359: mol_type = other DNA
atgaacagacagctggtgaacatcctgaccgccctgttcgccttcttcctggagaccaaccacttcagaaccgccttctgcaaggaccacgacagcagaagcggcaagcagcccagccagaccctgagccccagcgacttcctggacaagctgatgggcagaaccagcggctacgacgccagaatcagacccaacttcaagggcccccccgtgaacgtgacctgcaacatcttcatcaacagcttcggcagcgtgaccgagaccaccatggactacagagtgaacatcttcctgagacagcagtggaacgacagcagactggcctacagcgagtaccccgacgacagcctggacctggaccccagcatgctggacagcatctggaagcccgacctgttcttcgccaacgagaagggcgccaacttccacgacgtgaccaccgacaacaagctgctgagaatcagcaagaacggcaaggtgctgtacagcatcagactgaccctgaccctgagctgccccatggacctgaagaacttccccatggacgtgcagacctgcaccatgcagctggagagcttcggctacaccatgaacgacctgatcttcgagtggctgagcgacggccccgtgcaggtggccgagggcctgaccctgccccagttcatcctgaaggaggagaaggagctgggctactgcaccaagcactacaacaccggcaagttcacctgcatcgaggtgaagttccacctggagagacagatgggctactacctgatccagatgtacatccccagcctgctgatcgtgatcctgagctgggtgagcttctggatcaacatggacgccgcccccgccagagtggccctgggcatcaccaccgtgctgaccatgaccacccagagcagcggcagcagagccagcctgcccaaggtgagctacgtgaaggccatcgacatctggatggccgtgtgcctgctgttcgtgttcgccgccctgctggagtacgccgccgtgaacttcgtgagcagacagcacaaggagttcctgagactgagaagaagacagaagagacagaacaaggaggaggacgtgaccagagagagcagattcaacttcagcggctacggcatgggccactgcctgcaggtgaaggacggcaccgccgtgaaggccacccccgccaaccccctgccccagccccccaaggacggcgacgccatcaagaagaagttcgtggacagagccaagagaatcgacaccatcagcagagccgccttccccctggccttcctgatcttcaacatcttctactggatcacctacaagatcatcagacacgaggacgtgcacaagaagtag

SEQ ID NO: 101056 - DNA, 3489 bp, synthetic construct
  misc_feature 1..3489: note = Description of Artificial Sequence: Synthetic coding sequence
  source 1..3489: mol_type = other DNA
atgaacggccaccaccagcagaacggcgtggagaacatgatgctgttcgaggtggtgaagatgggcaagagcgccatgcagagcgtggtggacgactggatcgagagctacaagcacgacagagacatcgccctgctggacctgatcaacttcttcatccagtgcagcggctgcaagggcgtggtgaccgccgagatgttcagacacatgcagaacagcgagatcatcagaaagatgaccgaggagttcgacgaggacagcggcgactaccccctgaccatggccggcccccagtggaagaagttcaagagcagcttctgcgagttcatcggcgtgctggtgagacagtgccagtacagcatcatctacgacgagtacatgatggacaccgtgatcagcctgctgaccggcctgagcgacagccaggtgagagccttcagacacaccagcaccctggccgccatgaagctgatgaccgccctggtgaacgtggccctgaacctgagcatcaacatggacaacacccagagacagtacgaggccgagagaaacaagatgatcggcaagagagccaacgagagactggagctgctgctgcagaagagaaaggagctgcaggagaaccaggacgagatcgagaacatgatgaacgccatcttcaagggcgtgttcgtgcacagatacagagacgccatcgccgagatcagagccatctgcatcgaggagatcggcatctggatgaagatgtacagcgacgccttcctgaacgacagctacctgaagtacgtgggctggaccatgcacgacaagcagggcgaggtgagactgaagtgcctgaccgccctgcagggcctgtactacaacaaggagctgaacagcaagctggagctgttcaccagcagattcaaggacagaatcgtgagcatgaccctggacaaggagtacgacgtggccgtgcaggccatcaagctgctgaccctggtgctgcagagcagcgaggaggtgctgaccgccgaggactgcgagaacgtgtaccacctggtgtacagcgcccacagacccgtggccgtggccgccggcgagttcctgtacaagaagctgttcagcagaagagaccccgaggaggacggcatgatgaagagaagaggcagacagggccccaacgccaacctggtgaagaccctggtgttcttcttcctggagagcgagctgcacgagcacgccgcctacctggtggacagcatgtgggactgcgccaccgagctgctgaaggactgggagtgcatgaacagcctgctgctggaggagcccctgagcggcgaggaggccctgaccgacagacaggagagcgccctgatcgagatcatgctgtgcaccatcagacaggccgccgagtgccacccccccgtgggcagaggcaccggcaagagagtgctgaccgccaaggagaagaagacccagctggacgacagaaccaagatcaccgagctgttcgccgtggccctgccccagctgctggccaagtacagcgtggacgccgagaaggtgaccaacctgctgcagctgccccagtacttcgacctggagatctacaccaccggcagactggagaagcacctggacgccctgctgagacagatcagaaacatcgtggagaagcacaccgacaccgacgtgctggaggcctgcagcaagacctaccacgccctgtgcaacgaggagttcaccatcttcaacagagtggacatcagcagaagccagctgatcgacgagctggccgacaagttcaacagactgctggaggacttcctgcaggagggcgaggagcccgacgaggacgacgcctaccaggtgctgagcaccctgaagagaatcaccgccttccacaacgcccacgacctgagcaagtgggacctgttcgcctgcaactacaagctgctgaagaccggcatcgagaacggcgacatgcccgagcagatcgtgatccacgccctgcagtgcacccactacgtgatcctgtggcagctggccaagatcaccgagagcagcagcaccaaggaggacctgctgagactgaagaagcagatgagagtgttctgccagatctgccagcactacctgaccaacgtgaacaccaccgtgaaggagcaggccttcaccatcctgtgcgacatcctgatgatcttcagccaccagatcatgagcggcggcagagacatgctggagcccctggtgtacacccccgacagcagcctgcagagcgagctgctgagcttcatcctggaccacgtgttcatcgagcaggacgacgacaacaacagcgccgacggccagcaggaggacgaggccagcaagatcgaggccctgcacaagagaagaaacctgctggccgccttctgcaagctgatcgtgtacaccgtggtggagatgaacaccgccgccgacatcttcaagcagtacatgaagtactacaacgactacggcgacatcatcaaggagaccatgagcaagaccagacagatcgacaagatccagtgcgccaagaccctgatcctgagcctgcagcagctgttcaacgagatgatccaggagaacggctacaacttcgacagaagcagcagcaccttcagcggcatcaaggagctggccagaagattcgccctgaccttcggcctggaccagctgaagaccagagaggccatcgccatgctgcacaaggacggcatcgagttcgccttcaaggagcccaacccccagggcgagagccacccccccctgaacctggccttcctggacatcctgagcgagttcagcagcaagctgctgagacaggacaagagaaccgtgtacgtgtacctggagaagttcatgaccttccagatgagcctgagaagagaggacgtgtggctgcccctgatgagctacagaaacagcctgctggccggcggcgacgacgacaccatgagcgtgatcagcggcatcagcagcagaggcagcaccgtgagaagcaagaagagcaagcccagcaccggcaagagaaaggtggtggagggcatgcagctgagcctgaccgaggagagcagcagcagcgacagcatgtggctgagcagagagcagaccctgcacacccccgtgatgatgcagaccccccagctgaccagcaccatcatgagagagcccaagagactgagacccgaggacagcttcatgagcgtgtaccccatgcagaccgagcaccaccagacccccctggactacaacagaagaggcaccagcctgatggaggacgacgaggagcccatcgtggaggacgtgatgatgagcagcgagggcagaatcgaggacctgaacgagggcatggacttcgacaccatggacatcgacctgccccccagcaagaacagaagagagagaaccgagctgaagcccgacttcttcgaccccgccagcatcatggacgagagcgtgctgggcgtgagcatgttctag

SEQ ID NO: 101057 - DNA, 3696 bp, synthetic construct
  misc_feature 1..3696: note = Description of Artificial Sequence: Synthetic coding sequence
  source 1..3696: mol_type = other DNA
atgatcgccgcccccgagatccccaccgacttcaacctgctgcaggagagcgagacccacttcagcagcgacaccgacttcgaggacatcgagggcaagaaccagaagcagggcaagggcaagacctgcaagaagggcaagaagggccccgccgagaagggcaagggcggcaacggcggcggcaagccccccagcggccccaacagaatgaacggccaccaccagcagaacggcgtggagaacatgatgctgttcgaggtggtgaagatgggcaagagcgccatgcagagcgtggtggacgactggatcgagagctacaagcacgacagagacatcgccctgctggacctgatcaacttcttcatccagtgcagcggctgcaagggcgtggtgaccgccgagatgttcagacacatgcagaacagcgagatcatcagaaagatgaccgaggagttcgacgaggacagcggcgactaccccctgaccatggccggcccccagtggaagaagttcaagagcagcttctgcgagttcatcggcgtgctggtgagacagtgccagtacagcatcatctacgacgagtacatgatggacaccgtgatcagcctgctgaccggcctgagcgacagccaggtgagagccttcagacacaccagcaccctggccgccatgaagctgatgaccgccctggtgaacgtggccctgaacctgagcatcaacatggacaacacccagagacagtacgaggccgagagaaacaagatgatcggcaagagagccaacgagagactggagctgctgctgcagaagagaaaggagctgcaggagaaccaggacgagatcgagaacatgatgaacgccatcttcaagggcgtgttcgtgcacagatacagagacgccatcgccgagatcagagccatctgcatcgaggagatcggcatctggatgaagatgtacagcgacgccttcctgaacgacagctacctgaagtacgtgggctggaccatgcacgacaagcagggcgaggtgagactgaagtgcctgaccgccctgcagggcctgtactacaacaaggagctgaacagcaagctggagctgttcaccagcagattcaaggacagaatcgtgagcatgaccctggacaaggagtacgacgtggccgtgcaggccatcaagctgctgaccctggtgctgcagagcagcgaggaggtgctgaccgccgaggactgcgagaacgtgtaccacctggtgtacagcgcccacagacccgtggccgtggccgccggcgagttcctgtacaagaagctgttcagcagaagagaccccgaggaggacggcatgatgaagagaagaggcagacagggccccaacgccaacctggtgaagaccctggtgttcttcttcctggagagcgagctgcacgagcacgccgcctacctggtggacagcatgtgggactgcgccaccgagctgctgaaggactgggagtgcatgaacagcctgctgctggaggagcccctgagcggcgaggaggccctgaccgacagacaggagagcgccctgatcgagatcatgctgtgcaccatcagacaggccgccgagtgccacccccccgtgggcagaggcaccggcaagagagtgctgaccgccaaggagaagaagacccagctggacgacagaaccaagatcaccgagctgttcgccgtggccctgccccagctgctggccaagtacagcgtggacgccgagaaggtgaccaacctgctgcagctgccccagtacttcgacctggagatctacaccaccggcagactggagaagcacctggacgccctgctgagacagatcagaaacatcgtggagaagcacaccgacaccgacgtgctggaggcctgcagcaagacctaccacgccctgtgcaacgaggagttcaccatcttcaacagagtggacatcagcagaagccagctgatcgacgagctggccgacaagttcaacagactgctggaggacttcctgcaggagggcgaggagcccgacgaggacgacgcctaccaggtgctgagcaccctgaagagaatcaccgccttccacaacgcccacgacctgagcaagtgggacctgttcgcctgcaactacaagctgctgaagaccggcatcgagaacggcgacatgcccgagcagatcgtgatccacgccctgcagtgcacccactacgtgatcctgtggcagctggccaagatcaccgagagcagcagcaccaaggaggacctgctgagactgaagaagcagatgagagtgttctgccagatctgccagcactacctgaccaacgtgaacaccaccgtgaaggagcaggccttcaccatcctgtgcgacatcctgatgatcttcagccaccagatcatgagcggcggcagagacatgctggagcccctggtgtacacccccgacagcagcctgcagagcgagctgctgagcttcatcctggaccacgtgttcatcgagcaggacgacgacaacaacagcgccgacggccagcaggaggacgaggccagcaagatcgaggccctgcacaagagaagaaacctgctggccgccttctgcaagctgatcgtgtacaccgtggtggagatgaacaccgccgccgacatcttcaagcagtacatgaagtactacaacgactacggcgacatcatcaaggagaccatgagcaagaccagacagatcgacaagatccagtgcgccaagaccctgatcctgagcctgcagcagctgttcaacgagatgatccaggagaacggctacaacttcgacagaagcagcagcaccttcagcggcatcaaggagctggccagaagattcgccctgaccttcggcctggaccagctgaagaccagagaggccatcgccatgctgcacaaggacggcatcgagttcgccttcaaggagcccaacccccagggcgagagccacccccccctgaacctggccttcctggacatcctgagcgagttcagcagcaagctgctgagacaggacaagagaaccgtgtacgtgtacctggagaagttcatgaccttccagatgagcctgagaagagaggacgtgtggctgcccctgatgagctacagaaacagcctgctggccggcggcgacgacgacaccatgagcgtgatcagcggcatcagcagcagaggcagcaccgtgagaagcaagaagagcaagcccagcaccggcaagagaaaggtggtggagggcatgcagctgagcctgaccgaggagagcagcagcagcgacagcatgtggctgagcagagagcagaccctgcacacccccgtgatgatgcagaccccccagctgaccagcaccatcatgagagagcccaagagactgagacccgaggacagcttcatgagcgtgtaccccatgcagaccgagcaccaccagacccccctggactacaacagaagaggcaccagcctgatggaggacgacgaggagcccatcgtggaggacgtgatgatgagcagcgagggcagaatcgaggacctgaacgagggcatggacttcgacaccatggacatcgacctgccccccagcaagaacagaagagagagaaccgagctgaagcccgacttcttcgaccccgccagcatcatggacgagagcgtgctgggcgtgagcatgttctag

SEQ ID NO: 101058 - DNA, 3807 bp, synthetic construct
  misc_feature 1..3807: note = Description of Artificial Sequence: Synthetic coding sequence
  source 1..3807: mol_type = other DNA
atgatcgccgcccccgagatccccaccgacttcaacctgctgcaggagagcgagacccacttcagcagcgacaccgacttcgaggacatcgagggcaagaaccagaagcagggcaagggcaagacctgcaagaagggcaagaagggccccgccgagaagggcaagggcggcaacggcggcggcaagccccccagcggccccaacagaatgaacggccaccaccagcagaacggcgtggagaacatgatgctgttcgaggtggtgaagatgggcaagagcgccatgcagagcgtggtggacgactggatcgagagctacaagcacgacagagacatcgccctgctggacctgatcaacttcttcatccagtgcagcggctgcaagggcgtggtgaccgccgagatgttcagacacatgcagaacagcgagatcatcagaaagatgaccgaggagttcgacgaggacagcggcgactaccccctgaccatggccggcccccagtggaagaagttcaagagcagcttctgcgagttcatcggcgtgctggtgagacagtgccagtacagcatcatctacgacgagtacatgatggacaccgtgatcagcctgctgaccggcctgagcgacagccaggtgagagccttcagacacaccagcaccctggccgccatgaagctgatgaccgccctggtgaacgtggccctgaacctgagcatcaacatggacaacacccagagacagtacgaggccgagagaaacaagatgatcggcaagagagccaacgagagactggagctgctgctgcagaagagaaaggagctgcaggagaaccaggacgagatcgagaacatgatgaacgccatcttcaagggcgtgttcgtgcacagatacagagacgccatcgccgagatcagagccatctgcatcgaggagatcggcatctggatgaagatgtacagcgacgccttcctgaacgacagctacctgaagtacgtgggctggaccatgcacgacaagcagggcgaggtgagactgaagtgcctgaccgccctgcagggcctgtactacaacaaggagctgaacagcaagctggagctgttcaccagcagattcaaggacagaatcgtgagcatgaccctggacaaggagtacgacgtggccgtgcaggccatcaagctgctgaccctggtgctgcagagcagcgaggaggtgctgaccgccgaggactgcgagaacgtgtaccacctggtgtacagcgcccacagacccgtggccgtggccgccggcgagttcctgtacaagaagctgttcagcagaagagaccccgaggaggacggcatgatgaagagaagaggcagacagggccccaacgccaacctggtgaagaccctggtgttcttcttcctggagagcgagctgcacgagcacgccgcctacctggtggacagcatgtgggactgcgccaccgagctgctgaaggactgggagtgcatgaacagcctgctgctggaggagcccctgagcggcgaggaggccctgaccgacagacaggagagcgccctgatcgagatcatgctgtgcaccatcagacaggccgccgagtgccacccccccgtgggcagaggcaccggcaagagagtgctgaccgccaaggagaagaagacccagctggacgacagaaccaagatcaccgagctgttcgccgtggccctgccccagctgctggccaagtacagcgtggacgccgagaaggtgaccaacctgctgcagctgccccagtacttcgacctggagatctacaccaccggcagactggagaagcacctggacgccctgctgagacagatcagaaacatcgtggagaagcacaccgacaccgacgtgctggaggcctgcagcaagacctaccacgccctgtgcaacgaggagttcaccatcttcaacagagtggacatcagcagaagccagctgatcgacgagctggccgacaagttcaacagactgctggaggacttcctgcaggagggcgaggagcccgacgaggacgacgcctaccaggtgctgagcaccctgaagagaatcaccgccttccacaacgcccacgacctgagcaagtgggacctgttcgcctgcaactacaagctgctgaagaccggcatcgagaacggcgacatgcccgagcagatcgtgatccacgccctgcagtgcacccactacgtgatcctgtggcagctggccaagatcaccgagagcagcagcaccaaggaggacctgctgagactgaagaagcagatgagagtgttctgccagatctgccagcactacctgaccaacgtgaacaccaccgtgaaggagcaggccttcaccatcctgtgcgacatcctgatgatcttcagccaccagatcatgagcggcggcagagacatgctggagcccctggtgtacacccccgacagcagcctgcagagcgagctgctgagcttcatcctggaccacgtgttcatcgagcaggacgacgacaacaacagcgccgacggccagcaggaggacgaggccagcaagatcgaggccctgcacaagagaagaaacctgctggccgccttctgcaagctgatcgtgtacaccgtggtggagatgaacaccgccgccgacatcttcaagcagtacatgaagtactacaacgactacggcgacatcatcaaggagaccatgagcaagaccagacagatcgacaagatccagtgcgccaagaccctgatcctgagcctgcagcagctgttcaacgagatgatccaggagaacggctacaacttcgacagaagcagcagcaccttcagcggcatcaaggagctggccagaagattcgccctgaccttcggcctggaccagctgaagaccagagaggccatcgccatgctgcacaaggacggcatcgagttcgccttcaaggagcccaacccccagggcgagagccacccccccctgaacctggccttcctggacatcctgagcgagttcagcagcaagctgctgagacaggacaagagaaccgtgtacgtgtacctggagaagttcatgaccttccagatgagcctgagaagagaggacgtgtggctgcccctgatgagctacagaaacagcctgctggccggcggcgacgacgacaccatgagcgtgatcagcggcatcagcagcagaggcagcaccgtgagaagcaagaagagcaagcccagcaccggcaagagaaaggtggtggagggcatgcagctgagcctgaccgaggagagcagcagcagcgacagcatgtggctgagcagagagcagaccctgcacacccccgtgatgatgcagaccccccagctgaccagcaccatcatgagagagcccaagagactgagacccgaggacagcttcatgagcgtgtaccccatgcagaccgagcaccaccagacccccctggactacaacacccaggtgacctggatgctggcccagagacagcaggaggaggccagacagcagcaggagagagccgccatgagctacgtgaagctgagaaccaacctgcagcacgccatcagaagaggcaccagcctgatggaggacgacgaggagcccatcgtggaggacgtgatgatgagcagcgagggcagaatcgaggacctgaacgagggcatggacttcgacaccatggacatcgacctgccccccagcaagaacagaagagagagaaccgagctgaagcccgacttcttcgaccccgccagcatcatggacgagagcgtgctgggcgtgagcatgttctag

SEQ ID NO: 101059 - DNA, 3696 bp, synthetic construct; identical to SEQ ID NO: 101057
  misc_feature 1..3696: note = Description of Artificial Sequence: Synthetic coding sequence
  source 1..3696: mol_type = other DNA

SEQ ID NO: 101060 - DNA, 3696 bp, synthetic construct; identical to SEQ ID NO: 101057
  misc_feature 1..3696: note = Description of Artificial Sequence: Synthetic coding sequence
  source 1..3696: mol_type = other DNA

SEQ ID NO: 101061 - DNA, 213 bp, synthetic construct
  misc_feature 1..213: note = Description of Artificial Sequence: Synthetic coding sequence
  source 1..213: mol_type = other DNA
atgatcgccgcccccgagatccccaccgacttcaacctgctgcaggagagcgagacccacttcagcagcgacaccgacttcgaggacatcgagggcaagaaccagaagcagggcaagggcaagacctgcaagaagggcaagaagggccccgccgagaagggcaagggcggcaacggcggcggcaagccccccagcggccccaacagaatgtag

SEQ ID NO: 101062 - DNA, 348 bp, synthetic construct
  misc_feature 1..348: note = Description of Artificial Sequence: Synthetic coding sequence
  source 1..348: mol_type = other DNA
atgatcgccgcccccgagatccccaccgacttcaacctgctgcaggagagcgagacccacttcagcagcgacaccgacttcgaggacatcgagggcaagaaccagaagcagggcaagggcaagacctgcaagaagggcaagaagggccccgccgagaagggcaagggcggcaacggcggcggcaagccccccagcggccccaacagaatgaacggccaccaccagcagaacggcgtggagaacatgatgctgttcgaggtggtgaagatgggcaagagcgccatgcagagcgtggtggacgactggatcgagagctacaagcacgacagagacatcgccctgctgtag

SEQ ID NO: 101063 - DNA, 510 bp, synthetic construct
  misc_feature 1..510: note = Description of Artificial Sequence: Synthetic coding sequence
  source 1..510: mol_type = other DNA
atgatcgccgcccccgagatccccaccgacttcaacctgctgcaggagagcgagacccacttcagcagcgacaccgacttcgaggacatcgagggcaagaaccagaagcagggcaagggcaagacctgcaagaagggcaagaagggccccgccgagaagggcaagggcggcaacggcggcggcaagccccccagcggccccaacagaatgaacggccaccaccagcagaacggcgtggagaacatgatgctgttcgaggtggtgaagatgggcaagagcgccatgcagagcgtggtggacgactggatcgagagctacaagcacgacagagacatcgccctgctggacctgatcaacttcttcatccagtgcagcggctgcaagggcgtggtgaccgccgagatgttcagacacatgcagaacagcgagatcatcagaaagatgaccgaggagttcgacgaggacagcggcgactaccccctgaccatggccggcccccagtggaagtag

SEQ ID NO: 101064 - DNA, 465 bp, synthetic construct
  misc_feature 1..465: note = Description of Artificial Sequence: Synthetic coding sequence
  source 1..465: mol_type = other DNA
atgatcgccgcccccgagatccccaccgacttcaacctgctgcaggagagcgagacccacttcagcagcgacaccgacttcgaggacatcgagggcaagaaccagaagcagggcaagggcaagacctgcaagaagggcaagaagggccccgccgagaagggcaagggcggcaacggcggcggcaagccccccagcggccccaacagaatgaacggccaccaccagcagaacggcgtggagaacatgatgctgttcgaggtggtgaagatgggcaagagcgccatgcagagcgtggtggacgactggatcgagagctacaagcacgacagagacatcgccctgctggacctgatcaacttcttcatccagtgcagcggctgcaagggcgtggtgaccgccgagatgttcagacacatgcagaacagcgagatcatcagaaagatgaccgaggagttcgacgagtag

SEQ ID NO: 101065 - DNA, 627 bp, synthetic construct
  misc_feature 1..627: note = Description of Artificial Sequence: Synthetic coding sequence
  source 1..627: mol_type = other DNA
atgatcgccgcccccgagatccccaccgacttcaacctgctgcaggagagcgagacccacttcagcagcgacaccgacttcgaggacatcgagggcaagaaccagaagcagggcaagggcaagacctgcaagaagggcaagaagggccccgccgagaagggcaagggcggcaacggcggcggcaagccccccagcggccccaacagaatgaacggccaccaccagcagaacggcgtggagaacatgatgctgttcgaggtggtgaagatgggcaagagcgccatgcagagcgtggtggacgactggatcgagagctacaagcacgacagagacatcgccctgctggacctgatcaacttcttcatccagtgcagcggctgcaagggcgtggtgaccgccgagatgttcagacacatgcagaacagcgagatcatcagaaagatgaccgaggagttcgacgaggacagcggcgactaccccctgaccatggccggcccccagtggaagaagttcaagagcagcttctgcgagttcatcggcgtgctggtgagacagtgccagtacagcatcatctacgacgagtacatgatggacaccgtgatcagcctgctgaccggcctgagctag

SEQ ID NO: 101066 - DNA, 1647 bp, synthetic construct
  misc_feature 1..1647: note = Description of Artificial Sequence: Synthetic coding sequence
  source 1..1647: mol_type = other DNA
atgatcgccgcccccgagatccccaccgacttcaacctgctgcaggagagcgagacccacttcagcagcgacaccgacttcgaggacatcgagggcaagaaccagaagcagggcaagggcaagacctgcaagaagggcaagaagggccccgccgagaagggcaagggcggcaacggcggcggcaagccccccagcggccccaacagaatgaacggccaccaccagcagaacggcgtggagaacatgatgctgttcgaggtggtgaagatgggcaagagcgccatgcagagcgtggtggacgactggatcgagagctacaagcacgacagagacatcgccctgctggacctgatcaacttcttcatccagtgcagcggctgcaagggcgtggtgaccgccgagatgttcagacacatgcagaacagcgagatcatcagaaagatgaccgaggagttcgacgaggacagcggcgactaccccctgaccatggccggcccccagtggaagaagttcaagagcagcttctgcgagttcatcggcgtgctggtgagacagtgccagtacagcatcatctacgacgagtacatgatggacaccgtgatcagcctgctgaccggcctgagcgacagccaggtgagagccttcagacacaccagcaccctggccgccatgaagctgatgaccgccctggtgaacgtggccctgaacctgagcatcaacatggacaacacccagagacagtacgaggccgagagaaacaagatgatcggcaagagagccaacgagagactggagctgctgctgcagaagagaaaggagctgcaggagaaccaggacgagatcgagaacatgatgaacgccatcttcaagggcgtgttcgtgcacagatacagagacgccatcgccgagatcagagccatctgcatcgaggagatcggcatctggatgaagatgtacagcgacgccttcctgaacgacagctacctgaagtacgtgggctggaccatgcacgacaagcagggcgaggtgagactgaagtgcctgaccgccctgcagggcctgtactacaacaaggagctgaacagcaagctggagctgttcaccagcagattcaaggacagaatcgtgagcatgaccctggacaaggagtacgacgtggccgtgcaggccatcaagctgctgaccctggtgctgcagagcagcgaggaggtgctgaccgccgaggactgcgagaacgtgtaccacctggtgtacagcgcccacagacccgtggccgtggccgccggcgagttcctgtacaagaagctgttcagcagaagagaccccgaggaggacggcatgatgaagagaagaggcagacagggccccaacgccaacctggtgaagaccctggtgttcttcttcctggagagcgagctgcacgagcacgccgcctacctggtggacagcatgtgggactgcgccaccgagctgctgaaggactgggagtgcatgaacagcctgctgctggaggagcccctgagcggcgaggaggccctgaccgacagacaggagagcgccctgatcgagatcatgctgtgcaccatcagacaggccgccgagtgccacccccccgtgggcagaggcaccggcaagagagtgctgtag

SEQ ID NO: 101067 - DNA, 123 bp, synthetic construct
  misc_feature 1..123: note = Description of Artificial Sequence: Synthetic coding sequence
  source 1..123: mol_type = other DNA
atgatcgccgcccccgagatccccaccgacttcaacctgctgcaggagagcgagacccacttcagcagcgacaccgacttcgaggacatcgagggcaagaaccagaagcagggcaagggctag

SEQ ID NO: 101068 - DNA, 3678 bp, synthetic construct
  misc_feature 1..3678: note = Description of Artificial Sequence: Synthetic coding sequence
  source 1..3678: mol_type = other DNA
atgagcagccccctgcagagagccgtgggcgacaccaagagagccctgagcgccagcagcagcagcagcgccagcctgcccttcgacgacagagacagcaaccacaccagcgagggcaacggcgacagcctgctggccgacgaggacaccgacttcgaggacagcctgaacagaaacgtgaagaagagagccgccaagagaccccccaagaccacccccgtggccaagcaccccaagaagggcagcagagtggtgcacagacacagcagaaagcagagcgagccccccgccaacgacctgttcaacgccgtgaaggccgccaagagcgacatgcagagcctggtggacgagtggctggacagctacaagcaggaccaggacgccggcttcctggagctggtgaacttcttcatccagagctgcggctgcaagggcatcgtgacccccgagatgttcaagaagatgagcaacagcgagatcatccagcacctgaccgagcagttcaacgaggacagcggcgactaccccctgatcgcccccggccccagctggaagaagttccagggcagcttctgcgagttcgtgagaaccctggtgtgccagtgccagtacagcctgctgtacgacggcttccccatggacgacctgatcagcctgctgaccggcctgagcgacagccaggtgagagccttcagacacaccagcaccctggccgccatgaagctgatgaccagcctggtgaaggtggccctgcagctgagcgtgcaccaggacaacaaccagagacagtacgaggccgagagaaacaagggccccggccagagagcccccgagagactggagagcctgctggagaagagaaaggagctgcaggagcaccaggaggagatcgagggcatgatgaacgccctgttcagaggcgtgttcgtgcacagatacagagacgtgctgcccgagatcagagccatctgcatcgaggagatcggctgctggatgcagagctacagcaccagcttcctgaccgacagctacctgaagtacatcggctggaccctgcacgacaagcacagagaggtgagactgaagtgcgtgaaggccctgaagggcctgtacggcaacagagacctgaccaccagactggagctgttcaccagcagattcaaggacagaatggtgagcatggtgatggacagagagtacgacgtggccgtggaggccgtgagactgctgatcctgatcctgaagaacatggagggcgtgctgaccgacgccgactgcgagagcgtgtaccccgtggtgtacgccagccacagaggcctggccagcgccgccggcgagttcctgtactggaagctgttctaccccgagtgcgagatcagaatgatgggcggcagagagcagagacagagccccggcgcccagagaaccttcttccagctgctgctgagcttcttcgtggagagcgagctgcacgaccacgccgcctacctggtggacagcctgtgggactgcgccggcgccagactgaaggactgggagggcctgaccagcctgctgctggagaaggaccagaacctgggcgacgtgcaggagagcaccctgatcgagatcctggtgagcagcgccagacaggccagcgagggccacccccccgtgggcagagtgaccggcagaaagggcctgaccagcaaggagagaaagacccaggccgacgacagagtgaagctgaccgagcacctgatccccctgctgccccagctgctggccaagttcagcgccgacgccgagaaggtgacccccctgctgcagctgctgagctgcttcgacctgcacatctactgcaccggcagactggagaagcacctggagctgttcctgcagcagctgcaggaggtggtggtgaagcacgccgagcccgccgtgctggaggccggcgcccacgccctgtacctgctgtgcaaccccgagttcaccttcttcagcagagccgacttcgccagaagccagctggtggacctgctgaccgacagattccagcaggagctggaggagctgctgcagagcagcttcctggacgaggacgaggtgtacaacctggccgccaccctgaagagactgagcgccttctacaacacccacgacctgaccagatgggagctgtacgagccctgctgccagctgctgcagaaggccgtggacaccggcgaggtgccccaccaggtgatcctgcccgccctgaccctggtgtacttcagcatcctgtggaccctgacccacatcagcaagagcgacgccagccagaagcagctgagcagcctgagagacagaatggtggccttctgcgagctgtgccagagctgcctgagcgacgtggacaccgagatccaggagcaggccttcgtgctgctgagcgacctgctgctgatcttcagcccccagatgatcgtgggcggcagagacttcctgagacccctggtgttcttccccgaggccaccctgcagagcgagctggccagcttcctgatggaccacgtgttcatccagcccggcgacctgggcagcggcgacagccaggaggaccacctgcagatcgagagactgcaccagagaagaagactgctggccggcttctgcaagctgctgctgtacggcgtgctggagatggacgccgccagcgacgtgttcaagcactacaacaagttctacaacgactacggcgacatcatcaaggagaccctgaccagagccagacagatcgacagaagccactgcagcagaatcctgctgctgagcctgaagcagctgtacaccgagctgctgcaggagcacggcccccagggcctgaacgagctgcccgccttcatcgagatgagagacctggccagaagattcgccctgagcttcggcccccagcagctgcagaacagagacctggtggtgatgctgcacaaggagggcatccagttcagcctgagcgagctgccccccgccggcagcagcaaccagccccccaacctggccttcctggagctgctgagcgagttcagccccagactgttccaccaggacaagcagctgctgctgagctacctggagaagtgcctgcagcacgtgagccaggcccccggccacccctggggccccgtgaccacctactgccacagcctgagccccgtggagaacaccgccgagaccagcccccaggtgctgcccagcagcaagagaagaagagtggagggccccgccaagcccaacagagaggacgtgagcagcagccaggaggagagcctgcagctgaacagcatcccccccacccccaccctgaccagcaccgccgtgaagagcagacagcccctgtggggcctgaaggagatggaggaggaggacggcagcgagctggacttcgcccagggccagcccgtggccggcaccgagagaagcagattcctgggcccccagtacttccagaccccccacaaccccagcggccccggcctgggcaaccagctgatgagactgagcctgatggaggaggacgaggaggaggagctggagatccaggacgagagcaacgaggagagacaggacaccgacatgcaggccagcagctacagcagcaccagcgagagaggcctggacctgctggacagcaccgagctggacatcgaggacttctag

SEQ ID NO: 101069 - DNA, 2667 bp, synthetic construct
  misc_feature 1..2667: note = Description of Artificial Sequence: Synthetic coding sequence
  source 1..2667: mol_type = other DNA
atgagcagccccctgcagagagccgtgggcgacaccaagagagccctgagcgccagcagcagcagcagcgccagcctgcccttcgacgacagagacagcaaccacaccagcgagggcaacggcgacagcctgctggccgacgaggacaccgacttcgaggacagcctgaacagaaacgtgaagaagagagccgccaagagaccccccaagaccacccccgtggccaagcaccccaagaagggcagcagagtggtgcacagacacagcagaaagcagagcgagccccccgccaacgacctgttcaacgccgtgaaggccgccaagagcgacatgcagagcctggtggacgagtggctggacagctacaagcaggaccaggacgccggcttcctggagctggtgaacttcttcatccagagctgcggctgcaagggcatcgtgacccccgagatgttcaagaagatgagcaacagcgagatcatccagcacctgaccgagcagttcaacgagatggacgacctgatcagcctgctgaccggcctgagcgacagccaggtgagagccttcagacacaccagcaccctggccgccatgaagctgatgaccagcctggtgaaggtggccctgcagctgagcgtgcaccaggacaacaaccagagacagtacgaggccgagagaaacaagggccccggccagagagcccccgagagactggagagcctgctggagaagagaaaggagctgcaggagcaccaggaggagatcgagggcatgatgaacgccctgttcagaggcgtgttcgtgcacagatacagagacgtgctgcccgagatcagagccatctgcatcgaggagatcggctgctggatgcagagctacagcaccagcttcctgaccgacagctacctgaagtacatcggctggaccctgcacgacaagcacagagaggtgagactgaagtgcgtgaaggccctgaagggcctgtacggcaacagagacctgaccaccagactggagctgttcaccagcagattcaaggacagaatggtgagcatggtgatggacagagagtacgacgtggccgtggaggccgtgagactgctgatcctgatcctgaagaacatggagggcgtgctgaccgacgccgactgcgagagcgtgtaccccgtggtgtacgccagccacagaggcctggccagcgccgccggcgagttcctgtactggaagctgttctaccccgagtgcgagatcagaatgatgggcggcagagagcagagacagagccccggcgcccagagaaccttcttccagctgctgctgagcttcttcgtggagagcgagctgcacgaccacgccgcctacctggtggacagcctgtgggactgcgccggcgccagactgaaggactgggagggcctgaccagcctgctgctggagaaggaccagaacctgggcgacgtgcaggagagcaccctgatcgagatcctggtgagcagcgccagacaggccagcgagggccacccccccgtgggcagagtgaccggcagaaagggcctgaccagcaaggagagaaagacccaggccgacgacagagtgaagctgaccgagcacctgatccccctgctgccccagctgctggccaagttcagcgccgacgccgagaaggtgacccccctgctgcagctgctgagctgcttcgacctgcacatctactgcaccggcagactggagaagcacctggagctgttcctgcagcagctgcaggaggtggtggtgaagcacgccgagcccgccgtgctggaggccggcgcccacgccctgtacctgctgtgcaaccccgagttcaccttcttcagcagagccgacttcgccagaagccagctggtggacctgctgaccgacagattccagcaggagctggaggagctgctgcagagcagcttcctggacgaggacgaggtgtacaacctggccgccaccctgaagagactgagcgccttctacaacacccacgacctgaccagatgggagctgtacgagccctgctgccagctgctgcagaaggccgtggacaccggcgaggtgccccaccaggtgatcctgcccgccctgaccctggtgtacttcagcatcctgtggaccctgacccacagcctgagccccgtggagaacaccgccgagaccagcccccaggtgctgcccagcagcaagagaagaagagtggagggccccgccaagcccaacagagaggacgtgagcagcagccaggaggagagcctgcagctgaacagcatcccccccacccccaccctgaccagcaccgccgtgaagagcagacagcccctgtggggcctgaaggagatggaggaggaggacggcagcgagctggacttcgcccagggccagcccgtggccggcaccgagagaagcagattcctgggcccccagtacttccagaccccccacaaccccagcggccccggcctgggcaaccagctgatgagactgagcctgatggaggaggacgaggaggaggagctggagatccaggacgagagcaacgaggagagacaggacaccgacatgcaggccagcagctacagcagcaccagcgagagaggcctggacctgctggacagcaccgagctggacatcgaggacttctag

SEQ ID NO: 101070 - DNA, 789 bp, synthetic construct
  misc_feature 1..789: note = Description of Artificial Sequence: Synthetic coding sequence
  source 1..789: mol_type = other DNA
atgctgcacaaggagggcatccagttcagcctgagcgagctgccccccgccggcagcagcaaccagccccccaacctggccttcctggagctgctgagcgagttcagccccagactgttccaccaggacaagcagctgctgctgagctacctggagaagtgcctgcagcacgtgagccaggcccccggccacccctggggccccgtgaccacctactgccacagcctgagccccgtggagaacaccgccgagaccagcccccaggtgctgcccagcagcaagagaagaagagtggagggccccgccaagcccaacagagaggacgtgagcagcagccaggaggagagcctgcagctgaacagcatcccccccacccccaccctgaccagcaccgccgtgaagagcagacagcccctgtggggcctgaaggagatggaggaggaggacggcagcgagctggacttcgcccagggcagccagcccgtggccggcaccgagagaagcagattcctgggcccccagtacttccagaccccccacaaccccagcggccccggcctgggcaaccagctgatgagactgagcctgatggaggaggacgaggaggaggagctggagatccaggacgagagcaacgaggagagacaggacaccgacatgcaggccagcagctacagcagcaccagcgagagaggcctggacctgctggacagcaccgagctggacatcgagatcaccgagagcctgcccctgctgggcaagagcccccacccctacaacagcagatag

SEQ ID NO: 101071 - DNA, 438 bp, synthetic construct
  misc_feature 1..438: note = Description of Artificial Sequence: Synthetic coding sequence
  source 1..438: mol_type = other DNA
atgagcagccccctgcagagagccgtgggcgacaccaagagagccctgagcgccagcagcagcagcagcgccagcctgcccttcgacgacagagacagcaaccacaccagcgagggcaacggcgacagcctgctggccgacgaggacaccgacttcgaggacagcctgaacagaaacgtgaagaagagagccgccaagagaccccccaagaccacccccgtggccaagcaccccaagaagggcagcagagtggtgcacagacacagcagaaagcagagcgagccccccgccaacgacctgttcaacgccgtgaaggccgccaagagcgacatgcagagcctggtggacgagtggctggacagctacaagcaggaccaggacgccggcttcctggagctggtgaacttcttcatccagagctgcggctgcaagggctag

SEQ ID NO: 101072 - DNA, 339 bp, synthetic construct
  misc_feature 1..339: note = Description of Artificial Sequence: Synthetic coding sequence
  source 1..339: mol_type = other DNA
atgagcagccccctgcagagagccgtgggcgacaccaagagagccctgagcgccagcagcagcagcagcgccagcctgcccttcgacgacagagacagcaaccacaccagcgagggcaacggcgacagcctgctggccgacgaggacaccgacttcgaggacagcctgaacagaaacgtgaagaagagagccgccaagagaccccccaagaccacccccgtggccaagcaccccaagaagggcagcagagtggtgcacagacacagcagaaagcagagcgagccccccgccaacgacctgttcaacgccgtgaaggccgccaagagcgacatgcagtag

SEQ ID NO: 101073 - DNA, 3678 bp, synthetic construct; identical to SEQ ID NO: 101068
  misc_feature 1..3678: note = Description of Artificial Sequence: Synthetic coding sequence
  source 1..3678: mol_type = other DNA

SEQ ID NO: 101074 - DNA, 567 bp, synthetic construct
  misc_feature 1..567: note = Description of Artificial Sequence: Synthetic coding sequence
  source 1..567: mol_type = other DNA
atgagcagccccctgcagagagccgtgggcgacaccaagagagccctgagcgccagcagcagcagcagcgccagcctgcccttcgacgacagagacagcaaccacaccagcgagggcaacggcgacagcctgctggccgacgaggacaccgacttcgaggacagcctgaacagaaacgtgaagaagagagccgccaagagaccccccaagaccacccccgtggccaagcaccccaagaagggcagcagagtggtgcacagacacagcagaaagcagagcgagccccccgccaacgacctgttcaacgccgtgaaggccgccaagagcgacatgcaggacagcggcgactaccccctgatcgcccccggccccagctggaagaagttccagggcagcttctgcgagttcgtgagaaccctggtgtgccagtgccagtacagcctgctgtacgacggcttccccatggacgacctgatcagcctgctgaccggcctgagcgacagccaggtgagagccttcagacacaccagcaccctggccgccatgaagctgatgaccagcctgtag

SEQ ID NO: 101075 - DNA, 1047 bp, synthetic construct
  misc_feature 1..1047: note = Description of Artificial Sequence: Synthetic coding sequence
  source 1..1047: mol_type = other DNA
atggtgtggccctgggtggccatggccagcagatggggccccctgatcggcctggccccctgctgcctgtggctgctgggcgccgtgctgctgatggacgccagcgccagacccgccaaccacagcagcaccagagagagagtggccaacagagaggagaacgagatcctgccccccgaccacctgaacggcgtgaagctggagatggacggccacctgaacagaggcttccaccaggaggtgttcctgggcaaggacctgggcggcttcgacgaggacgccgagcccagaagaagcagaagaaagctgatggtgatcttcagcaaggtggacgtgaacaccgacagaaagatcagcgccaaggagatgcagagatggatcatggagaagaccgccgagcacttccaggaggccatggaggagagcaagacccacttcagagccgtggaccccgacggcgacggccacgtgagctgggacgagtacaaggtgaagttcctggccagcaagggccacagcgagaaggaggtggccgacgccatcagactgaacgaggagctgaaggtggacgaggagacccaggaggtgctggagaacctgaaggacagatggtaccaggccgacagcccccccgccgacctgctgctgaccgaggaggagttcctgagcttcctgcaccccgagcacagcagaggcatgctgagattcatggtgaaggagatcgtgagagacctggaccaggacggcgacaagcagctgagcgtgcccgagttcatcagcctgcccgtgggcaccgtggagaaccagcagggccaggacatcgacgacaactgggtgaaggacagaaagaaggagttcgaggagctgatcgacagcaaccacgacggcatcgtgaccgccgaggagctggagaacgtgcccaccctgcccctgcagcccatcggcaccctgaacagccacttcgtgagactggccgccgagctgggcggcggcaaggccaccctgacctgcgcccccctggccagaagagccacctggaccccctag

SEQ ID NO: 101076 - DNA, 1089 bp, synthetic construct
  misc_feature 1..1089: note = Description of Artificial Sequence: Synthetic coding sequence
  source 1..1089: mol_type = other DNA
atggtgtggccctgggtggccatggccagcagatggggccccctgatcggcctggccccctgctgcctgtggctgctgggcgccgtgctgctgatggacgccagcgccagacccgccaaccacagcagcaccagagagagagtggccaacagagaggagaacgagatcctgccccccgaccacctgaacggcgtgaagctggagatggacggccacctgaacagaggcttccaccaggaggtgttcctgggcaaggacctgggcggcttcgacgaggacgccgagcccagaagaagcagaagaaagctgatggtgatcttcagcaaggtggacgtgaacaccgacagaaagatcagcgccaaggagatgcagagatggatcatggagaagaccgccgagcacttccaggaggccatggaggagagcaagacccacttcagagccgtggaccccgacggcgacggccacgtgagctgggacgagtacaaggtgaagttcctggccagcaagggccacagcgagaaggaggtggccgacgccatcagactgaacgaggagctgaaggtggacgaggagacccaggaggtgctggagaacctgaaggacagatggtaccaggccgacagcccccccgccgacctgctgctgaccgaggaggagttcctgagcttcctgcaccccgagcacagcagaggcatgctgagattcatggtgaaggagatcgtgagagacctggaccaggacggcgacaagcagctgagcgtgcccgagttcatcagcctgcccgtgggcaccgtggagaaccagcagggccaggacatcgacgacaactgggtgaaggacagaaagaaggagttcgaggagctgatcgacagcaaccacgacggcatcgtgaccgccgaggagctggagagctacatggaccccatgaacgagtacaacgccctgaacgaggccaagcagatgatcgccgtggccgacgagaaccagaaccaccacctggagcccgaggaggtgctgaagtacagcgagttcttcaccggcagcaagctggtggactacgccagaagcgtgcacgaggagttctag

SEQ ID NO: 101077 - DNA, 732 bp, synthetic construct
  misc_feature 1..732: note = Description of Artificial Sequence: Synthetic coding sequence
  source 1..732: mol_type = other DNA
tgactggagatggacggccacctgaacagaggcttccaccaggaggtgttcctgggcaaggacctgggcggcttcgacgaggacgccgagcccagaagaagcagaagaaagctgatggtgatcttcagcaaggtggacgtgaacaccgacagaaagatcagcgccaaggagatgcagagatggatcatggagaagaccgccgagcacttccaggaggccatggaggagagcaagacccacttcagagccgtggaccccgacggcgacggccacgtgagctgggacgagtacaaggtgaagttcctggccagcaagggccacagcgagaaggaggtggccgacgccatcagactgaacgaggagctgaaggtggacgaggagagcagcaccagcagaaacttcctggacctgagagccggcgtgtgcagacccagatacccccaggccgcccccctgagcgcccaggaggtgctggagaacctgaaggacagatggtaccaggccgacagcccccccgccgacctgctgctgaccgaggaggagttcctgagcttcctgcaccccgagcacagcagaggcatgctgagattcatggtgaaggagatcgtgagagacctggaccaggacggcgacaagcagctgagcgtgcccgagttcatcagcctgcccgtgggcaccgtggagaaccagcagggccaggacatcgacgacaactgggtgaaggacagatag

SEQ ID NO: 101078 - DNA, 609 bp, synthetic construct
  misc_feature 1..609: note = Description of Artificial Sequence: Synthetic coding sequence
  source 1..609: mol_type = other DNA
atggtgtggccctgggtggccatggccagcagatggggccccctgatcggcctggccccctgctgcctgtggctgctgggcgccgtgctgctgatggacgccagcgccagacccgccaaccacagcagcaccagagagagagtggccaacagagaggagaacgagatcctgccccccgaccacctgaacggcgtgaagctggagatggacggccacctgaacagaggcttccaccaggaggtgttcctgggcaaggacctgggcggcttcgacgaggacgccgagcccagaagaagcagaagaaagctgatggtgatcttcagcaaggtggacgtgaacaccgacagaaagatcagcgccaaggagatgcagagatggatcatggagaagaccgccgagcacttccaggaggccatggaggagagcaagacccacttcagagccgtggaccccgacggcgacggccacgtgagctgggacgagtacaaggtgaagttcctggccagcaagggccacagcgagaaggaggtggccgacgccatcagactgaacgaggagctgaaggtggacgaggagagacacggcccccccggccccagagccctgtag

SEQ ID NO: 101079 - DNA, 636 bp, synthetic construct
  misc_feature 1..636: note = Description of Artificial Sequence: Synthetic coding sequence
  source 1..636: mol_type = other DNA
atggccgtggtgcccctgctgctgctgggcggcctgtggagcgccgtgggcgccagcagcctgggcgtggtgacctgcggcagcgtggtgaagctgctgaacaccagacacaacgtgagactgcacagccacgacgtgagatacggcagcggcagcggccagcagagcgtgaccggcgtgaccagcgtggacgacagcaacagctactggagaatcagaggcaagagcgccaccgtgtgcgagagaggcacccccatcaagtgcggccagcccatcagactgacccacgtgaacaccggcagaaacctgcacagccaccacttcaccagccccctgagcggcaaccaggaggtgagcgccttcggcgaggagggcgagggcgactacctggacgactggaccgtgctgtgcaacggcccctactgggtgagagacggcgaggtgagattcaagcacagcagcaccgaggtgctgctgagcgtgaccggcgagcagtacggcagacccatcagcggccagaaggaggtgcacggcatggcccagcccagccagaacaactactggaaggccatggagggcatcttcatgaagcccagcgagctgctgaaggccgaggcccaccacgccgagctgtag

SEQ ID NO: 101080 - DNA, 666 bp, synthetic construct
  misc_feature 1..666: note = Description of Artificial Sequence: Synthetic coding sequence
  source 1..666: mol_type = other DNA
atgtggagcgccggcagaggcggcgccgcctggcccgtgctgctgggcctgctgctggccctgctggtgcccggcggcggcgccgccaagaccggcgccgagctggtgacctgcggcagcgtgctgaagctgctgaacacccaccacagagtgagactgcacagccacgacatcaagtacggcagcggcagcggccagcagagcgtgaccggcgtggaggccagcgacgacgccaacagctactggagaatcagaggcggcagcgagggcggctgccccagaggcagccccgtgagatgcggccaggccgtgagactgacccacgtgctgaccggcaagaacctgcacacccaccacttccccagccccctgagcaacaaccaggaggtgagcgccttcggcgaggacggcgagggcgacgacctggacctgtggaccgtgagatgcagcggccagcactgggagagagaggccgccgtgagattccagcacgtgggcaccagcgtgttcctgagcgtgaccggcgagcagtacggcagccccatcagaggccagcacgaggtgcacggcatgcccagcgccaacacccacaacacctggaaggccatggagggcatcttcatcaagcccagcgtggagcccagcgccggccacgacgagctgtag

SEQ ID NO: 101081 - DNA, 2058 bp, synthetic construct
  misc_feature 1..2058: note = Description of Artificial Sequence: Synthetic coding sequence
  source 1..2058: mol_type = other DNA
atggacgtgtgcgtgagactggccctgtggctgctgtggggcctgctgctgcaccagggccagagcctgagccacagccacagcgagaaggccaccggcaccagcagcggcgccaacagcgaggagagcaccgccgccgagttctgcagaatcgacaagcccctgtgccacagcgaggacgagaagctgagcttcgaggccgtgagaaacatccacaagctgatggacgacgacgccaacggcgacgtggacgtggaggagagcgacgagttcctgagagaggacctgaactaccacgaccccaccgtgaagcacagcaccttccacggcgaggacaagctgatcagcgtggaggacctgtggaaggcctggaagagcagcgaggtgtacaactggaccgtggacgaggtggtgcagtggctgatcacctacgtggagctgccccagtacgaggagaccttcagaaagctgcagctgagcggccacgccatgcccagactggccgtgaccaacaccaccatgaccggcaccgtgctgaagatgaccgacagaagccacagacagaagctgcagctgaaggccctggacaccgtgctgttcggcccccccctgctgaccagacacaaccacctgaaggacttcatgctggtggtgagcatcgtgatcggcgtgggcggctgctggttcgcctacatccagaacagatacagcaaggagcacatgaagaagatgatgaaggacctggagggcctgcacagagccgagcagagcctgcacgacctgcaggagagactgcacaaggcccaggaggagcacagaaccgtggaggtggagaaggtgcacctggagaagaagctgagagacgagatcaacctggccaagcaggaggcccagagactgaaggagctgagagagggcaccgagaacgagagaagcagacagaagtacgccgaggaggagctggagcaggtgagagaggccctgagaaaggccgagaaggagctggagagccacagcagctggtacgcccccgaggccctgcagaagtggctgcagctgacccacgaggtggaggtgcagtactacaacatcaagaagcagaacgccgagaagcagctgctggtggccaaggagggcgccgagaagatcaagaagaagagaaacaccctgttcggcaccttccacgtggcccacagcagcagcctggacgacgtggaccacaagatcctgaccgccaagcaggccctgagcgaggtgaccgccgccctgagagagagactgcacagatggcagcagatcgagatcctgtgcggcttccagatcgtgaacaaccccggcatccacagcctggtggccgccctgaacatcgaccccagctggatgggcagcaccagacccaaccccgcccacttcatcatgaccgacgacgtggacgacatggacgaggagatcgtgagccccctgagcatgcagagccccagcctgcagagcagcgtgagacagagactgaccgagccccagcacggcctgggcagccagagagacctgacccacagcgacagcgagagcagcctgcacatgagcgacagacagagagtggcccccaagcccccccagatgagcagagccgccgacgaggccctgaacgccatgaccagcaacggcagccacagactgatcgagggcgtgcaccccggcagcctggtggagaagctgcccgacagccccgccctggccaagaaggccctgctggccctgaaccacggcctggacaaggcccacagcctgatggagctgagccccagcgccccccccggcggcagcccccacctggacagcagcagaagccacagccccagcagccccgaccccgacacccccagccccgtgggcgacagcagagccctgcaggccagcagaaacaccagaatcccccacctggccggcaagaaggccgtggccgaggaggacaacggcagcatcggcgaggagaccgacagcagccccggcagaaagaagttccccctgaagatcttcaagaagcccctgaagaagtag

SEQ ID NO: 101082 - DNA, 2502 bp, synthetic construct
  misc_feature 1..2502: note = Description of Artificial Sequence: Synthetic coding sequence
  source 1..2502: mol_type = other DNA
atgaacgccgccggcatcagagcccccgaggccgccggcgccgacggcaccagactggcccccggcggcagcccctgcctgagaagaagaggcagacccgaggagagccccgccgccgtggtggcccccagaggcgccggcgagctgcaggccgccggcgcccccctgagattccaccccgccagccccagaagactgcaccccgccagcacccccggccccgcctggggctggctgctgagaagaagaagatgggccgccctgctggtgctgggcctgctggtggccggcgccgccgacggctgcgagctggtgcccagacacctgagaggcagaagagccaccggcagcgccgccaccgccgccagcagccccgccgccgccgccggcgacagccccgccctgatgaccgacccctgcatgagcctgagccccccctgcttcaccgaggaggacagattcagcctggaggccctgcagaccatccacaagcagatggacgacgacaaggacggcggcatcgaggtggaggagagcgacgagttcatcagagaggacatgaagtacaaggacgccaccaacaagcacagccacctgcacagagaggacaagcacatcaccatcgaggacctgtggaagagatggaagaccagcgaggtgcacaactggaccctggaggacaccctgcagtggctgatcgagttcgtggagctgccccagtacgagaagaacttcagagacaacaacgtgaagggcaccaccctgcccagaatcgccgtgcacgagcccagcttcatgatcagccagctgaagatcagcgacagaagccacagacagaagctgcagctgaaggccctggacgtggtgctgttcggccccctgaccagacccccccacaactggatgaaggacttcatcctgaccgtgagcatcgtgatcggcgtgggcggctgctggttcgcctacacccagaacaagaccagcaaggagcacgtggccaagatgatgaaggacctggagagcctgcagaccgccgagcagagcctgatggacctgcaggagagactggagaaggcccaggaggagaacagaaacgtggccgtggagaagcagaacctggagagaaagatgatggacgagatcaactacgccaaggaggaggcctgcagactgagagagctgagagagggcgccgagtgcgagctgagcagaagacagtacgccgagcaggagctggagcaggtgagaatggccctgaagaaggccgagaaggagttcgagctgagaagcagctggagcgtgcccgacgccctgcagaagtggctgcagctgacccacgaggtggaggtgcagtactacaacatcaagagacagaacgccgagatgcagctggccatcgccaaggacgaggccgagaagatcaagaagaagagaagcaccgtgttcggcaccctgcacgtggcccacagcagcagcctggacgaggtggaccacaagatcctggaggccaagaaggccctgagcgagctgaccacctgcctgagagagagactgttcagatggcagcagatcgagaagatctgcggcttccagatcgcccacaacagcggcctgcccagcctgaccagcagcctgtacagcgaccacagctgggtggtgatgcccagagtgagcatccccccctaccccatcgccggcggcgtggacgacctggacgaggacaccccccccatcgtgagccagttccccggcaccatggccaagccccccggcagcctggccagaagcagcagcctgtgcagaagcagaagaagcatcgtgcccagcagcccccagccccagagagcccagctggccccccacgccccccaccccagccaccccagacacccccaccacccccagcacaccccccacagcctgcccagccccgaccccgacatcctgagcgtgagcagctgccccgccctgtacagaaacgaggaggaggaggaggccatctacttcagcgccgagaagcagtgggaggtgcccgacaccgccagcgagtgcgacagcctgaacagcagcatcggcagaaagcagagcccccccctgagcctggagatctaccagaccctgagccccagaaagatcagcagagacgaggtgagcctggaggacagcagcagaggcgacagccccgtgaccgtggacgtgagctggggcagccccgactgcgtgggcctgaccgagaccaagagcatgatcttcagccccgccagcaaggtgtacaacggcatcctggagaagagctgcagcatgaaccagctgagcagcggcatccccgtgcccaagcccagacacaccagctgcagcagcgccggcaacgacagcaagcccgtgcaggaggcccccagcgtggccagaatcagcagcatcccccacgacctgtgccacaacggcgagaagagcaagaagcccagcaagatcaagagcctgttcaagaagaagagcaagtag

SEQ ID NO: 101083 - DNA, 2526 bp, synthetic construct
  misc_feature 1..2526: note = Description of Artificial Sequence: Synthetic coding sequence
  source 1..2526: mol_type = other DNA
atgaacgccgccggcatcagagcccccgaggccgccggcgccgacggcaccagactggcccccggcggcagcccctgcctgagaagaagaggcagacccgaggagagccccgccgccgtggtggcccccagaggcgccggcgagctgcaggccgccggcgcccccctgagattccaccccgccagccccagaagactgcaccccgccagcacccccggccccgcctggggctggctgctgagaagaagaagatgggccgccctgctggtgctgggcctgctggtggccggcgccgccgacggctgcgagctggtgcccagacacctgagaggcagaagagccaccggcagcgccgccaccgccgccagcagccccgccgccgccgccggcgacagccccgccctgatgaccgacccctgcatgagcctgagccccccctgcttcaccgaggaggacagattcagcctggaggccctgcagaccatccacaagcagatggacgacgacaaggacggcggcatcgaggtggaggagagcgacgagttcatcagagaggacatgaagtacaaggacgccaccaacaagcacagccacctgcacagagaggacaagcacatcaccatcgaggacctgtggaagagatggaagaccagcgaggtgcacaactggaccctggaggacaccctgcagtggctgatcgagttcgtggagctgccccagtacgagaagaacttcagagacaacaacgtgaagggcaccaccctgcccagaatcgccgtgcacgagcccagcttcatgatcagccagctgaagatcagcgacagaagccacagacagaagctgcagctgaaggccctggacgtggtgctgttcggccccctgaccagacccccccacaactggatgaaggacttcatcctgaccgtgagcatcgtgatcggcgtgggcggctgctggttcgcctacacccagaacaagaccagcaaggagcacgtggccaagatgatgaaggacctggagagcctgcagaccgccgagcagagcctgatggacctgcaggagagactggagaaggcccaggaggagaacagaaacgtggccgtggagaagcagaacctggagagaaagatgatggacgagatcaactacgccaaggaggaggcctgcagactgagagagctgagagagggcgccgagtgcgagctgagcagaagacagtacgccgagcaggagctggagcaggtgagaatggccctgaagaaggccgagaaggagttcgagctgagaagcagctggagcgtgcccgacgccctgcagaagtggctgcagctgacccacgaggtggaggtgcagtactacaacatcaagagacagaacgccgagatgcagctggccatcgccaaggacgaggtggccgccagctacctgatccaggccgagaagatcaagaagaagagaagcaccgtgttcggcaccctgcacgtggcccacagcagcagcctggacgaggtggaccacaagatcctggaggccaagaaggccctgagcgagctgaccacctgcctgagagagagactgttcagatggcagcagatcgagaagatctgcggcttccagatcgcccacaacagcggcctgcccagcctgaccagcagcctgtacagcgaccacagctgggtggtgatgcccagagtgagcatccccccctaccccatcgccggcggcgtggacgacctggacgaggacaccccccccatcgtgagccagttccccggcaccatggccaagccccccggcagcctggccagaagcagcagcctgtgcagaagcagaagaagcatcgtgcccagcagcccccagccccagagagcccagctggccccccacgccccccaccccagccaccccagacacccccaccacccccagcacaccccccacagcctgcccagccccgaccccgacatcctgagcgtgagcagctgccccgccctgtacagaaacgaggaggaggaggaggccatctacttcagcgccgagaagcagtgggaggtgcccgacaccgccagcgagtgcgacagcctgaacagcagcatcggcagaaagcagagcccccccctgagcctggagatctaccagaccctgagccccagaaagatcagcagagacgaggtgagcctggaggacagcagcagaggcgacagccccgtgaccgtggacgtgagctggggcagccccgactgcgtgggcctgaccgagaccaagagcatgatcttcagccccgccagcaaggtgtacaacggcatcctggagaagagctgcagcatgaaccagctgagcagcggcatccccgtgcccaagcccagacacaccagctgcagcagcgccggcaacgacagcaagcccgtgcaggaggcccccagcgtggccagaatcagcagcatcccccacgacctgtgccacaacggcgagaagagcaagaagcccagcaagatcaagagcctgttcaagaagaagagcaagtag

SEQ ID NO: 101084 - DNA, 2061 bp, synthetic construct
  misc_feature 1..2061: note = Description of Artificial Sequence: Synthetic coding sequence
  source 1..2061: mol_type = other DNA
atgaacgccgccggcatcagagcccccgaggccgccggcgccgacggcaccagactggcccccggcggcagcccctgcctgagaagaagaggcagacccgaggagagccccgccgccgtggtggcccccagaggcgccggcgagctgcaggccgccggcgcccccctgagattccaccccgccagccccagaagactgcaccccgccagcacccccggccccgcctggggctggctgctgagaagaagaagatgggccgccctgctggtgctgggcctgctggtggccggcgccgccgacggctgcgagctggtgcccagacacctgagaggcagaagagccaccggcagcgccgccaccgccgccagcagccccgccgccgccgccggcgacagccccgccctgatgaccgacccctgcatgagcctgagccccccctgcttcaccgaggaggacagattcagcctggaggccctgcagaccatccacaagcagatggacgacgacaaggacggcggcatcgaggtggaggagagcgacgagttcatcagagaggacatgaagtacaaggacgccaccaacaagcacagccacctgcacagagaggacaagcacatcaccatcgaggacctgtggaagagatggaagaccagcgaggtgcacaactggaccctggaggacaccctgcagtggctgatcgagttcgtggagctgccccagtacgagaagaacttcagagacaacaacgtgaagggcaccaccctgcccagaatcgccgtgcacgagcccagcttcatgatcagccagctgaagatcagcgacagaagccacagacagaagctgcagctgaaggccctggacgtggtgctgttcggccccctgaccagacccccccacaactggatgaaggacttcatcctgaccgtgagcatcgtgatcggcgtgggcggctgctggttcgcctacacccagaacaagaccagcaaggagcacgtggccaagatgatgaaggacctggagagcctgcagaccgccgagcagagcctgatggacctgcaggagagactggagaaggcccaggaggagaacagaaacgtggccgtggagaagcagaacctggagagaaagatgatggacgagatcaactacgccaaggaggaggcctgcagactgagagagctgagagagggcgccgagtgcgagctgagcagaagacagtacgccgagcaggagctggagcaggtgagaatggccctgaagaaggccgagaaggagttcgagctgagaagcagctggagcgtgcccgacgccctgcagaagtggctgcagctgacccacgaggtggaggtgcagtactacaacatcaagagacagaacgccgagatgcagctggccatcgccaaggacgaggccgagaagatcaagaagaagagaagcaccgtgttcggcaccctgcacgtggcccacagcagcagcctggacgaggtggaccacaagatcctggaggccaagaaggccctgagcgagctgaccacctgcctgagagagagactgttcagatggcagcagatcgagaagatctgcggcttccagatcgcccacaacagcggcctgcccagcctgaccagcagcctgtacagcgaccacagctgggtggtgatgcccagagtgagcatccccccctaccccatcgccggcggcgtggacgacctggacgaggacaccccccccatcgtgagccagttccccggcaccatggccaagccccccggcagcctggccagaagcagcagcctgtgcagaagcagaagaagcatcgtgcccagcagcccccagccccagagagcccagctggccccccacgccccccaccccagccaccccagacacccccaccacccccagcacaccccccacagcctgcccagccccgaccccgacatcctgagcgtgagcagctgccccgccctgtacagaaacgaggaggaggaggaggccatctacttcagcgccgagaagcagtgcatccacctgggcctgggcgcctgcaagagcgagtag

SEQ ID NO: 101085 - DNA, 2241 bp, synthetic construct
  misc_feature 1..2241: note = Description of Artificial Sequence: Synthetic coding sequence
  source 1..2241: mol_type = other DNA
ctgctggtgctgggcctgctggtggccggcgccgccgacggctgcgagctggtgcccagacacctgagaggcagaagagccaccggcagcgccgccaccgccgccagcagccccgccgccgccgccggcgacagccccgccctgatgaccgacccctgcatgagcctgagccccccctgcttcaccgaggaggacagattcagcctggaggccctgcagaccatccacaagcagatggacgacgacaaggacggcggcatcgaggtggaggagagcgacgagttcatcagagaggacatgaagtacaaggacgccaccaacaagcacagccacctgcacagagaggacaagcacatcaccatcgaggacctgtggaagagatggaagaccagcgaggtgcacaactggaccctggaggacaccctgcagtggctgatcgagttcgtggagctgccccagtacgagaagaacttcagagacaacaacgtgaagggcaccaccctgcccagaatcgccgtgcacgagcccagcttcatgatcagccagctgaagatcagcgacagaagccacagacagaagctgcagctgaaggccctggacgtggtgctgttcggccccctgaccagacccccccacaactggatgaaggacttcatcctgaccgtgagcatcgtgatcggcgtgggcggctgctggttcgcctacacccagaacaagaccagcaaggagcacgtggccaagatgatgaaggacctggagagcctgcagaccgccgagcagagcctgatggacctgcaggagagactggagaaggcccaggaggagaacagaaacgtggccgtggagaagcagaacctggagagaaagatgatggacgagatcaactacgccaaggaggaggcctgcagactgagagagctgagagagggcgccgagtgcgagctgagcagaagacagtacgccgagcaggagctggagcaggtgagaatggccctgaagaaggccgagaaggagttcgagctgagaagcagctggagcgtgcccgacgccctgcagaagtggctgcagctgacccacgaggtggaggtgcagtactacaacatcaagagacagaacgccgagatgcagctggccatcgccaaggacgaggccgagaagatcaagaagaagagaagcaccgtgttcggcaccctgcacgtggcccacagcagcagcctggacgaggtggaccacaagatcctggaggccaagaaggccctgagcgagctgaccacctgcctgagagagagactgttcagatggcagcagatcgagaagatctgcggcttccagatcgcccacaacagcggcctgcccagcctgaccagcagcctgtacagcgaccacagctgggtggtgatgcccagagtgagcatccccccctaccccatcgccggcggcgtggacgacctggacgaggacaccccccccatcgtgagccagttccccggcaccatggccaagccccccggcagcctggccagaagcagcagcctgtgcagaagcagaagaagcatcgtgcccagcagcccccagccccagagagcccagctggccccccacgccccccaccccagccaccccagacacccccaccacccccagcacaccccccacagcctgcccagccccgaccccgacatcctgagcgtgagcagctgccccgccctgtacagaaacgaggaggaggaggaggccatctacttcagcgccgagaagcagtgggaggtgcccgacaccgccagcgagtgcgacagcctgaacagcagcatcggcagaaagcagagcccccccctgagcctggagatctaccagaccctgagccccagaaagatcagcagagacgaggtgagcctggaggacagcagcagaggcgacagccccgtgaccgtggacgtgagctggggcagccccgactgcgtgggcctgaccgagaccaagagcatgatcttcagccccgccagcaaggtgtacaacggcatcctggagaagagctgcagcatgaaccagctgagcagcggcatccccgtgcccaagcccagacacaccagctgcagcagcgccggcaacgacagcaagcccgtgcaggaggcccccagcgtggccagaatcagcagcatcccccacgacctgtgccacaacggcgagaagagcaagaagcccagcaagatcaagagcctgttcaagaagaagagcaagtag

SEQ ID NO: 101086 - DNA, 2265 bp, synthetic construct
  misc_feature 1..2265: note = Description of Artificial Sequence: Synthetic coding sequence
  source 1..2265: mol_type = other DNA
ctgctggtgctgggcctgctggtggccggcgccgccgacggctgcgagctggtgcccagacacctgagaggcagaagagccaccggcagcgccgccaccgccgccagcagccccgccgccgccgccggcgacagccccgccctgatgaccgacccctgcatgagcctgagccccccctgcttcaccgaggaggacagattcagcctggaggccctgcagaccatccacaagcagatggacgacgacaaggacggcggcatcgaggtggaggagagcgacgagttcatcagagaggacatgaagtacaaggacgccaccaacaagcacagccacctgcacagagaggacaagcacatcaccatcgaggacctgtggaagagatggaagaccagcgaggtgcacaactggaccctggaggacaccctgcagtggctgatcgagttcgtggagctgccccagtacgagaagaacttcagagacaacaacgtgaagggcaccaccctgcccagaatcgccgtgcacgagcccagcttcatgatcagccagctgaagatcagcgacagaagccacagacagaagctgcagctgaaggccctggacgtggtgctgttcggccccctgaccagacccccccacaactggatgaaggacttcatcctgaccgtgagcatcgtgatcggcgtgggcggctgctggttcgcctacacccagaacaagaccagcaaggagcacgtggccaagatgatgaaggacctggagagcctgcagaccgccgagcagagcctgatggacctgcaggagagactggagaaggcccaggaggagaacagaaacgtggccgtggagaagcagaacctggagagaaagatgatggacgagatcaactacgccaaggaggaggcctgcagactgagagagctgagagagggcgccgagtgcgagctgagcagaagacagtacgccgagcaggagctggagcaggtgagaatggccctgaagaaggccgagaaggagttcgagctgagaagcagctggagcgtgcccgacgccctgcagaagtggctgcagctgacccacgaggtggaggtgcagtactacaacatcaagagacagaacgccgagatgcagctggccatcgccaaggacgaggtggccgccagctacctgatccaggccgagaagatcaagaagaagagaagcaccgtgttcggcaccctgcacgtggcccacagcagcagcctggacgaggtggaccacaagatcctggaggccaagaaggccctgagcgagctgaccacctgcctgagagagagactgttcagatggcagcagatcgagaagatctgcggcttccagatcgcccacaacagcggcctgcccagcctgaccagcagcctgtacagcgaccacagctgggtggtgatgcccagagtgagcatccccccctaccccatcgccggcggcgtggacgacctggacgaggacaccccccccatcgtgagccagttccccggcaccatggccaagccccccggcagcctggccagaagcagcagcctgtgcagaagcagaagaagcatcgtgcccagcagcccccagccccagagagcccagctggccccccacgccccccaccccagccaccccagacacccccaccacccccagcacaccccccacagcctgcccagccccgaccccgacatcctgagcgtgagcagctgccccgccctgtacagaaacgaggaggaggaggaggccatctacttcagcgccgagaagcagtgggaggtgcccgacaccgccagcgagtgcgacagcctgaacagcagcatcggcagaaagcagagcccccccctgagcctggagatctaccagaccctgagccccagaaagatcagcagagacgaggtgagcctggaggacagcagcagaggcgacagccccgtgaccgtggacgtgagctggggcagccccgactgcgtgggcctgaccgagaccaagagcatgatcttcagccccgccagcaaggtgtacaacggcatcctggagaagagctgcagcatgaaccagctgagcagcggcatccccgtgcccaagcccagacacaccagctgcagcagcgccggcaacgacagcaagcccgtgcaggaggcccccagcgtggccagaatcagcagcatcccccacgacctgtgccacaacggcgagaagagcaagaagcccagcaagatcaagagcctgttcaagaagaagagcaagtag

SEQ ID NO: 101087 - DNA, 1800 bp, synthetic construct
  misc_feature 1..1800: note = Description of Artificial Sequence: Synthetic coding sequence
  source 1..1800: mol_type = other DNA
ctgctggtgctgggcctgctggtggccggcgccgccgacggctgcgagctggtgcccagacacctgagaggcagaagagccaccggcagcgccgccaccgccgccagcagccccgccgccgccgccggcgacagccccgccctgatgaccgacccctgcatgagcctgagccccccctgcttcaccgaggaggacagattcagcctggaggccctgcagaccatccacaagcagatggacgacgacaaggacggcggcatcgaggtggaggagagcgacgagttcatcagagaggacatgaagtacaaggacgccaccaacaagcacagccacctgcacagagaggacaagcacatcaccatcgaggacctgtggaagagatggaagaccagcgaggtgcacaactggaccctggaggacaccctgcagtggctgatcgagttcgtggagctgccccagtacgagaagaacttcagagacaacaacgtgaagggcaccaccctgcccagaatcgccgtgcacgagcccagcttcatgatcagccagctgaagatcagcgacagaagccacagacagaagctgcagctgaaggccctggacgtggtgctgttcggccccctgaccagacccccccacaactggatgaaggacttcatcctgaccgtgagcatcgtgatcggcgtgggcggctgctggttcgcctacacccagaacaagaccagcaaggagcacgtggccaagatgatgaaggacctggagagcctgcagaccgccgagcagagcctgatggacctgcaggagagactggagaaggcccaggaggagaacagaaacgtggccgtggagaagcagaacctggagagaaagatgatggacgagatcaactacgccaaggaggaggcctgcagactgagagagctgagagagggcgccgagtgcgagctgagcagaagacagtacgccgagcaggagctggagcaggtgagaatggccctgaagaaggccgagaaggagttcgagctgagaagcagctggagcgtgcccgacgccctgcagaagtggctgcagctgacccacgaggtggaggtgcagtactacaacatcaagagacagaacgccgagatgcagctggccatcgccaaggacgaggccgagaagatcaagaagaagagaagcaccgtgttcggcaccctgcacgtggcccacagcagcagcctggacgaggtggaccacaagatcctggaggccaagaaggccctgagcgagctgaccacctgcctgagagagagactgttcagatggcagcagatcgagaagatctgcggcttccagatcgcccacaacagcggcctgcccagcctgaccagcagcctgtacagcgaccacagctgggtggtgatgcccagagtgagcatccccccctaccccatcgccggcggcgtggacgacctggacgaggacaccccccccatcgtgagccagttccccggcaccatggccaagccccccggcagcctggccagaagcagcagcctgtgcagaagcagaagaagcatcgtgcccagcagcccccagccccagagagcccagctggccccccacgccccccaccccagccaccccagacacccccaccacccccagcacaccccccacagcctgcccagccccgaccccgacatcctgagcgtgagcagctgccccgccctgtacagaaacgaggaggaggaggaggccatctacttcagcgccgagaagcagtgcatccacctgggcctgggcgcctgcaagagcgagtag

SEQ ID NO: 101088 - DNA, 3654 bp, synthetic construct
  misc_feature 1..3654: note = Description of Artificial Sequence: Synthetic coding sequence
  source 1..3654: mol_type = other DNA
atgtacatcaagcaggtgatcatccagggcttcagaagctacagagaccagaccatcgtggaccccttcagcagcaagcacaacgtgatcgtgggcagaaacggcagcggcaagagcaacttcttctacgccatccagttcgtgctgagcgacgagttcagccacctgagacccgagcagagactggccctgctgcacgagggcaccggccccagagtgatcagcgccttcgtggagatcatcttcgacaacagcgacaacagactgcccatcgacaaggaggaggtgagcctgagaagagtgatcggcgccaagaaggaccagtacttcctggacaagaagatggtgaccaagaacgacgtgatgaacctgctggagagcgccggcttcagcagaagcaacccctactacatcgtgaagcagggcaagatcaaccagatggccaccgcccccgacagccagagactgaagctgctgagagaggtggccggcaccagagtgtacgacgagagaaaggaggagagcatcagcctgatgaaggagaccgagggcaagagagagaagatcaacgagctgctgaagtacatcgaggagagactgcacaccctggaggaggagaaggaggagctggcccagtaccagaagtgggacaagatgagaagagccctggagtacaccatctacaaccaggagctgaacgagaccagagccaagctggacgagctgagcgccaagagagagaccagcggcgagaagagcagacagctgagagacgcccagcaggacgccagagacaagatggaggacatcgagagacaggtgagagagctgaagaccaagatcagcgccatgaaggaggagaaggagcagctgagcgccgagagacaggagcagatcaagcagagaaccaagctggagctgaaggccaaggacctgcaggacgagctggccggcaacagcgagcagagaaagagactgctgaaggagagacagaagctgctggagaagatcgaggagaagcagaaggagctggccgagaccgagcccaagttcaacagcgtgaaggagaaggaggagagaggcatcgccagactggcccaggccacccaggagagaaccgacctgtacgccaagcagggcagaggcagccagttcaccagcaaggaggagagagacaagtggatcaagaaggagctgaagagcctggaccaggccatcaacgacaagaagagacagatcgccgccatccacaaggacctggaggacaccgaggccaacaaggagaagaacctggagcagtacaacaagctggaccaggacctgaacgaggtgaaggccagagtggaggagctggacagaaagtactacgaggtgaagaacaagaaggacgagctgcagagcgagagaaactacctgtggagagaggagaacgccgagcagcaggccctggccgccaagagagaggacctggagaagaagcagcagctgctgagagccgccaccggcaaggccatcctgaacggcatcgacagcatcaacaaggtgctggaccacttcagaagaaagggcatcaaccagcacgtgcagaacggctaccacggcatcgtgatgaacaacttcgagtgcgagcccgccttctacacctgcgtggaggtgaccgccggcaacagactgttctaccacatcgtggacagcgacgaggtgagcaccaagatcctgatggagttcaacaagatgaacctgcccggcgaggtgaccttcctgcccctgaacaagctggacgtgagagacaccgcctaccccgagaccaacgacgccatccccatgatcagcaagctgagatacaaccccagattcgacaaggccttcaagcacgtgttcggcaagaccctgatctgcagaagcatggaggtgagcacccagctggccagagccttcaccatggactgcatcaccctggagggcgaccaggtgagccacagaggcgccctgaccggcggctactacgacaccagaaagagcagactggagctgcagaaggacgtgagaaaggccgaggaggagctgggcgagctggaggccaagctgaacgagaacctgagaagaaacatcgagagaatcaacaacgagatcgaccagctgatgaaccagatgcagcagatcgagacccagcagagaaagttcaaggccagcagagacagcatcctgagcgagatgaagatgctgaaggagaagagacagcagagcgagaagaccttcatgcccaagcagagaagcctgcagagcctggaggccagcctgcacgccatggagagcaccagagagagcctgaaggccgagctgggcaccgacctgctgagccagctgagcctggaggaccagaagagagtggacgccctgaacgacgagatcagacagctgcagcaggagaacagacagctgctgaacgagagaatcaagctggagggcatcatcaccagagtggagacctacctgaacgagaacctgagaaagagactggaccaggtggagcaggagctgaacgagctgagagagaccgagggcggcaccgtgctgaccgccaccaccagcgagctggaggccatcaacaagagagtgaaggacaccatggccagaagcgaggacctggacaacagcatcgacaagaccgaggccggcatcaaggagctgcagaagagcatggagagatggaagaacatggagaaggagcacatggacgccatcaaccacgacaccaaggagctggagaagatgaccaacagacagggcatgctgctgaagaagaaggaggagtgcatgaagaagatcagagagctgggcagcctgccccaggaggccttcgagaagtaccagaccctgagcctgaagcagctgttcagaaagctggagcagtgcaacaccgagctgaagaagtacagccacgtgaacaagaaggccctggaccagttcgtgaacttcagcgagcagaaggagaagctgatcaagagacaggaggagctggacagaggctacaagagcatcatggagctgatgaacgtgctggagctgagaaagtacgaggccatccagctgaccttcaagcaggtgagcaagaacttcagcgaggtgttccagaagctggtgcccggcggcaaggccaccctggtgatgaagaagggcgacgtggagggcagccagagccaggacgagggcgagggcagcggcgagagcgagagaggcagcggcagccagagcagcgtgcccagcgtggaccagttcaccggcgtgggcatcagagtgagcttcaccggcaagcagggcgagatgagagagatgcagcagctgagcggcggccagaagagcctggtggccctggccctgatcttcgccatccagaagtgcgaccccgcccccttctacctgttcgacgagatcgaccaggccctggacgcccagcacagaaaggccgtgagcgacatgatcatggagctggccgtgcacgcccagttcatcaccaccaccttcagacccgagctgctggagagcgccgacaagttctacggcgtgaagttcagaaacaaggtgagccacatcgacgtgatcaccgccgagatggccaaggacttcgtggaggacgacaccacccacggctag

SEQ ID NO: 101089 - DNA, 3306 bp, synthetic construct
  misc_feature 1..3306: note = Description of Artificial Sequence: Synthetic coding sequence
  source 1..3306: mol_type = other DNA
atggccacccccagcaagaagaccagcacccccagcccccagcccagcaagagagccctgcccagagaccccagcagcgaggtgcccagcaagagaaagaacagcgccccccagctgcccctgctgcagagcagcggccccttcgtggagggcagcatcgtgagaatcagcatggagaacttcctgacctacgacatctgcgaggtgagccccggcccccacctgaacatgatcgtgggcgccaacggcaccggcaagagcagcatcgtgtgcgccatctgcctgggcctggccggcaagcccgccttcatgggcagagccgacaaggtgggcttcttcgtgaagagaggctgcagcagaggcatggtggagatcgagctgttcagagccagcggcaacctggtgatcaccagagagatcgacgtggccaagaaccagagcttctggttcatcaacaagaagagcaccacccagaagatcgtggaggagaaggtggccgccctgaacatccaggtgggcaacctgtgccagttcctgccccaggacaaggtgggcgagttcgccaagctgagcaagatcgagctgctggaggccaccgagaagagcatcggcccccccgagatgcacaagtaccactgcgagctgaagaacctgagagagaaggagaagcagctggagaccagctgcaaggagaagaccgagtacctgcagaagatggtgcagagaaacgagagatacaagcaggacgtggagagattctacgagagaaagagacacctggacctgatcgagatgctggaggccaagagaccctgggtggagtacgagaacgtgagacaggagtacgaggaggtgaagctggtgagagacagagtgaaggaggaggtgagaaagctgaaggagggccagatccccgtgacctgcagaatcgaggagatggagaacgagagacacaacctggaggccagaatcaaggagaaggccaccgacatcaaggaggccagccagaagtgcaagcagaagcaggacgtgatcgagagaaaggacaagcacatcgaggagctgcagcaggccctgatcgtgaagcagaacgaggagctggacagacagagaagaatcggcaacaccagaaagatgatcgaggacctgcagaacgagctgaagaccaccgagaactgcgagaacctgcagccccagatcgacgccatcaccaacgacctgagaagaatccaggacgagaaggccctgtgcgagggcgagatcatcgacaagagaagagagagagagaccctggagaaggagaagaagagcgtggacgaccacatcgtgagattcgacaacctgatgaaccagaaggaggacaagctgagacagagattcagagacacctacgacgccgtgctgtggctgagaaacaacagagacaagttcaagcagagagtgtgcgagcccatcatgctgaccatcaacatgaaggacaacaagaacgccaagtacatcgagaaccacatccccagcaacgacctgagagccttcgtgttcgagagccaggaggacatggaggtgttcctgaaggaggtgagagacaacaagaagctgagagtgaacgccgtgatcgcccccaagagcagctacgccgacaaggcccccagcagaagcctgaacgagctgaagcagtacggcttcttcagctacctgagagagctgttcgacgcccccgaccccgtgatgagctacctgtgctgccagtaccacatccacgaggtgcccgtgggcaccgagaagaccagagagagaatcgagagagtgatccaggagaccagactgaagcagatctacaccgccgaggagaagtacgtggtgaagaccagcttctacagcaacaaggtgatcagcagcaacaccagcctgaaggtggcccagttcctgaccgtgaccgtggacctggagcagagaagacacctggaggagcagctgaaggagatccacagaaagctgcaggccgtggacagcggcctgatcgccctgagagagaccagcaagcacctggagcacaaggacaacgagctgagacagaagaagaaggagctgctggagagaaagaccaagaagagacagctggagcagaagatcagcagcaagctgggcagcctgaagctgatggagcaggacacctgcaacctggaggaggaggagagaaaggccagcaccaagatcaaggagatcaacgtgcagaaggccaagctggtgaccgagctgaccaacctgatcaagatctgcaccagcctgcacatccagaaggtggacctgatcctgcagaacaccaccgtgatcagcgagaagaacaagctggagagcgactacatggccgccagcagccagctgagactgaccgagcagcacttcatcgagctggacgagaacagacagagactgctgcagaagtgcaaggagctgatgaagagagccagacaggtgtgcaacctgggcgccgagcagaccctgccccaggagtaccagacccaggtgcccaccatccccaacggccacaacagcagcctgcccatggtgttccaggacctgcccaacaccctggacgagatcgacgccctgctgaccgaggagagaagcagagccagctgcttcaccggcctgaaccccaccatcgtgcaggagtacaccaagagagaggaggagatcgagcagctgaccgaggagctgaagggcaagaaggtggagctggaccagtacagagagaacatcagccaggtgaaggagagatggctgaaccccctgaaggagctggtggagaagatcaacgagaagttcagcaacttcttcagcagcatgcagtgcgccggcgaggtggacctgcacaccgagaacgaggaggactacgacaagtacggcatcagaatcagagtgaagttcagaagcagcacccagctgcacgagctgaccccccaccaccagagcggcggcgagagaagcgtgagcaccatgctgtacctgatggccctgcaggagctgaacagatgccccttcagagtggtggacgagatcaaccagggcatggaccccatcaacgagagaagagtgttcgagatggtggtgaacaccgcctgcaaggagaacaccagccagtacttcttcatcacccccaagctgctgcagaacctgccctacagcgagaagatgaccgtgctgttcgtgtacaacggcccccacatgctggagcccaacacctggaacctgaaggccttccagagaagaagaagaagaatcaccttcacccagcccagctag

SEQ ID NO: 101090 - DNA, 3276 bp, synthetic construct
  misc_feature 1..3276: note = Description of Artificial Sequence: Synthetic coding sequence
  source 1..3276: mol_type = other DNA
atggccaagagaaaggaggagaacttcagcagccccaagaacgccaagagacccagacaggaggagctggaggacttcgacaaggacggcgacgaggacgagtgcaagggcaccaccctgaccgccgccgaggtgggcatcatcgagagcatccacctgaagaacttcatgtgccacagcatgctgggccccttcaagttcggcagcaacgtgaacttcgtggtgggcaacaacggcagcggcaagagcgccgtgctgaccgccctgatcgtgggcctgggcggcagagccgtggccaccaacagaggcagcagcctgaagggcttcgtgaaggacggccagaacagcgccgacatcagcatcaccctgagaaacagaggcgacgacgccttcaaggccagcgtgtacggcaacagcatcctgatccagcagcacatcagcatcgacggcagcagaagctacaagctgaagagcgccaccggcagcgtggtgagcaccagaaaggaggagctgatcgccatcctggaccacttcaacatccaggtggacaaccccgtgagcgtgctgacccaggagatgagcaagcagttcctgcagagcaagaacgagggcgacaagtacaagttcttcatgaaggccacccagctggagcagatgaaggaggactacagctacatcatggagaccaaggagagaaccaaggagcagatccaccagggcgaggagagactgaccgagctgaagagacagtgcgtggagaaggaggagagattccagagcatcgccggcctgagcaccatgaagaccaacctggagagcctgaagcacgagatggcctgggccgtggtgaacgagatcgagaagcagctgaacgccatcagagacaacatcaagatcggcgaggacagagccgccagactggacagaaagatggaggagcagcaggtgagactgaacgaggccgagcagaagtacaaggacatccaggacaagctggagaagatcagcgaggagaccaacgccagagcccccgagtgcatggccctgaaggccgacgtggtggccaagaagagagcctacaacgaggccgaggtgctgtacaacagaagcctgaacgagtacaaggccctgaagaaggacgacgagcagctgtgcaagagaatcgaggagctgaagaagagcaccgaccagagcctggagcccgagagactggagagacagaagaagatcagctggctgaaggagagagtgaaggccttccagaaccaggagaacagcgtgaaccaggagatcgagcagttccagcaggccatcgagaaggacaaggaggagcacggcaagatcaagagagaggagctggacgtgaagcacgccctgagctacaaccagagacagctgaaggagctgaaggacagcaagaccgacagactgaagagattcggccccaacgtgcccgccctgctggaggccatcgacgacgcctacagacagggccacttcacctacaagcccgtgggccccctgggcgcctgcatccacctgagagaccccgagctggccctggccatcgagagctgcctgaagggcctgctgcaggcctactgctgccacaaccacgccgacgagagagtgctgcaggccctgatgaagagattctacctgcccggcaccagcagaccccccatcatcgtgagcgagttcagaaacgagatctacgacgtgagacacagagccgcctaccaccccgacttccccaccgtgctgaccgccctggagatcgacaacgccgtggtggccaacagcctgatcgacatgagaggcatcgagaccgtgctgctgatcaagaacaacagcgtggccagagccgtgatgcagagccagaagccccccaagaactgcagagaggccttcaccgccgacggcgaccaggtgttcgccggcagatactacagcagcgagaacaccagacccaagttcctgagcagagacgtggacagcgagatcagcgacctggagaacgaggtggagaacaagaccgcccagatcctgaacctgcagcagcacctgagcgccctggagaaggacatcaagcacaacgaggagctgctgaagagatgccagctgcactacaaggagctgaagatgaagatcagaaagaacatcagcgagatcagagagctggagaacatcgaggagcaccagagcgtggacatcgccaccctggaggacgaggcccaggagaacaagagcaagatgaagatggtggaggagcacatggagcagcagaaggagaacatggagcacctgaagagcctgaagatcgaggccgagaacaagtacgacgccatcaagttcaagatcaaccagctgagcgagctggccgaccccctgaaggacgagctgaacctggccgacagcgaggtggacaaccagaagagaggcaagagacactacgaggagaagcagaaggagcacctggacaccctgaacaagaagaagagagagctggacatgaaggagaaggagctggaggagaagatgagccaggccagacagatctgccccgagagaatcgaggtggagaagagcgccagcatcctggacaaggagatcaacagactgagacagaagatccaggccgagcacgccagccacggcgacagagaggagatcatgagacagtaccaggaggccagagagacctacctggacctggacagcaaggtgagaaccctgaagaagttcatcaagctgctgggcgagatcatggagcacagattcaagacctaccagcagttcagaagatgcctgaccctgagatgcaagctgtacttcgacaacctgctgagccagagagcctactgcggcaagatgaacttcgaccacaagaacgagaccctgagcatcagcgtgcagcccggcgagggcaacaaggccgccttcaacgacatgagagccctgagcggcggcgagagaagcttcagcaccgtgtgcttcatcctgagcctgtggagcatcgccgagagccccttcagatgcctggacgagttcgacgtgtacatggacatggtgaacagaagaatcgccatggacctgatcctgaagatggccgacagccagagattcagacagttcatcctgctgaccccccagagcatgagcagcctgcccagcagcaagctgatcagaatcctgagaatgagcgaccccgagagaggccagaccaccctgcccttcagacccgtgacccaggaggaggacgacgaccagagatag

SEQ ID NO: 101091 - DNA, 3354 bp, synthetic construct
  misc_feature 1..3354: note = Description of Artificial Sequence: Synthetic coding sequence
  source 1..3354: mol_type = other DNA
atggccaagagaaaggaggagaacttcagcagccccaagaacgccaagagacccagacaggaggagctggaggacttcgacaaggacggcgacgaggacgagtgcaagggcaccaccctgaccgccgccgaggtgggcatcatcgagagcatccacctgaagaacttcatgtgccacagcatgctgggccccttcaagttcggcagcaacgtgaacttcgtggtgggcaacaacggcagctggagcgccgtggtgagaagcagactgaacgccaccagcgccagccaggtgcaggccatcctgctgttccagccctgcggcaagagcgccgtgctgaccgccctgatcgtgggcctgggcggcagagccgtggccaccaacagaggcagcagcctgaagggcttcgtgaaggacggccagaacagcgccgacatcagcatcaccctgagaaacagaggcgacgacgccttcaaggccagcgtgtacggcaacagcatcctgatccagcagcacatcagcatcgacggcagcagaagctacaagctgaagagcgccaccggcagcgtggtgagcaccagaaaggaggagctgatcgccatcctggaccacttcaacatccaggtggacaaccccgtgagcgtgctgacccaggagatgagcaagcagttcctgcagagcaagaacgagggcgacaagtacaagttcttcatgaaggccacccagctggagcagatgaaggaggactacagctacatcatggagaccaaggagagaaccaaggagcagatccaccagggcgaggagagactgaccgagctgaagagacagtgcgtggagaaggaggagagattccagagcatcgccggcctgagcaccatgaagaccaacctggagagcctgaagcacgagatggcctgggccgtggtgaacgagatcgagaagcagctgaacgccatcagagacaacatcaagatcggcgaggacagagccgccagactggacagaaagatggaggagcagcaggtgagactgaacgaggccgagcagaagtacaaggacatccaggacaagctggagaagatcagcgaggagaccaacgccagagcccccgagtgcatggccctgaaggccgacgtggtggccaagaagagagcctacaacgaggccgaggtgctgtacaacagaagcctgaacgagtacaaggccctgaagaaggacgacgagcagctgtgcaagagaatcgaggagctgaagaagagcaccgaccagagcctggagcccgagagactggagagacagaagaagatcagctggctgaaggagagagtgaaggccttccagaaccaggagaacagcgtgaaccaggagatcgagcagttccagcaggccatcgagaaggacaaggaggagcacggcaagatcaagagagaggagctggacgtgaagcacgccctgagctacaaccagagacagctgaaggagctgaaggacagcaagaccgacagactgaagagattcggccccaacgtgcccgccctgctggaggccatcgacgacgcctacagacagggccacttcacctacaagcccgtgggccccctgggcgcctgcatccacctgagagaccccgagctggccctggccatcgagagctgcctgaagggcctgctgcaggcctactgctgccacaaccacgccgacgagagagtgctgcaggccctgatgaagagattctacctgcccggcaccagcagaccccccatcatcgtgagcgagttcagaaacgagatctacgacgtgagacacagagccgcctaccaccccgacttccccaccgtgctgaccgccctggagatcgacaacgccgtggtggccaacagcctgatcgacatgagaggcatcgagaccgtgctgctgatcaagaacaacagcgtggccagagccgtgatgcagagccagaagccccccaagaactgcagagaggccttcaccgccgacggcgaccaggtgttcgccggcagatactacagcagcgagaacaccagacccaagttcctgagcagagacgtggacagcgagatcagcgacctggagaacgaggtggagaacaagaccgcccagatcctgaacctgcagcagcacctgagcgccctggagaaggacatcaagcacaacgaggagctgctgaagagatgccagctgcactacaaggagctgaagatgaagatcagaaagaacatcagcgagatcagagagctggagaacatcgaggagcaccagagcgtggacatcgccaccctggaggacgaggcccaggagaacaagagcaagatgaagatggtggaggagcacatggagcagcagaaggagaacatggagcacctgaagagcctgaagatcgaggccgagaacaagtacgacgccatcaagttcaagatcaaccagctgagcgagctggccgaccccctgaaggacgagctgaacctggccgacagcgaggtggacaaccagaagagaggcaagagacactacgaggagaagcagaaggagcacctggacaccctgaacaagaagaagagagagctggacatgaaggagaaggagctggaggagaagatgagccaggccagacagatctgccccgagagaatcgaggtggagaagagcgccagcatcctggacaaggagatcaacagactgagacagaagatccaggccgagcacgccagccacggcgacagagaggagatcatgagacagtaccaggaggccagagagacctacctggacctggacagcaaggtgagaaccctgaagaagttcatcaagctgctgggcgagatcatggagcacagattcaagacctaccagcagttcagaagatgcctgaccctgagatgcaagctgtacttcgacaacctgctgagccagagagcctactgcggcaagatgaacttcgaccacaagaacgagaccctgagcatcagcgtgcagcccggcgagggcaacaaggccgccttcaacgacatgagagccctgagcggcggcgagagaagcttcagcaccgtgtgcttcatcctgagcctgtggagcatcgccgagagccccttcagatgcctggacgagttcgacgtgtacatggacatggtgaacagaagaatcgccatggacctgatcctgaagatggccgacagccagagattcagacagttcatcctgctgaccccccagagcatgagcagcctgcccagcagcaagctgatcagaatcctgagaatgagcgaccccgagagaggccagaccaccctgcccttcagacccgtgacccaggaggaggacgacgaccagagatag

SEQ ID NO: 101092 - DNA, 3276 bp, synthetic construct; identical to SEQ ID NO: 101090
  misc_feature 1..3276: note = Description of Artificial Sequence: Synthetic coding sequence
  source 1..3276: mol_type = other DNA

SEQ ID NO: 101093 - DNA, 174 bp, synthetic construct
  misc_feature 1..174: note = Description of Artificial Sequence: Synthetic coding sequence
  source 1..174: mol_type = other DNA
atggccaagagaaaggaggagaacttcagcagccccaagaacgccaagagacccagacaggaggagctggaggacttcgacaaggacggcgacgaggacgagtgcaagggcaccaccctgaccgccgccgaggtgggcatcatcgagagcatccacctgaagaacttcatgtag

SEQ ID NO: 101094 - DNA, 3276 bp, synthetic construct; identical to SEQ ID NO: 101090
  misc_feature 1..3276: note = Description of Artificial Sequence: Synthetic coding sequence
  source 1..3276: mol_type = other DNA

SEQ ID NO: 101095 - DNA, 2130 bp, synthetic construct
  misc_feature 1..2130: note = Description of Artificial Sequence: Synthetic coding sequence
  source 1..2130: mol_type = other DNA
atggccgagaccctggagttcaacgacgtgtaccaggaggtgaagggcagcatgaacgacggcagactgagactgagcagacagggcatcatcttcaagaacagcaagaccggcaaggtggacaacatccaggccggcgagctgaccgagggcatctggagaagagtggccctgggccacggcctgaagctgctgaccaagaacggccacgtgtacaagtacgacggcttcagagagagcgagttcgagaagctgagcgacttcttcaagacccactacagactggagctgatggagaaggacctgtgcgtgaagggctggaactggggcaccgtgaagttcggcggccagctgctgagcttcgacatcggcgaccagcccgtgttcgagatccccctgagcaacgtgagccagtgcaccaccggcaagaacgaggtgaccctggagttccaccagaacgacgacgccgaggtgagcctgatggaggtgagattctacgtgccccccacccaggaggacggcgtggaccccgtggaggccttcgcccagaacgtgctgagcaaggccgacgtgatccaggccaccggcgacgccatctgcatcttcagagagctgcagtgcctgacccccagaggcagatacgacatcagaatctaccccaccttcctgcacctgcacggcaagaccttcgactacaagatcccctacaccaccgtgctgagactgttcctgctgccccacaaggaccagagacagatgttcttcgtgatcagcctggacccccccatcaagcagggccagaccagataccacttcctgatcctgctgttcagcaaggacgaggacatcagcctgaccctgaacatgaacgaggaggaggtggagaagagattcgagggcagactgaccaagaacatgagcggcagcctgtacgagatggtgagcagagtgatgaaggccctggtgaacagaaagatcaccgtgcccggcaacttccagggccacagcggcgcccagtgcatcacctgcagctacaaggccagcagcggcctgctgtaccccctggagagaggcttcatctacgtgcacaagccccccgtgcacatcagattcgacgagatcagcttcgtgaacttcgccagaggcaccaccaccaccagaagcttcgacttcgagatcgagaccaagcagggcacccagtacaccttcagcagcatcgagagagaggagtacggcaagctgttcgacttcgtgaacgccaagaagctgaacatcaagaacagaggcctgaaggagggcatgaaccccagctacgacgagtacgccgacagcgacgaggaccagcacgacgcctacctggagagaatgaaggaggagggcaagatcagagaggagaacgccaacgacagcagcgacgacagcggcgaggagaccgacgagagcttcaaccccggcgaggaggaggaggacgtggccgaggagttcgacagcaacgccagcgccagcagcagcagcaacgagggcgacagcgacagagacgagaagaagagaaagcagctgaagaaggccaagatggccaaggacagaaagagcagaaagaagcccgtggaggtgaagaagggcaaggaccccaacgcccccaagagacccatgagcgcctacatgctgtggctgaacgccagcagagagaagatcaagagcgaccaccccggcatcagcatcaccgacctgagcaagaaggccggcgagatctggaagggcatgagcaaggagaagaaggaggagtgggacagaaaggccgaggacgccagaagagactacgagaaggccatgaaggagtacgagggcggcagaggcgagagcagcaagagagacaagagcaagaagaagaagaaggtgaaggtgaagatggagaagaagagcacccccagcagaggcagcagcagcaagagcagcagcagacagctgagcgagagcttcaagagcaaggagttcgtgagcagcgacgagagcagcagcggcgagaacaagagcaagaagaagagaagaagaagcgaggacagcgaggaggaggagctggccagcaccccccccagcagcgaggacagcgccagcggcagcgacgagtag

SEQ ID NO: 101096 - DNA, 240 bp, synthetic construct
  misc_feature 1..240: note = Description of Artificial Sequence: Synthetic coding sequence
  source 1..240: mol_type = other DNA
atgaagagcctgacctggatcctgggcctgtgggccctggccgcctgcttcacccccggcgagagccagagaggccccagaggcccctacccccccggccccctggcccccccccagcccttcggccccggcttcgtgccccccccccccccccccccctacggccccggcagaatccccccccccccccccgccccctacggccccggcatcttcccccccccccccccccagccctag

SEQ ID NO: 101097 - DNA, 324 bp, synthetic construct
  misc_feature 1..324: note = Description of Artificial Sequence: Synthetic coding sequence
  source 1..324: mol_type = other DNA
atgaagagcctgacctggatcctgggcctgtgggccctggccgcctgcttcacccccggcgagagccagagaggccccagaggcccctacccccccggccccctggcccccccccagcccttcggccccggcttcgtgccccccccccccccccccccctacggccccggcagaatccccccccccccctacagctgcacccccaacatgaacaactgcagcagatgccaccaccaccacaagagacaccactacccctgcaactactgcttctactaccccaagtacgagttccagcactgcttccaggagaccttcacctag

SEQ ID NO: 101098 - DNA, 240 bp, synthetic construct; identical to SEQ ID NO: 101096
  misc_feature 1..240: note = Description of Artificial Sequence: Synthetic coding sequence
  source 1..240: mol_type = other DNA

SEQ ID NO: 101099 - DNA, 348 bp, synthetic construct
  misc_feature 1..348: note = Description of Artificial Sequence: Synthetic coding sequence
  source 1..348: mol_type = other DNA
atgagcagacacagcagactgcagagacaggtgctgagcctgtacagagacctgctgagagccggcagaggcaagcccggcgccgaggccagagtgagagccgagttcagacagcacgccggcctgcccagaagcgacgtgctgagaatcgagtacctgtacagaagaggcagaagacagctgcagctgctgagaagcggccacgccaccgccatgggcgccttcgtgagacccagagcccccaccggcgagcccggcggcgtgggctgccagcccgacgacggcgacagccccagaaacccccacgacagcaccggcgcccccgagaccagacccgacggcagatag

SEQ ID NO: 101100 - DNA, 501 bp, synthetic construct
  misc_feature 1..501: note = Description of Artificial Sequence: Synthetic coding sequence
  source 1..501: mol_type = other DNA
atggccgtgagcaccgtgttcagcaccagcagcctgatgctggccctgagcagacacagcctgctgagccccctgctgagcgtgaccagcttcagaagattctacagaggcgacagccccaccgacagccagaaggacatgatcgagatccccctgcccccctggcaggagagaaccgacgagagcatcgagaccaagagagccagactgctgtacgagagcagaaagagaggcatgctggagaactgcatcctgctgagcctgttcgccaaggagcacctgcagcacatgaccgagaagcagctgaacctgtacgacagactgatcaacgagcccagcaacgactgggacatctactactgggccaccgaggccaagcccgcccccgagatcttcgagaacgaggtgatggccctgctgagagacttcgccaagaacaagaacaaggagcagagactgagagcccccgacctggagtacctgttcgagaagcccagatag

SEQ ID NO: 101101 - DNA, 843 bp, synthetic construct
  misc_feature 1..843: note = Description of Artificial Sequence: Synthetic coding sequence
  source 1..843: mol_type = other DNA
atggccgccgtggtggccctgagcctgagaagaagactgcccgccaccaccctgggcggcgcctgcctgcaggccagcagaggcgcccagaccgccgccgccaccgcccccagaatcaagaagttcgccatctacagatgggaccccgacaaggccggcgacaagccccacatgcagacctacgaggtggacctgaacaagtgcggccccatggtgctggacgccctgatcaagatcaagaacgaggtggacagcaccctgaccttcagaagaagctgcagagagggcatctgcggcagctgcgccatgaacatcaacggcggcaacaccctggcctgcaccagaagaatcgacaccaacctgaacaaggtgagcaagatctaccccctgccccacatgtacgtgatcaaggacctggtgcccgacctgagcaacttctacgcccagtacaagagcatcgagccctacctgaagaagaaggacgagagccaggagggcaagcagcagtacctgcagagcatcgaggagagagagaagctggacggcctgtacgagtgcatcctgtgcgcctgctgcagcaccagctgccccagctactggtggaacggcgacaagtacctgggccccgccgtgctgatgcaggcctacagatggatgatcgacagcagagacgacttcaccgaggagagactggccaagctgcaggaccccttcagcctgtacagatgccacaccatcatgaactgcaccagaacctgccccaagggcctgaaccccggcaaggccatcgccgagatcaagaagatgatggccacctacaaggagaagaaggccagcgtgtag

SEQ ID NO: 101102 - DNA, 453 bp, synthetic construct
  misc_feature 1..453: note = Description of Artificial Sequence: Synthetic coding sequence
  source 1..453: mol_type = other DNA
atggccgccctgctgctgagacacgtgggcagacactgcctgagagcccacttcagcccccagctgtgcatcagaaacgccgtgcccctgggcaccaccgccaaggaggagatggagagattctggaacaagaacatcggcagcaacagacccctgagcccccacatcaccatctacagctggagcctgcccatggccatgagcatctgccacagaggcaccggcatcgccctgagcgccgacgtgggccccagaaagagacccgaggacagccccgccatccccgtgtggagcggctgccccggcagctactgcgtggtgctgtacggcgccggcagccacgtgaagaagggcggcagccagcaccacctgcccacccactactacatccaccccagcttctgcctgagcttcctgagccccgcctgggagaagttcagcctgttcgtgtag

SEQ ID NO: 101103 - DNA, 510 bp, synthetic construct
  misc_feature 1..510: note = Description of Artificial Sequence: Synthetic coding sequence
  source 1..510: mol_type = other DNA
atggccgccctgctgctgagacacgtgggcagacactgcctgagagcccacttcagcccccagctgtgcatcagaaacgccgtgcccctgggcaccaccgccaaggaggagatggagagattctggaacaagaacatcggcagcaacagacccctgagcccccacatcaccatctacagctggagcctgcccatggccatgagcatctgccacagaggcaccggcatcgccctgagcgccggcgtgagcctgttcggcatgagcgccctgctgctgcccggcaacttcgagagctacctggagctggtgaagagcctgtgcctgggccccgccctgatccacaccgccaagttcgccctggtgttccccctgatgtaccacacctggaacggcatcagacacctgatgtgggacctgggcaagggcctgaagatcccccagctgtaccagagcggcgtggtggtgctggtgctgaccgtgctgagcagcatgggcctggccgccatgtag

SEQ ID NO: 101104 - DNA, 351 bp, synthetic construct
  misc_feature 1..351: note = Description of Artificial Sequence: Synthetic coding sequence
  source 1..351: mol_type = other DNA
atggccgccctgctgctgagctggagcctgcccatggccatgagcatctgccacagaggcaccggcatcgccctgagcgccggcgtgagcctgttcggcatgagcgccctgctgctgcccggcaacttcgagagctacctggagctggtgaagagcctgtgcctgggccccgccctgatccacaccgccaagttcgccctggtgttccccctgatgtaccacacctggaacggcatcagacacctgatgtgggacctgggcaagggcctgaagatcccccagctgtaccagagcggcgtggtggtgctggtgctgaccgtgctgagcagcatgggcctggccgccatgtag

SEQ ID NO: 101105 - DNA, 408 bp, synthetic construct
  misc_feature 1..408: note = Description of Artificial Sequence: Synthetic coding sequence
  source 1..408: mol_type = other DNA
atggccgccctgctgctgagacacgtgggcagacactgcctgagagcccacttcagcccccagctgtgcatcagaaactggagcctgcccatggccatgagcatctgccacagaggcaccggcatcgccctgagcgccggcgtgagcctgttcggcatgagcgccctgctgctgcccggcaacttcgagagctacctggagctggtgaagagcctgtgcctgggccccgccctgatccacaccgccaagttcgccctggtgttccccctgatgtaccacacctggaacggcatcagacacctgatgtgggacctgggcaagggcctgaagatcccccagctgtaccagagcggcgtggtggtgctggtgctgaccgtgctgagcagcatgggcctggccgccatgtag

SEQ ID NO: 101106 - DNA, 480 bp, synthetic construct
  misc_feature 1..480: note = Description of Artificial Sequence: Synthetic coding sequence
  source 1..480: mol_type = other DNA
atggccgtgctgtggagactgagcgccgtgtgcggcgccctgggcggcagagccctgctgctgagaacccccgtggtgagacccgcccacatcagcgccttcctgcaggacagacccatccccgagtggtgcggcgtgcagcacatccacctgagccccagccaccacagcggcagcaaggccgccagcctgcactggaccagcgagagagtggtgagcgtgctgctgctgggcctgctgcccgccgcctacctgaacccctgcagcgccatggactacagcctggccgccgccctgaccctgcacggccactggggcctgggccaggtggtgaccgactacgtgcacggcgacgccctgcagaaggccgccaaggccggcctgctggccctgagcgccctgaccttcgccggcctgtgctacttcaactaccacgacgtgggcatctgcaaggccgtggccatgctgtggaagctgtag

SEQ ID NO: 101107 - DNA, 465 bp, synthetic construct
  misc_feature 1..465: note = Description of Artificial Sequence: Synthetic coding sequence
  source 1..465: mol_type = other DNA
atggccgccagcatgttctacggcagactggtggccgtggccaccctgagaaaccacagacccagaaccgcccagagagccgccgcccagggccccgtgctgatcggcagcagccacggcggcgtgaacatcgaggacgtggccgccgagagccccgaggccatcatcaaggagcccatcgacatcgaggagggcatcaagaaggagcaggccctgcagctggcccagaagatgggcttcccccccaacatcgtggagagcgccgccgagaacatggtgaagctgtacagcctgttcctgaagtacgacgccaccatgatcgagatcaaccccatggtggaggacagcgacggcgccgtgctgtgcatggacgccaagatcaacttcgacagcaacagcgcctacagacagaagaagatcttcgacctgcaggactggacccaggaggacgagagagacaagtag

SEQ ID NO: 101108 - DNA, 897 bp, synthetic construct
  misc_feature 1..897: note = Description of Artificial Sequence: Synthetic coding sequence
  source 1..897: mol_type = other DNA
agcggcagaggccaccccagcgagccccccgccagcgacggccccgccggctgctgcagcggcagcaaggacgtggtgatcaaggcccaggtgctggccggcggcagaggcaagggcaccttcgagagcggcctgaagggcggcgtgaagatcgtgttcagccccgaggaggccaaggccgtgagcagccagatgatcggcaagaagctgttcaccaagcagaccggcgagaagggcagaatctgcaaccaggtgctggtgtgcgagagaaagtaccccagaagagagtactacttcgccatcaccatggagagaagcttccagggccccgtgctgatcggcagcagccacggcggcgtgaacatcgaggacgtggccgccgagagccccgaggccatcatcaaggagcccatcgacatcgaggagggcatcaagaaggagcaggccctgcagctggcccagaagatgggcttcccccccaacatcgtggagagcgccgccgagaacatggtgaagctgtacagcctgttcctgaagtacgacgccaccatgatcgagatcaaccccatggtggaggacagcgacggcgccgtgctgtgcatggacgccaagatcaacttcgacagcaacagcgcctacagacagaagaagatcttcgacctgcaggactggacccaggaggacgagagagacaaggacgccgccaaggccaacctgaactacatcggcctggacggcaacatcggctgcctggtgaacggcgccggcctggccatggccaccatggacatcatcaagctgcacggcggcacccccgccaacttcctggacgtgggcggcggcgccaccgtgcaccaggtgaccgaggccttcaagctgatcaccagcgacaagtag

SEQ ID NO: 101109 - DNA, 1326 bp, synthetic construct
  misc_feature 1..1326: note = Description of Artificial Sequence: Synthetic coding sequence
  source 1..1326: mol_type = other DNA
atggccgccagcatgttctacggcagactggtggccgtggccaccctgagaaaccacagacccagaaccgcccagcagcagcagagaaacctgagcctgcacgagtacatgagcatggagctgctgcaggaggccggcgtgagcgtgcccaagggctacgtggccaagagccccgacgaggcctacgccatcgccaagaagctgggcagcaaggacgtggtgatcaaggcccaggtgctggccggcggcagaggcaagggcaccttcgagagcggcctgaagggcggcgtgaagatcgtgttcagccccgaggaggccaaggccgtgagcagccagatgatcggcaagaagctgttcaccaagcagaccggcgagaagggcagaatctgcaaccaggtgctggtgtgcgagagaaagtaccccagaagagagtactacttcgccatcaccatggagagaagcttccagggccccgtgctgatcggcagcagccacggcggcgtgaacatcgaggacgtggccgccgagagccccgaggccatcatcaaggagcccatcgacatcgaggagggcatcaagaaggagcaggccctgcagctggcccagaagatgggcttcccccccaacatcgtggagagcgccgccgagaacatggtgaagctgtacagcctgttcctgaagtacgacgccaccatgatcgagatcaaccccatggtggaggacagcgacggcgccgtgctgtgcatggacgccaagatcaacttcgacagcaacagcgcctacagacagaagaagatcttcgacctgcaggactggacccaggaggacgagagagacaaggacgccgccaaggccaacctgaactacatcggcctggacggcaacatcggctgcctggtgaacggcgccggcctggccatggccaccatggacatcatcaagctgcacggcggcacccccgccaacttcctggacgtgggcggcggcgccaccgtgcaccaggtgaccgaggccttcaagctgatcaccagcgacaagaaggtgctggccatcctggtgaacatcttcggcggcatcatgagatgcgacgtgatcgcccagggcatcgtgatggccgtgaaggacctggagatcaagatccccgtggtggtgagactgcagggcaccagagtggacgacgccaaggccctgatcgccgacagcggcctgaagatcctggcctgcgacgacctggacgaggccgccagaatggtggtgaagctgagcgagatcgtgaccctggccaagcaggcccacgtggacgtgaagttccagctgcccatctag

SEQ ID NO: 101110 - DNA, 1392 bp, synthetic construct
  misc_feature 1..1392: note = Description of Artificial Sequence: Synthetic coding sequence
  source 1..1392: mol_type = other DNA
atggccgccagcatgttctacggcagactggtggccgtggccaccctgagaaaccacagacccagaaccgcccagagagccgccgcccaggtgctgggcagcagcggcctgttcaacaaccacggcctgcaggtgcagcagcagcagcagagaaacctgagcctgcacgagtacatgagcatggagctgctgcaggaggccggcgtgagcgtgcccaagggctacgtggccaagagccccgacgaggcctacgccatcgccaagaagctgggcagcaaggacgtggtgatcaaggcccaggtgctggccggcggcagaggcaagggcaccttcgagagcggcctgaagggcggcgtgaagatcgtgttcagccccgaggaggccaaggccgtgagcagccagatgatcggcaagaagctgttcaccaagcagaccggcgagaagggcagaatctgcaaccaggtgctggtgtgcgagagaaagtaccccagaagagagtactacttcgccatcaccatggagagaagcttccagggccccgtgctgatcggcagcagccacggcggcgtgaacatcgaggacgtggccgccgagagccccgaggccatcatcaaggagcccatcgacatcgaggagggcatcaagaaggagcaggccctgcagctggcccagaagatgggcttcccccccaacatcgtggagagcgccgccgagaacatggtgaagctgtacagcctgttcctgaagtacgacgccaccatgatcgagatcaaccccatggtggaggacagcgacggcgccgtgctgtgcatggacgccaagatcaacttcgacagcaacagcgcctacagacagaagaagatcttcgacctgcaggactggacccaggaggacgagagagacaaggacgccgccaaggccaacctgaactacatcggcctggacggcaacatcggctgcctggtgaacggcgccggcctggccatggccaccatggacatcatcaagctgcacggcggcacccccgccaacttcctggacgtgggcggcggcgccaccgtgcaccaggtgaccgaggccttcaagctgatcaccagcgacaagaaggtgctggccatcctggtgaacatcttcggcggcatcatgagatgcgacgtgatcgcccagggcatcgtgatggccgtgaaggacctggagatcaagatccccgtggtggtgagactgcagggcaccagagtggacgacgccaaggccctgatcgccgacagcggcctgaagatcctggcctgcgacgacctggacgaggccgccagaatggtggtgaagctgagcgagatcgtgaccctggccaagcaggcccacgtggacgtgaagttccagctgcccatctag

SEQ ID NO: 101111 - DNA, 1218 bp, synthetic construct
  misc_feature 1..1218: note = Description of Artificial Sequence: Synthetic coding sequence
  source 1..1218: mol_type = other DNA
atgagcatggagctgctgcaggaggccggcgtgagcgtgcccaagggctacgtggccaagagccccgacgaggcctacgccatcgccaagaagctgggcagcaaggacgtggtgatcaaggcccaggtgctggccggcggcagaggcaagggcaccttcgagagcggcctgaagggcggcgtgaagatcgtgttcagccccgaggaggccaaggccgtgagcagccagatgatcggcaagaagctgttcaccaagcagaccggcgagaagggcagaatctgcaaccaggtgctggtgtgcgagagaaagtaccccagaagagagtactacttcgccatcaccatggagagaagcttccagggccccgtgctgatcggcagcagccacggcggcgtgaacatcgaggacgtggccgccgagagccccgaggccatcatcaaggagcccatcgacatcgaggagggcatcaagaaggagcaggccctgcagctggcccagaagatgggcttcccccccaacatcgtggagagcgccgccgagaacatggtgaagctgtacagcctgttcctgaagtacgacgccaccatgatcgagatcaaccccatggtggaggacagcgacggcgccgtgctgtgcatggacgccaagatcaacttcgacagcaacagcgcctacagacagaagaagatcttcgacctgcaggactggacccaggaggacgagagagacaaggacgccgccaaggccaacctgaactacatcggcctggacggcaacatcggctgcctggtgaacggcgccggcctggccatggccaccatggacatcatcaagctgcacggcggcacccccgccaacttcctggacgtgggcggcggcgccaccgtgcaccaggtgaccgaggccttcaagctgatcaccagcgacaagaaggtgctggccatcctggtgaacatcttcggcggcatcatgagatgcgacgtgatcgcccagggcatcgtgatggccgtgaaggacctggagatcaagatccccgtggtggtgagactgcagggcaccagagtggacgacgccaaggccctgatcgccgacagcggcctgaagatcctggcctgcgacgacctggacgaggccgccagaatggtggtgaagctgagcgagatcgtgaccctggccaagcaggcccacgtggacgtgaagttccagctgcccatctag

SEQ ID NO: 101112 - DNA, 876 bp, synthetic construct
  misc_feature 1..876: note = Description of Artificial Sequence: Synthetic coding sequence
  source 1..876: mol_type = other DNA
atggagagaagcttccagggccccgtgctgatcggcagcagccacggcggcgtgaacatcgaggacgtggccgccgagagccccgaggccatcatcaaggagcccatcgacatcgaggagggcatcaagaaggagcaggccctgcagctggcccagaagatgggcttcccccccaacatcgtggagagcgccgccgagaacatggtgaagctgtacagcctgttcctgaagtacgacgccaccatgatcgagatcaaccccatggtggaggacagcgacggcgccgtgctgtgcatggacgccaagatcaacttcgacagcaacagcgcctacagacagaagaagatcttcgacctgcaggactggacccaggaggacgagagagacaaggacgccgccaaggccaacctgaactacatcggcctggacggcaacatcggctgcctggtgaacggcgccggcctggccatggccaccatggacatcatcaagctgcacggcggcacccccgccaacttcctggacgtgggcggcggcgccaccgtgcaccaggtgaccgaggccttcaagctgatcaccagcgacaagaaggtgctggccatcctggtgaacatcttcggcggcatcatgagatgcgacgtgatcgcccagggcatcgtgatggccgtgaaggacctggagatcaagatccccgtggtggtgagactgcagggcaccagagtggacgacgccaaggccctgatcgccgacagcggcctgaagatcctggcctgcgacgacctggacgaggccgccagaatggtggtgaagctgagcgagatcgtgaccctggccaagcaggcccacgtggacgtgaagttccagctgcccatctag

SEQ ID NO: 101113 - DNA, 1218 bp, synthetic construct; identical to SEQ ID NO: 101111
  misc_feature 1..1218: note = Description of Artificial Sequence: Synthetic coding sequence
  source 1..1218: mol_type = other DNA

SEQ ID NO: 101114 - DNA, 990 bp, synthetic construct
  misc_feature 1..990: note = Description of Artificial Sequence: Synthetic coding sequence
  source 1..990: mol_type = other DNA
atgatcggcaagaagctgttcaccaagcagaccggcgagaagggcagaatctgcaaccaggtgctggtgtgcgagagaaagtaccccagaagagagtactacttcgccatcaccatggagagaagcttccagggccccgtgctgatcggcagcagccacggcggcgtgaacatcgaggacgtggccgccgagagccccgaggccatcatcaaggagcccatcgacatcgaggagggcatcaagaaggagcaggccctgcagctggcccagaagatgggcttcccccccaacatcgtggagagcgccgccgagaacatggtgaagctgtacagcctgttcctgaagtacgacgccaccatgatcgagatcaaccccatggtggaggacagcgacggcgccgtgctgtgcatggacgccaagatcaacttcgacagcaacagcgcctacagacagaagaagatcttcgacctgcaggactggacccaggaggacgagagagacaaggacgccgccaaggccaacctgaactacatcggcctggacggcaacatcggctgcctggtgaacggcgccggcctggccatggccaccatggacatcatcaagctgcacggcggcacccccgccaacttcctggacgtgggcggcggcgccaccgtgcaccaggtgaccgaggccttcaagctgatcaccagcgacaagaaggtgctggccatcctggtgaacatcttcggcggcatcatgagatgcgacgtgatcgcccagggcatcgtgatggccgtgaaggacctggagatcaagatccccgtggtggtgagactgcagggcaccagagtggacgacgccaaggccctgatcgccgacagcggcctgaagatcctggcctgcgacgacctggacgaggccgccagaatggtggtgaagctgagcgagatcgtgaccctggccaagcaggcccacgtggacgtgaagttccagctgcccatctag

SEQ ID NO: 101115 - DNA, 1041 bp, synthetic construct
  misc_feature 1..1041: note = Description of Artificial Sequence: Synthetic coding sequence
  source 1..1041: mol_type = other DNA
atgaccgccaccctggccgccgccgccgacatcgccaccatggtgagcggcagcagcggcctggccgccgccagactgctgagcagaagcttcctgctgccccagaacggcatcagacactgcagctacaccgccagcagacagcacctgtacgtggacaagaacaccaagatcatctgccagggcttcaccggcaagcagggcaccttccacagccagcaggccctggagtacggcaccaagctggtgggcggcaccacccccggcaagggcggccagacccacctgggcctgcccgtgttcaacaccgtgaaggaggccaaggagcagaccggcgccaccgccagcgtgatctacgtgcccccccccttcgccgccgccgccatcaacgaggccatcgaggccgagatccccctggtggtgtgcatcaccgagggcatcccccagcaggacatggtgagagtgaagcacaagctgctgagacaggagaagaccagactgatcggccccaactgccccggcgtgatcaaccccggcgagtgcaagatcggcatcatgcccggccacatccacaagaagggcagaatcggcatcgtgagcagaagcggcaccctgacctacgaggccgtgcaccagaccacccaggtgggcctgggccagagcctgtgcgtgggcatcggcggcgaccccttcaacggcaccgacttcatcgactgcctggagatcttcctgaacgacagcgccaccgagggcatcatcctgatcggcgagatcggcggcaacgccgaggagaacgccgccgagttcctgaagcagcacaacagcggccccaacagcaagcccgtggtgagcttcatcgccggcctgaccgccccccccggcagaagaatgggccacgccggcgccatcatcgccggcggcaagggcggcgccaaggagaagatcagcgccctgcagagcgccggcgtggtggtgagcatgagccccgcccagctgggcaccaccatctacaaggagttcgagaagagaaagatgctgtag

SEQ ID NO: 101116 - DNA, 5484 bp, synthetic construct
  misc_feature 1..5484: note = Description of Artificial Sequence: Synthetic coding sequence
  source 1..5484: mol_type = other DNA
atggccagaaagaagttcagcggcctggagatcagcctgatcgtgctgttcgtgatcgtgaccatcatcgccatcgccctgatcgtggtgctggccaccaagacccccgccgtggacgagatcagcgacagcaccagcacccccgccaccaccagagtgaccaccaaccccagcgacagcggcaagtgccccaacgtgctgaacgaccccgtgaacgtgagaatcaactgcatccccgagcagttccccaccgagggcatctgcgcccagagaggctgctgctggagaccctggaacgacagcctgatcccctggtgcttcttcgtggacaaccacggctacaacgtgcaggacatgaccaccaccagcatcggcgtggaggccaagctgaacagaatccccagccccaccctgttcggcaacgacatcaacagcgtgctgttcaccacccagaaccagacccccaacagattcagattcaagatcaccgaccccaacaacagaagatacgaggtgccccaccagtacgtgaaggagttcaccggccccaccgtgagcgacaccctgtacgacgtgaaggtggcccagaaccccttcagcatccaggtgatcagaaagagcaacggcaagaccctgttcgacaccagcatcggccccctggtgtacagcgaccagtacctgcagatcagcaccagactgcccagcgactacatctacggcatcggcgagcaggtgcacaagagattcagacacgacctgagctggaagacctggcccatcttcaccagagaccagctgcccggcgacaacaacaacaacctgtacggccaccagaccttcttcatgtgcatcgaggacaccagcggcaagagcttcggcgtgttcctgatgaacagcaacgccatggagatcttcatccagcccacccccatcgtgacctacagagtgaccggcggcatcctggacttctacatcctgctgggcgacacccccgagcaggtggtgcagcagtaccagcagctggtgggcctgcccgccatgcccgcctactggaacctgggcttccagctgagcagatggaactacaagagcctggacgtggtgaaggaggtggtgagaagaaacagagaggccggcatccccttcgacacccaggtgaccgacatcgactacatggaggacaagaaggacttcacctacgaccaggtggccttcaacggcctgccccagttcgtgcaggacctgcacgaccacggccagaagtacgtgatcatcctggaccccgccatcagcatcggcagaagagccaacggcaccacctacgccacctacgagagaggcaacacccagcacgtgtggatcaacgagagcgacggcagcacccccatcatcggcgaggtgtggcccggcctgaccgtgtaccccgacttcaccaaccccaactgcatcgactggtgggccaacgagtgcagcatcttccaccaggaggtgcagtacgacggcctgtggatcgacatgaacgaggtgagcagcttcatccagggcagcaccaagggctgcaacgtgaacaagctgaactacccccccttcacccccgacatcctggacaagctgatgtacagcaagaccatctgcatggacgccgtgcagaactggggcaagcagtacgacgtgcacagcctgtacggctacagcatggccatcgccaccgagcaggccgtgcagaaggtgttccccaacaagagaagcttcatcctgaccagaagcaccttcgccggcagcggcagacacgccgcccactggctgggcgacaacaccgccagctgggagcagatggagtggagcatcaccggcatgctggagttcagcctgttcggcatccccctggtgggcgccgacatctgcggcttcgtggccgagaccaccgaggagctgtgcagaagatggatgcagctgggcgccttctaccccttcagcagaaaccacaacagcgacggctacgagcaccaggaccccgccttcttcggccagaacagcctgctggtgaagagcagcagacagtacctgaccatcagatacaccctgctgcccttcctgtacaccctgttctacaaggcccacgtgttcggcgagaccgtggccagacccgtgctgcacgagttctacgaggacaccaacagctggatcgaggacaccgagttcctgtggggccccgccctgctgatcacccccgtgctgaagcagggcgccgacaccgtgagcgcctacatccccgacgccatctggtacgactacgagagcggcgccaagagaccctggagaaagcagagagtggacatgtacctgcccgccgacaagatcggcctgcacctgagaggcggctacatcatccccatccaggagcccgacgtgaccaccaccgccagcagaaagaaccccctgggcctgatcgtggccctgggcgagaacaacaccgccaagggcgacttcttctgggacgacggcgagaccaaggacaccatccagaacggcaactacatcctgtacaccttcagcgtgagcaacaacaccctggacatcgtgtgcacccacagcagctaccaggagggcaccaccctggccttccagaccgtgaagatcctgggcctgaccgacagcgtgaccgaggtgagagtggccgagaacaaccagcccatgaacgcccacagcaacttcacctacgacgccagcaaccaggtgctgctgatcgccgacctgaagctgaacctgggcagaaacttcagcgtgcagtggaaccagatcttcagcgagaacgagagattcaactgctaccccgacgccgacctggccaccgagcagaagtgcacccagagaggctgcgtgtggagaaccggcagcagcctgagcaaggcccccgagtgctacttccccagacaggacaacagctacagcgtgaacagcgccagatacagcagcatgggcatcaccgccgacctgcagctgaacaccgccaacgccagaatcaagctgcccagcgaccccatcagcaccctgagagtggaggtgaagtaccacaagaacgacatgctgcagttcaagatctacgacccccagaagaagagatacgaggtgcccgtgcccctgaacatccccaccacccccatcagcacctacgaggacagactgtacgacgtggagatcaaggagaaccccttcggcatccagatcagaagaagaagcagcggcagagtgatctgggacagctggctgcccggcttcgccttcaacgaccagttcatccagatcagcaccagactgcccagcgagtacatctacggcttcggcgaggtggagcacaccgccttcaagagagacctgaactggaacacctggggcatgttcaccagagaccagccccccggctacaagctgaacagctacggcttccacccctactacatggccctggaggaggagggcaacgcccacggcgtgttcctgctgaacagcaacgccatggacgtgaccttccagcccacccccgccctgacctacagaaccgtgggcggcatcctggacttctacatgttcctgggccccacccccgaggtggccaccaagcagtaccacgaggtgatcggccaccccgtgatgcccgcctactgggccctgggcttccagctgtgcagatacggctacgccaacaccagcgaggtgagagagctgtacgacgccatggtggccgccaacatcccctacgacgtgcagtacaccgacatcgactacatggagagacagctggacttcaccatcggcgaggccttccaggacctgccccagttcgtggacaagatcagaggcgagggcatgagatacatcatcatcctggaccccgccatcagcggcaacgagaccaagacctaccccgccttcgagagaggccagcagaacgacgtgttcgtgaagtggcccaacaccaacgacatctgctgggccaaggtgtggcccgacctgcccaacatcaccatcgacaagaccctgaccgaggacgaggccgtgaacgccagcagagcccacgtggccttccccgacttcttcagaaccagcaccgccgagtggtgggccagagagatcgtggacttctacaacgagaagatgaagttcgacggcctgtggatcgacatgaacgagcccagcagcttcgtgaacggcaccaccaccaaccagtgcagaaacgacgagctgaactaccccccctacttccccgagctgaccaagagaaccgacggcctgcacttcagaaccatctgcatggaggccgagcagatcctgagcgacggcaccagcgtgctgcactacgacgtgcacaacctgtacggctggagccagatgaagcccacccacgacgccctgcagaagaccaccggcaagagaggcatcgtgatcagcagaagcacctaccccaccagcggcagatggggcggccactggctgggcgacaactacgccagatgggacaacatggacaagagcatcatcggcatgatggagttcagcctgttcggcatgagctacaccggcgccgacatctgcggcttcttcaacaacagcgagtaccacctgtgcaccagatggatgcagctgggcgccttctacccctacagcagaaaccacaacatcgccaacaccagaagacaggaccccgccagctggaacgagaccttcgccgagatgagcagaaacatcctgaacatcagatacaccctgctgccctacttctacacccagatgcacgagatccacgccaacggcggcaccgtgatcagacccctgctgcacgagttcttcgacgagaagcccacctgggacatcttcaagcagttcctgtggggccccgccttcatggtgacccccgtgctggagccctacgtgcagaccgtgaacgcctacgtgcccaacgccagatggttcgactaccacaccggcaaggacatcggcgtgagaggccagttccagaccttcaacgccagctacgacaccatcaacctgcacgtgagaggcggccacatcctgccctgccaggagcccgcccagaacaccttctacagcagacagaagcacatgaagctgatcgtggccgccgacgacaaccagatggcccagggcagcctgttctgggacgacggcgagagcatcgacacctacgagagagacctgtacctgagcgtgcagttcaacctgaaccagaccaccctgaccagcaccatcctgaagagaggctacatcaacaagagcgagaccagactgggcagcctgcacgtgtggggcaagggcaccacccccgtgaacgccgtgaccctgacctacaacggcaacaagaacagcctgcccttcaacgaggacaccaccaacatgatcctgagaatcgacctgaccacccacaacgtgaccctggaggagcccatcgagatcaactggagctag

SEQ ID NO: 101117 - DNA, 2616 bp, synthetic construct
  misc_feature 1..2616: note = Description of Artificial Sequence: Synthetic coding sequence
  source 1..2616: mol_type = other DNA
atgaagtacagctgctgcgccctggtgctggccgtgctgggcaccgagctgctgggcagcctgtgcagcaccgtgagaagccccagattcagaggcagaatccagcaggagagaaagaacatcagacccaacatcatcctggtgctgaccgacgaccaggacgtggagctgggcagcctgcaggtgatgaacaagaccagaaagatcatggagcacggcggcgccaccttcatcaacgccttcgtgaccacccccatgtgctgccccagcagaagcagcatgctgaccggcaagtacgtgcacaaccacaacgtgtacaccaacaacgagaactgcagcagccccagctggcaggccatgcacgagcccagaaccttcgccgtgtacctgaacaacaccggctacagaaccgccttcttcggcaagtacctgaacgagtacaacggcagctacatcccccccggctggagagagtggctgggcctgatcaagaacagcagattctacaactacaccgtgtgcagaaacggcatcaaggagaagcacggcttcgactacgccaaggactacttcaccgacctgatcaccaacgagagcatcaactacttcaagatgagcaagagaatgtacccccacagacccgtgatgatggtgatcagccacgccgccccccacggccccgaggacagcgccccccagttcagcaagctgtaccccaacgccagccagcacatcacccccagctacaactacgcccccaacatggacaagcactggatcatgcagtacaccggccccatgctgcccatccacatggagttcaccaacatcctgcagagaaagagactgcagaccctgatgagcgtggacgacagcgtggagagactgtacaacatgctggtggagaccggcgagctggagaacacctacatcatctacaccgccgaccacggctaccacatcggccagttcggcctggtgaagggcaagagcatgccctacgacttcgacatcagagtgcccttcttcatcagaggccccagcgtggagcccggcagcatcgtgccccagatcgtgctgaacatcgacctggcccccaccatcctggacatcgccggcctggacaccccccccgacgtggacggcaagagcgtgctgaagctgctggaccccgagaagcccggcaacagattcagaaccaacaagaaggccaagatctggagagacaccttcctggtggagagaggcaagttcctgagaaagaaggaggagagcagcaagaacatccagcagagcaaccacctgcccaagtacgagagagtgaaggagctgtgccagcaggccagataccagaccgcctgcgagcagcccggccagaagtggcagtgcatcgaggacaccagcggcaagctgagaatccacaagtgcaagggccccagcgacctgctgaccgtgagacagagcaccagaaacctgtacgccagaggcttccacgacaaggacaaggagtgcagctgcagagagagcggctacagagccagcagaagccagagaaagagccagagacagttcctgagaaaccagggcacccccaagtacaagcccagattcgtgcacaccagacagaccagaagcctgagcgtggagttcgagggcgagatctacgacatcaacctggaggaggaggaggagctgcaggtgctgcagcccagaaacatcgccaagagacacgacgagggccacaagggccccagagacctgcaggccagcagcggcggcaacagaggcagaatgctggccgacagcagcaacgccgtgggcccccccaccaccgtgagagtgacccacaagtgcttcatcctgcccaacgacagcatccactgcgagagagagctgtaccagagcgccagagcctggaaggaccacaaggcctacatcgacaaggagatcgaggccctgcaggacaagatcaagaacctgagagaggtgagaggccacctgaagagaagaaagcccgaggagtgcagctgcagcaagcagagctactacaacaaggagaagggcgtgaagaagcaggagaagctgaagagccacctgcaccccttcaaggaggccgcccaggaggtggacagcaagctgcagctgttcaaggagaacaacagaagaagaaagaaggagagaaaggagaagagaagacagagaaagggcgaggagtgcagcctgcccggcctgacctgcttcacccacgacaacaaccactggcagaccgcccccttctggaacctgggcagcttctgcgcctgcaccagcagcaacaacaacacctactggtgcctgagaaccgtgaacgagacccacaacttcctgttctgcgagttcgccaccggcttcctggagtacttcgacatgaacaccgacccctaccagctgaccaacaccgtgcacaccgtggagagaggcatcctgaaccagctgcacgtgcagctgatggagctgagaagctgccagggctacaagcagtgcaaccccagacccaagaacctggacgtgggcaacaaggacggcggcagctacgacctgcacagaggccagctgtgggacggctgggagggctag

SEQ ID NO: 101118 - DNA, 2616 bp, synthetic construct; identical to SEQ ID NO: 101117
  misc_feature 1..2616: note = Description of Artificial Sequence: Synthetic coding sequence
  source 1..2616: mol_type = other DNA

SEQ ID NO: 101119 - DNA, 2616 bp, synthetic construct; identical to SEQ ID NO: 101117
  misc_feature 1..2616: note = Description of Artificial Sequence: Synthetic coding sequence
  source 1..2616: mol_type = other DNA

SEQ ID NO: 101120 - DNA, 2616 bp, synthetic construct; identical to SEQ ID NO: 101117
  misc_feature 1..2616: note = Description of Artificial Sequence: Synthetic coding sequence
  source 1..2616: mol_type = other DNA

SEQ ID NO: 101121 - DNA, 90 bp, synthetic construct
  misc_feature 1..90: note = Description of Artificial Sequence: Synthetic coding sequence
  source 1..90: mol_type = other DNA
atgaagtacagctgctgcgccctggtgctggccgtgctgggcaccgagctgctgggcagcctgtgcagcaccgtgagaagccccagatag

SEQ ID NO: 101122 - DNA, 519 bp, synthetic construct
  misc_feature 1..519: note = Description of Artificial Sequence: Synthetic coding sequence
  source 1..519: mol_type = other DNA
atgaagtacagctgctgcgccctggtgctggccgtgctgggcaccgagctgctgggcagcctgtgcagcaccgtgagaagccccagattcagaggcagaatccagcaggagagaaagaacatcagacccaacatcatcctggtgctgaccgacgaccaggacgtggagctgggcagcctgcaggtgatgaacaagaccagaaagatcatggagcacggcggcgccaccttcatcaacgccttcgtgaccacccccatgtgctgccccagcagaagcagcatgctgaccggcaagtacgtgcacaaccacaacgtgtacaccaacaacgagaactgcagcagccccagctggcaggccatgcacgagcccagaaccttcgccgtgtacctgaacaacaccggctacagaaccgccttcttcggcaagtacctgaacgagtacaacggcagctacatcccccccggctggagagagtggctgggcctgatcaagaacagcagattctacaactacacctag

SEQ ID NO: 101123 - DNA, 231 bp, synthetic construct
  misc_feature 1..231: note = Description of Artificial Sequence: Synthetic coding sequence
  source 1..231: mol_type = other DNA
atgaagtacagctgctgcgccctggtgctggccgtgctgggcaccgagctgctgggcagcctgtgcagcaccgtgagaagccccagattcagaggcagaatccagcaggagagaaagaacatcagacccaacatcatcctggtgctgaccgacgaccaggacgtggagctgggcagcctgcaggtgatgaacaagaccagaaagatcatggagcacggcggcgccacctag

SEQ ID NO: 101124 - DNA, 258 bp, synthetic construct
  misc_feature 1..258: note = Description of Artificial Sequence: Synthetic coding sequence
  source 1..258: mol_type = other DNA
atgaagtacagctgctgcgccctggtgctggccgtgctgggcaccgagctgctgggcagcctgtgcagcaccgtgagaagccccagattcagaggcagaatccagcaggagagaaagaacatcagacccaacatcatcctggtgctgaccgacgaccaggacgtggagctgggcagcctgcaggtgatgaacaagaccagaaagatcatggagcacggcggcgccaccttcatcaacgccttcgtgaccaccccctag

SEQ ID NO: 101125 - DNA, 171 bp, synthetic construct
  misc_feature 1..171: note = Description of Artificial Sequence: Synthetic coding sequence
  source 1..171: mol_type = other DNA
atgaagtacagctgctgcgccctggtgctggccgtgctgggcaccgagctgctgggcagcctgtgcagcaccgtgagaagccccagattcagaggcagaatccagcaggagagaaagaacatcagacccaacatcatcctggtgctgaccgacgaccaggacgtggagtag

SEQ ID NO: 101126 - DNA, 2613 bp, synthetic construct
  misc_feature 1..2613: note = Description of Artificial Sequence: Synthetic coding sequence
  source 1..2613: mol_type = other DNA
atgggcccccccagcctggtgctgtgcctgctgagcgccaccgtgttcagcctgctgggcggcagcagcgccttcctgagccaccacagactgaagggcagattccagagagacagaagaaacatcagacccaacatcatcctggtgctgaccgacgaccaggacgtggagctgggcagcatgcaggtgatgaacaagaccagaagaatcatggagcagggcggcgcccacttcatcaacgccttcgtgaccacccccatgtgctgccccagcagaagcagcatcctgaccggcaagtacgtgcacaaccacaacacctacaccaacaacgagaactgcagcagccccagctggcaggcccagcacgagagcagaaccttcgccgtgtacctgaacagcaccggctacagaaccgccttcttcggcaagtacctgaacgagtacaacggcagctacgtgccccccggctggaaggagtgggtgggcctgctgaagaacagcagattctacaactacaccctgtgcagaaacggcgtgaaggagaagcacggcagcgactacagcaaggactacctgaccgacctgatcaccaacgacagcgtgagcttcttcagaaccagcaagaagatgtacccccacagacccgtgctgatggtgatcagccacgccgccccccacggccccgaggacagcgccccccagtacagcagactgttccccaacgccagccagcacatcacccccagctacaactacgcccccaaccccgacaagcactggatcatgagatacaccggccccatgaagcccatccacatggagttcaccaacatgctgcagagaaagagactgcagaccctgatgagcgtggacgacagcatggagaccatctacaacatgctggtggagaccggcgagctggacaacacctacatcgtgtacaccgccgaccacggctaccacatcggccagttcggcctggtgaagggcaagagcatgccctacgagttcgacatcagagtgcccttctacgtgagaggccccaacgtggaggccggctgcctgaacccccacatcgtgctgaacatcgacctggcccccaccatcctggacatcgccggcctggacatccccgccgacatggacggcaagagcatcctgaagctgctggacaccgagagacccgtgaacagattccacctgaagaagaagatgagagtgtggagagacagcttcctggtggagagaggcaagctgctgcacaagagagacaacgacaaggtggacgcccaggaggagaacttcctgcccaagtaccagagagtgaaggacctgtgccagagagccgagtaccagaccgcctgcgagcagctgggccagaagtggcagtgcgtggaggacgccaccggcaagctgaagctgcacaagtgcaagggccccatgagactgggcggcagcagagccctgagcaacctggtgcccaagtactacggccagggcagcgaggcctgcacctgcgacagcggcgactacaagctgagcctggccggcagaagaaagaagctgttcaagaagaagtacaaggccagctacgtgagaagcagaagcatcagaagcgtggccatcgaggtggacggcagagtgtaccacgtgggcctgggcgacgccgcccagcccagaaacctgaccaagagacactggcccggcgcccccgaggaccaggacgacaaggacggcggcgacttcagcggcaccggcggcctgcccgactacagcgccgccaaccccatcaaggtgacccacagatgctacatcctggagaacgacaccgtgcagtgcgacctggacctgtacaagagcctgcaggcctggaaggaccacaagctgcacatcgaccacgagatcgagaccctgcagaacaagatcaagaacctgagagaggtgagaggccacctgaagaagaagagacccgaggagtgcgactgccacaagatcagctaccacacccagcacaagggcagactgaagcacagaggcagcagcctgcaccccttcagaaagggcctgcaggagaaggacaaggtgtggctgctgagagagcagaagagaaagaagaagctgagaaagctgctgaagagactgcagaacaacgacacctgcagcatgcccggcctgacctgcttcacccacgacaaccagcactggcagaccgcccccttctggaccctgggccccttctgcgcctgcaccagcgccaacaacaacacctactggtgcatgagaaccatcaacgagacccacaacttcctgttctgcgagttcgccaccggcttcctggagtacttcgacctgaacaccgacccctaccagctgatgaacgccgtgaacaccctggacagagacgtgctgaaccagctgcacgtgcagctgatggagctgagaagctgcaagggctacaagcagtgcaaccccagaaccagaaacatggacctgggcctgaaggacggcggcagctacgagcagtacagacagttccagagaagaaagtggcccgagatgaagagacccagcagcaagagcctgggccagctgtgggagggctgggagggctag

SEQ ID NO: 101127 - DNA, 2559 bp, synthetic construct
  misc_feature 1..2559: note = Description of Artificial Sequence: Synthetic coding sequence
  source 1..2559: mol_type = other DNA
atgggcccccccagcctggtgctgtgcctgctgagcgccaccgtgttcagcctgctgggcggcagcagcgccttcctgagccaccacagactgaagggcagattccagagagacagaagaaacatcagacccaacatcatcctggtgctgaccgacgaccaggacgtggagctgggcagcatgcaggtgatgaacaagaccagaagaatcatggagcagggcggcgcccacttcatcaacgccttcgtgaccacccccatgtgctgccccagcagaagcagcatcctgaccggcaagtacgtgcacaaccacaacacctacaccaacaacgagaactgcagcagccccagctggcaggcccagcacgagagcagaaccttcgccgtgtacctgaacagcaccggctacagaaccgccttcttcggcaagtacctgaacgagtacaacggcagctacgtgccccccggctggaaggagtgggtgggcctgctgaagaacagcagattctacaactacaccctgtgcagaaacggcgtgaaggagaagcacggcagcgactacagcaaggactacctgaccgacctgatcaccaacgacagcgtgagcttcttcagaaccagcaagaagatgtacccccacagacccgtgctgatggtgatcagccacgccgccccccacggccccgaggacagcgccccccagtacagcagactgttccccaacgccagccagcacatcacccccagctacaactacgcccccaaccccgacaagcactggatcatgagatacaccggccccatgaagcccatccacatggagttcaccaacatgctgcagagaaagagactgcagaccctgatgagcgtggacgacagcatggagaccatctacaacatgctggtggagaccggcgagctggacaacacctacatcgtgtacaccgccgaccacggctaccacatcggccagttcggcctggtgaagggcaagagcatgccctacgagttcgacatcagagtgcccttctacgtgagaggccccaacgtggaggccggctgcctgaacccccacatcgtgctgaacatcgacctggcccccaccatcctggacatcgccggcctggacatccccgccgacatggacggcaagagcatcctgaagctgctggacaccgagagacccgtgaacagattccacctgaagaagaagatgagagtgtggagagacagcttcctggtggagagaggcaagctgctgcacaagagagacaacgacaaggtggacgcccaggaggagaacttcctgcccaagtaccagagagtgaaggacctgtgccagagagccgagtaccagaccgcctgcgagcagctgggccagaagtggcagtgcgtggaggacgccaccggcaagctgaagctgcacaagtgcaagggccccatgagactgggcggcagcagagccctgagcaacctggtgcccaagtactacggccagggcagcgaggcctgcacctgcgacagcggcgactacaagctgagcctggccggcagaagaaagaagctgttcaagaagaagtacaaggccagctacgtgagaagcagaagcatcagaagcgtggccatcgaggtggacggcagagtgtaccacgtgggcctgggcgacgccgcccagcccagaaacctgaccaagagacactggcccggcgcccccgaggaccaggacgacaaggacggcggcgacttcagcggcaccggcggcctgcccgactacagcgccgccaaccccatcaaggtgacccacagatgctacatcctggagaacgacaccgtgcagtgcgacctggacctgtacaagagcctgcaggcctggaaggaccacaagctgcacatcgaccacgagatcgagaccctgcagaacaagatcaagaacctgagagaggtgagaggccacctgaagaagaagagacccgaggagtgcgactgccacaagatcagctaccacacccagcacaagggcagactgaagcacagaggcagcagcctgcaccccttcagaaagggcctgcaggagaaggacaaggtgtggctgctgagagagcagaagagaaagaagaagctgagaaagctgctgaagagactgcagaacaacgacacctgcagcatgcccggcctgacctgcttcacccacgacaaccagcactggcagaccgcccccttctggaccctgggccccttctgcgcctgcaccagcgccaacaacaacacctactggtgcatgagaaccatcaacgagacccacaacttcctgttctgcgagttcgccaccggcttcctggagtacttcgacctgaacaccgacccctaccagctgatgaacgccgtgaacaccctggacagagacgtgctgaaccagctgcacgtgcagctgatggagctgagaagctgcaagggctacaagcagtgcaaccccagaaccagaaacatggacctgggcctgaaggacggcggcagctacgagcagtacagaggccagctgtgggagggctgggagggctag

SEQ ID NO: 101128 - DNA, 870 bp, synthetic construct
  misc_feature 1..870: note = Description of Artificial Sequence: Synthetic coding sequence
  source 1..870: mol_type = other DNA
ttcagcggcaccggcggcctgcccgactacagcgccgccaaccccatcaaggtgacccacagatgctacatcctggagaacgacaccgtgcagtgcgacctggacctgtacaagagcctgcaggcctggaaggaccacaagctgcacatcgaccacgagatcgagaccctgcagaacaagatcaagaacctgagagaggtgagaggccacctgaagaagaagagacccgaggagtgcgactgccacaagatcagctaccacacccagcacaagggcagactgaagcacagaggcagcagcctgcaccccttcagaaagggcctgcaggagaaggacaaggtgtggctgctgagagagcagaagagaaagaagaagctgagaaagctgctgaagagactgcagaacaacgacacctgcagcatgcccggcctgacctgcttcacccacgacaaccagcactggcagaccgcccccttctggaccctgggccccttctgcgcctgcaccagcgccaacaacaacacctactggtgcatgagaaccatcaacgagacccacaacttcctgttctgcgagttcgccaccggcttcctggagtacttcgacctgaacaccgacccctaccagctgatgaacgccgtgaacaccctggacagagacgtgctgaaccagctgcacgtgcagctgatggagctgagaagctgcaagggctacaagcagtgcaaccccagaaccagaaacatggacctgggcctgaaggacggcggcagctacgagcagtacagacagttccagagaagaaagtggcccgagatgaagagacccagcagcaagagcctgggccagctgtgggagggctgggagggctag

SEQ ID NO: 101129 - DNA, 2604 bp, synthetic construct
  misc_feature 1..2604: note = Description of Artificial Sequence: Synthetic coding sequence
  source 1..2604: mol_type = other DNA
atgggcccccccagcctggtgctgtgcctgctgagcgccaccgtgttcagcctgctgggcggcagcagcgccttcctgagccaccacagactgaagggcagattccagagagacagaagaaacatcagacccaacatcatcctggtgctgaccgacgaccaggacgtggagctgggcagcatgcaggtgatgaacaagaccagaagaatcatggagcagggcggcgcccacttcatcaacgccttcgtgaccacccccatgtgctgccccagcagaagcagcatcctgaccggcaagtacgtgcacaaccacaacacctacaccaacaacgagaactgcagcagccccagctggcaggcccagcacgagagcagaaccttcgccgtgtacctgaacagcaccggctacagaaccgccttcttcggcaagtacctgaacgagtacaacggcagctacgtgccccccggctggaaggagtgggtgggcctgctgaagaacagcagattctacaactacaccctgtgcagaaacggcgtgaaggagaagcacggcagcgactacagcaaggactacctgaccgacctgatcaccaacgacagcgtgagcttcttcagaaccagcaagaagatgtacccccacagacccgtgctgatggtgatcagccacgccgccccccacggccccgaggacagcgccccccagtacagcagactgttccccaacgccagccagcacatcacccccagctacaactacgcccccaaccccgacaagcactggatcatgagatacaccggccccatgaagcccatccacatggagttcaccaacatgctgcagagaaagagactgcagaccctgatgagcgtggacgacagcatggagaccatctacaacatgctggtggagaccggcgagctggacaacacctacatcgtgtacaccgccgaccacggctaccacatcggccagttcggcctggtgaagggcaagagcatgccctacgagttcgacatcagagtgcccttctacgtgagaggccccaacgtggaggccggctgcctgaacccccacatcgtgctgaacatcgacctggcccccaccatcctggacatcgccggcctggacatccccgccgacatggacggcaagagcatcctgaagctgctggacaccgagagacccgtgaacagattccacctgaagaagaagatgagagtgtggagagacagcttcctggtggagagaggcaagctgctgcacaagagagacaacgacaaggtggacgcccaggaggagaacttcctgcccaagtaccagagagtgaaggacctgtgccagagagccgagtaccagaccgcctgcgagcagctgggccagaagtggcagtgcgtggaggacgccaccggcaagctgaagctgcacaagtgcaagggccccatgagactgggcggcagcagagccctgagcaacctggtgcccaagtactacggccagggcagcgaggcctgcacctgcgacagcggcgactacaagctgagcctggccggcagaagaaagaagctgttcaagaagaagtacaaggccagctacgtgagaagcagaagcatcagaagcgtggccatcgaggtggacggcagagtgtaccacgtgggcctgggcgacgccgcccagcccagaaacctgaccaagagacactggcccggcgcccccgaggaccaggacgacaaggacggcggcgacttcagcggcaccggcggcctgcccgactacagcgccgccaaccccatcaaggtgacccacagatgctacatcctggagaacgacaccgtgcagtgcgacctggacctgtacaagagcctgcaggcctggaaggaccacaagctgcacatcgaccacgagatcgagaccctgcagaacaagatcaagaacctgagagaggtgagaggccacctgaagaagaagagacccgaggagtgcgactgccacaagatcagctaccacacccagcacaagggcagactgaagcacagaggcagcagcctgcaccccttcagaaagggcctgcaggagaaggacaaggtgtggctgctgagagagcagaagagaaagaagaagctgagaaagctgctgaagagactgcagaacaacgacacctgcagcatgcccggcctgacctgcttcacccacgacaaccagcactggcagaccgcccccttctggaccctgggccccttctgcgcctgcaccagcgccaacaacaacacctactggtgcatgagaaccatcaacgagacccacaacttcctgttctgcgagttcgccaccggcttcctggagtacttcgacctgaacaccgacccctaccagctgatgaacgccgtgaacaccctggacagagacgtgctgaaccagctgcacgtgcagctgatggagctgagaagctgcaagggctacaagcagtgcaaccccagaaccagaaacatggacctggacggcggcagctacgagcagtacagacagttccagagaagaaagtggcccgagatgaagagacccagcagcaagagcctgggccagctgtgggagggctgggagggctag

SEQ ID NO: 101130 - DNA, 2613 bp, synthetic construct; identical to SEQ ID NO: 101126
  misc_feature 1..2613: note = Description of Artificial Sequence: Synthetic coding sequence
  source 1..2613: mol_type = other DNA

SEQ ID NO: 101131 - DNA, 1125 bp, synthetic construct
  misc_feature 1..1125: note = Description of Artificial Sequence: Synthetic coding sequence
  source 1..1125: mol_type = other DNA
atggccgcccccgccctgggcctggtgtgcggcagatgccccgagctgggcctggtgctgctgctgctgctgctgagcctgctgtgcggcgccgccggcagccaggaggccggcaccggcgccggcgccggcagcctggccggcagctgcggctgcggcaccccccagagacccggcgcccacggcagcagcgccgccgcccacagatacagcagagaggccaacgcccccggccccgtgcccggcgagagacagctggcccacagcaagatggtgcccatccccgccggcgtgttcaccatgggcaccgacgacccccagatcaagcaggacggcgaggcccccgccagaagagtgaccatcgacgccttctacatggacgcctacgaggtgagcaacaccgagttcgagaagttcgtgaacagcaccggctacctgaccgaggccgagaagttcggcgacagcttcgtgttcgagggcatgctgagcgagcaggtgaagaccaacatccagcaggccgtggccgccgccccctggtggctgcccgtgaagggcgccaactggagacaccccgagggccccgacagcaccatcctgcacagacccgaccaccccgtgctgcacgtgagctggaacgacgccgtggcctactgcacctgggccggcaagagactgcccaccgaggccgagtgggagtacagctgcagaggcggcctgcacaacagactgttcccctggggcaacaagctgcagcccaagggccagcactacgccaacatctggcagggcgagttccccgtgaccaacaccggcgaggacggcttccagggcaccgcccccgtggacgccttcccccccaacggctacggcctgtacaacatcgtgggcaacgcctgggagtggaccagcgactggtggaccgtgcaccacagcgtggaggagaccctgaaccccaagggcccccccagcggcaaggacagagtgaagaagggcggcagctacatgtgccacagaagctactgctacagatacagatgcgccgccagaagccagaacacccccgacagcagcgccagcaacctgggcttcagatgcgccgccgacagactgcccaccatggactag

SEQ ID NO: 101132 - DNA, 1281 bp, synthetic construct
  misc_feature 1..1281: note = Description of Artificial Sequence: Synthetic coding sequence
  source 1..1281: mol_type = other DNA
atggccgcccccgccctgggcctggtgtgcggcagatgccccgagctgggcctggtgctgctgctgctgctgctgagcctgctgtgcggcgccgccggcagccaggaggccggcaccggcgccggcgccggcagcctggccggcagctgcggctgcggcaccccccagagacccggcgcccacggcagcagcgccgccgcccacagatacagcagagaggccaacgcccccggccccgtgcccggcgagagacagctggcccacagcaagatggtgcccatccccgccggcgtgttcaccatgggcaccgacgacccccagatcaagcaggacggcgaggcccccgccagaagagtgaccatcgacgccttctacatggacgcctacgaggtgagcaacaccgagttcgagaagttcgtgaacagcaccggctacctgaccgaggccgagaagttcggcgacagcttcgtgttcgagggcatgctgagcgagcaggtgaagaccaacatccagcaggccgtggccgccgccccctggtggctgcccgtgaagggcgccaactggagacaccccgagggccccgacagcaccatcctgcacagacccgaccaccccgtgctgcacgtgagctggaacgacgccgtggcctactgcacctgggccggcaagagactgcccaccgaggccgagtgggagtacagctgcagaggcggcctgcacaacagactgttcccctggggcaacaagctgcagcccaagggccagcactacgccaacatctggcagggcgagttccccgtgaccaacaccggcgaggacggcttccagggcaccgcccccgtggacgccttcccccccaacggctacggcctgtacaacatcgtgggcaacgcctgggagtggaccagcgactggtggaccgtgcaccacagcgtggaggagaccctgaaccccaagggcccccccagcggcaaggacagagtgaagaagggcggcagctacatgtgccacagaagccaggagtactacgacccctacttccaggacgtggccagcgagatgctgagaagacacaccgccagcagatggaaggccttcagcagcctggagccctgctgcagcatcagaagacaccagcagtacgccgccatcgagagactgacctgcggcaagttcgagctgagatgcgccagcctgagaaagatcgactgcctgaacaccaacatcgcctgcagctacagcatgagacaggacggccccagactgcactgcgtggactag

SEQ ID NO: 101133 - DNA, 1287 bp, synthetic construct
  misc_feature 1..1287: note = Description of Artificial Sequence: Synthetic coding sequence
  source 1..1287: mol_type = other DNA
atggccgcccccgccctgggcctggtgtgcggcagatgccccgagctgggcctggtgctgctgctgctgctgctgagcctgctgtgcggcgccgccggcagccaggaggccggcaccggcgccggcgccggcagcctggccggcagctgcggctgcggcaccccccagagacccggcgcccacggcagcagcgccgccgcccacagatacagcagagaggccaacgcccccggccccgtgcccggcgagagacagctggcccacagcaagatggtgcccatccccgccggcgtgttcaccatgggcaccgacgacccccagatcaagcaggacggcgaggcccccgccagaagagtgaccatcgacgccttctacatggacgcctacgaggtgagcaacaccgagttcgagaagttcgtgaacagcaccggctacctgaccgaggccgagaagttcggcgacagcttcgtgttcgagggcatgctgagcgagcaggtgaagaccaacatccagcaggccgtggccgccgccccctggtggctgcccgtgaagggcgccaactggagacaccccgagggccccgacagcaccatcctgcacagacccgaccaccccgtgctgcacgtgagctggaacgacgccgtggcctactgcacctgggccggcaagagactgcccaccgaggccgagtgggagtacagctgcagaggcggcctgcacaacagactgttcccctggggcaacaagctgcagcccaagggccagcactacgccaacatctggcagggcgagttccccgtgaccaacaccggcgaggacggcttccagggcaccgcccccgtggacgccttcccccccaacggctacggcctgtacaacatcgtgggcaacgcctgggagtggaccagcgactggtggaccgtgcaccacagcgtggaggagaccctgaaccccaagggcccccccagcggcaaggacagagtgaagaagggcggcctgagcaaggcccaccagagaatcagccaggagtactacgacccctacttccaggacgtggccagcgagatgctgagaagacacaccgccagcagatggaaggccttcagcagcctggagccctgctgcagcatcagaagacaccagcagtacgccgccatcgagagactgacctgcggcaagttcgagctgagatgcgccagcctgagaaagatcgactgcctgaacaccaacatcgcctgcagctacagcatgagacaggacggccccagactgcactgcgtggactag

SEQ ID NO: 101134 - DNA, 1050 bp, synthetic construct
  misc_feature 1..1050: note = Description of Artificial Sequence: Synthetic coding sequence
  source 1..1050: mol_type = other DNA
atggccgcccccgccctgggcctggtgtgcggcagatgccccgagctgggcctggtgctgctgctgctgctgctgagcctgctgtgcggcgccgccggcagccaggaggccggcaccggcgccggcgccggcagcctggccggcagctgcggctgcggcaccccccagagacccggcgcccacggcagcagcgccgccgcccacagatacagcagagaggccaacgcccccggccccgtgcccggcgagagacagctggcccacagcaagatggtgcccatccccgccggcgtgttcaccatgggcaccgacgacccccagatcaagcaggacggcgaggcccccgccagaagagtgaccatcgacgccttctacatggacgcctacgaggtgagcaacaccgagttcgagaagttcgtgaacagcaccggctacctgaccgaggtggccgccgccccctggtggctgcccgtgaagggcgccaactggagacaccccgagggccccgacagcaccatcctgcacagacccgaccaccccgtgctgcacgtgagctggaacgacgccgtggcctactgcacctgggccggcaagagactgcccaccgaggccgagtgggagtacagctgcagaggcggcctgcacaacagactgttcccctggggcaacaagctgcagcccaagggccagcactacgccaacatctggcagggcgagttccccgtgaccaacaccggcgaggacggcttccagggcaccgcccccgtggacgccttcccccccaacggctacggcctgtacaacatcgtgggcaacgcctgggagtggaccagcgactggtggaccgtgcaccacagcgtggaggagaccctgaaccccaagggcccccccagcggcaaggacagagtgaagaagggcggcagctacatgtgccacagaagctactgctacagatacagatgcgccgccagaagccagaacacccccgacagcagcgccagcaacctgggcttcagatgcgccgccgacagactgcccaccatggactag

SEQ ID NO: 101135 - DNA, 1065 bp, synthetic construct
  misc_feature 1..1065: note = Description of Artificial Sequence: Synthetic coding sequence
  source 1..1065: mol_type = other DNA
atggccgcccccgccctgggcctggtgtgcggcagatgccccgagctgggcctggtgctgctgctgctgctgctgagcctgctgtgcggcgccgccggcagccaggaggccggcaccggcgccggcgccggcagcctggccggcagctgcggctgcggcaccccccagagacccggcgcccacggcagcagcgccgccgcccacagatacagcagagaggccaacgcccccggccccgtgcccggcgagagacagctggcccacagcaagatggtgcccatccccgccggcgtgttcaccatgggcaccgacgacccccagatcaagcaggacggcgaggcccccgccagaagagtgaccatcgacgccttctacatggacgcctacgaggtgagcaacaccgagttcgagaagttcgtgaacagcaccggctacctgaccgaggccgagaagttcggcgacagcttcgtgttcgagggcatgctgagcgagcaggtgaagaccaacatccagcaggccgtggccgccgccccctggtggctgcccgtgaagggcgccaactggagacaccccgagggccccgacagcaccatcctgcacagacccgaccaccccgtgctgcacgtgagctggaacgacgccgtggcctactgcacctgggccggcaagagactgcccaccgaggccgagtgggagtacagctgcagaggcggcctgcacaacagactgttcccctggggcaacaagctgcagcccaagggccagcactacgccaacatctggcagggcgagttccccgtgaccaacaccggcgaggacggcttccagggcaccgcccccgtggacgccttcccccccaacggctacggcctgtacaacatcgtgggcaacgcctgggagtggaccagcgactggtggaccgtgcaccacagcgtggaggagaccctgaaccccagctactgctacagatacagatgcgccgccagaagccagaacacccccgacagcagcgccagcaacctgggcttcagatgcgccgccgacagactgcccaccatggactag

SEQ ID NO: 101136 - DNA, 1638 bp, synthetic construct
  misc_feature 1..1638: note = Description of Artificial Sequence: Synthetic coding sequence
  source 1..1638: mol_type = other DNA
atgctgctgctgcacagagccgtggtgctgagactgcagcaggcctgcagactgaagagcatccccagcagaatctgcatccaggcctgcagcaccaacgacagcttccagccccagagacccagcctgaccttcagcggcgacaacagcagcacccagggctggagagtgatgggcaccctgctgggcctgggcgccgtgctggcctaccaggaccacagatgcagagccgcccaggagagcacccacatctacaccaaggaggaggtgagcagccacaccagccccgagaccggcatctgggtgaccctgggcagcgaggtgttcgacgtgaccgagttcgtggacctgcaccccggcggccccagcaagctgatgctggccgccggcggccccctggagcccttctgggccctgtacgccgtgcacaaccagagccacgtgagagagctgctggcccagtacaagatcggcgagctgaaccccgaggacaaggtggcccccaccgtggagaccagcgacccctacgccgacgaccccgtgagacaccccgccctgaaggtgaacagccagagacccttcaacgccgagcccccccccgagctgctgaccgagaactacatcacccccaaccccatcttcttcaccagaaaccacctgcccgtgcccaacctggaccccgacacctacagactgcacgtggtgggcgcccccggcggccagagcctgagcctgagcctggacgacctgcacaacttccccagatacgagatcaccgtgaccctgcagtgcgccggcaacagaagaagcgagatgacccaggtgaaggaggtgaagggcctggagtggagaaccggcgccatcagcaccgccagatgggccggcgccagactgtgcgacgtgctggcccaggccggccaccagctgtgcgagaccgaggcccacgtgtgcttcgagggcctggacagcgaccccaccggcaccgcctacggcgccagcatccccctggccagagccatggaccccgaggccgaggtgctgctggcctacgagatgaacggccagcccctgcccagagaccacggcttccccgtgagagtggtggtgcccggcgtggtgggcgccagacacgtgaagtggctgggcagagtgagcgtgcagcccgaggagagctacagccactggcagagaagagactacaagggcttcagccccagcgtggactgggagaccgtggacttcgacagcgcccccagcatccaggagctgcccgtgcagagcgccatcaccgagcccagagacggcgagaccgtggagagcggcgaggtgaccatcaagggctacgcctggagcggcggcggcagagccgtgatcagagtggacgtgagcctggacggcggcctgacctggcaggtggccaagctggacggcgaggagcagagacccagaaaggcctgggcctggagactgtggcagctgaaggcccccgtgcccgccggccagaaggagctgaacatcgtgtgcaaggccgtggacgacggctacaacgtgcagcccgacaccgtggcccccatctggaacctgagaggcgtgctgagcaacgcctggcacagagtgcacgtgtacgtgagcccctag

SEQ ID NO: 101137 - DNA, 1638 bp, synthetic construct; identical to SEQ ID NO: 101136
  misc_feature 1..1638: note = Description of Artificial Sequence: Synthetic coding sequence
  source 1..1638: mol_type = other DNA

SEQ ID NO: 101138 - DNA, 1638 bp, synthetic construct; identical to SEQ ID NO: 101136
  misc_feature 1..1638: note = Description of Artificial Sequence: Synthetic coding sequence
  source 1..1638: mol_type = other DNA

SEQ ID NO: 101139 - DNA, 1638 bp, synthetic construct; identical to SEQ ID NO: 101136
  misc_feature 1..1638: note = Description of Artificial Sequence: Synthetic coding sequence
  source 1..1638: mol_type = other DNA

SEQ ID NO: 101140 - DNA, 489 bp, synthetic construct
  misc_feature 1..489: note = Description of Artificial Sequence: Synthetic coding sequence
  source 1..489: mol_type = other DNA
atgctgctgctgcacagagccgtggtgctgagactgcagcaggcctgcagactgaagagcatccccagcagaatctgcatccaggcctgcagcaccaacgacagcttccagccccagagacccagcctgaccttcagcggcgacaacagcagcacccagggctggagagtgatgggcaccctgctgggcctgggcgccgtgctggcctaccaggaccacagatgcagagccgcccaggagagcacccacatctacaccaaggaggaggtgagcagccacaccagccccgagaccggcatctgggtgaccctgggcagcgaggtgttcgacgtgaccgagttcgtggacctgcaccccggcggccccagcaagctgatgctggccgccggcggccccctggagcccttctgggccctgtacgccgtgcacaaccagagccacgtgagagagctgctggcccagtacaagatcggcgagctgaacccctag

SEQ ID NO: 101141 - DNA, 132 bp, synthetic construct
  misc_feature 1..132: note = Description of Artificial Sequence: Synthetic coding sequence
  source 1..132: mol_type = other DNA
atgctgctgctgcacagagccgtggtgctgagactgcagcaggcctgcagactgaagagcatccccagcagaatctgcatccaggcctgcagcaccaacgacagcttccagccccagagacccagcctgtag

SEQ ID NO: 101142 - DNA, 1638 bp, synthetic construct; identical to SEQ ID NO: 101136
  misc_feature 1..1638: note = Description of Artificial Sequence: Synthetic coding sequence
  source 1..1638: mol_type = other DNA

SEQ ID NO: 101143 - DNA, 1638 bp, synthetic construct; identical to SEQ ID NO: 101136
  misc_feature 1..1638: note = Description of Artificial Sequence: Synthetic coding sequence
  source 1..1638: mol_type = other DNA

SEQ ID NO: 101144 - DNA, 366 bp, synthetic construct
  misc_feature 1..366: note = Description of Artificial Sequence: Synthetic coding sequence
  source 1..366: mol_type = other DNA
atgctgctgctgcacagagccgtggtgctgagactgcagcaggcctgcagactgaagagcatccccagcagaatctgcatccaggcctgcagcaccaacgacagcttccagccccagagacccagcctgaccttcagcggcgacaacagcagcacccagggctggagagtgatgggcaccctgctgggcctgggcgccgtgctggcctaccaggaccacagatgcagagccgcccaggagagcacccacatctacaccaaggaggaggtgagcagccacaccagccccgagaccggcatctgggtgaccctgggcagcgaggtgttcgacgtgaccgagttcgtggacctgcaccccggcggctag

SEQ ID NO: 101145 - DNA, 783 bp, synthetic construct
  misc_feature 1..783: note = Description of Artificial Sequence: Synthetic coding sequence
  source 1..783: mol_type = other DNA
atggccgagagcgaggccgagacccccagcacccccggcgagttcgagagcaagtacttcgagttccacggcgtgagactgccccccttctgcagaggcaagatggaggagatcgccaacttccccgtgagacccagcgacgtgtggatcgtgacctaccccaagagcggcaccagcctgctgcaggaggtggtgtacctggtgagccagggcgccgaccccgacgagatcggcctgatgaacatcgacgagcagctgcccgtgctggagtacccccagcccggcctggacatcatcaaggagctgaccagccccagactgatcaagagccacctgccctacagattcctgcccagcgacctgcacaacggcgacagcaaggtgatctacatggccagaaaccccaaggacctggtggtgagctactaccagttccacagaagcctgagaaccatgagctacagaggcaccttccaggagttctgcagaagattcatgaacgacaagctgggctacggcagctggttcgagcacgtgcaggagttctgggagcacagaatggacagcaacgtgctgttcctgaagtacgaggacatgcacagagacctggtgaccatggtggagcagctggccagattcctgggcgtgagctgcgacaaggcccagctggaggccctgaccgagcactgccaccagctggtggaccagtgctgcaacgccgaggccctgcccgtgggcagagcccactgcgtgttcgccagaaagatcttcctgagctggtag

SEQ ID NO: 101146 - DNA, 855 bp, synthetic construct
  misc_feature 1..855: note = Description of Artificial Sequence: Synthetic coding sequence
  source 1..855: mol_type = other DNA
atggccgagagcgaggccgagacccccagcacccccggcgagttcgagagcaagtacttcgagttccacggcgtgagactgccccccttctgcagaggcaagatggaggagatcgccaacttccccgtgagacccagcgacgtgtggatcgtgacctaccccaagagcggcaccagcctgctgcaggaggtggtgtacctggtgagccagggcgccgaccccgacgagatcggcctgatgaacatcgacgagcagctgcccgtgctggagtacccccagcccggcctggacatcatcaaggagctgaccagccccagactgatcaagagccacctgccctacagattcctgcccagcgacctgcacaacggcgacagcaaggtgatctacatggccagaaaccccaaggacctggtggtgagctactaccagttccacagaagcctgagaaccatgagctacagaggcaccttccaggagttctgcagaagattcatgaacgacaagctgggctacggcagctggttcgagcacgtgcaggagttctgggagcacagaatggacagcaacgtgctgttcctgaagtacgaggacatgcacagagacctggtgaccatggtggagcagctggccagattcctgggcgtgagctgcgacaaggcccagctggaggccctgaccgagcactgccaccagctggtggaccagtgctgcaacgccgaggccctgcccgtgggcagaggcagagtgggcctgtggaaggacatcttcaccgtgagcatgaacgagaagttcgacctggtgtacaagcagaagatgggcaagtgcgacctgaccttcgacttctacctgtag

SEQ ID NO: 101147 - DNA, 516 bp, synthetic construct
  misc_feature 1..516: note = Description of Artificial Sequence: Synthetic coding sequence
  source 1..516: mol_type = other DNA
atggccgagagcgaggccgagacccccagcacccccggcgagttcgagagcaagtacttcgagttccacggcgtgagactgccccccttctgcagaggcaagatggaggagatcgccaacttccccgtgagacccagcgacgtgtggatcgtgacctaccccaagagcgtgggctacggcagctggttcgagcacgtgcaggagttctgggagcacagaatggacagcaacgtgctgttcctgaagtacgaggacatgcacagagacctggtgaccatggtggagcagctggccagattcctgggcgtgagctgcgacaaggcccagctggaggccctgaccgagcactgccaccagctggtggaccagtgctgcaacgccgaggccctgcccgtgggcagaggcagagtgggcctgtggaaggacatcttcaccgtgagcatgaacgagaagttcgacctggtgtacaagcagaagatgggcaagtgcgacctgaccttcgacttctacctgtag

SEQ ID NO: 101148 - DNA, 171 bp, synthetic construct
  misc_feature 1..171: note = Description of Artificial Sequence: Synthetic coding sequence
  source 1..171: mol_type = other DNA
atgctggccaagctgctgtgcgaccaggtggtgggcgcccccatcgccgtgagcgccttctacgccggcatgagcatcctgcagggcaaggacgacatcttcctggacctgaagcagaagttctggaacacctacatgcagacccagagctggctgtggagaagcctgtag

SEQ ID NO: 101149 - DNA, 888 bp, synthetic construct
  misc_feature 1..888: note = Description of Artificial Sequence: Synthetic coding sequence
  source 1..888: mol_type = other DNA
atggagctgatccaggacaccagcagaccccccctggagtacgtgaagggcgtgcccctgatcaagtacttcgccgaggccctgggccccctgcagagcttccaggccagacccgacgacctgctgatcagcacctaccccaagagcggcaccacctgggtgagccagatcctggacatgatctaccagggcggcgacctggagaagtgccacagagcccccatcttcatgagagtgcccttcctggagttcaaggcccccggcatccccagcggcatggagaccctgaaggacacccccgcccccagactgctgaagacccacctgcccctggccctgctgccccagaccctgctggaccagaaggtgaaggtggtgtacgtggccagaaacgccaaggacgtggccgtgagctactaccacttctaccacatggccaaggtgcaccccgagcccggcacctgggacagcttcctggagaagttcatggtgggcgaggtgagctacggcagctggtaccagcacgtgcaggagtggtgggagctgagcagaacccaccccgtgctgtacctgttctacgaggacatgaaggagaaccccaagagagagatccagaagatcctggagttcgtgggcagaagcctgcccgaggagaccgtggacttcgtggtgcagcacaccagcttcaaggagatgaagaagaaccccatgaccaactacaccaccgtgccccaggagttcatggaccacagcatcagccccttcatgagaaagggcatggccggcgactggaagaccaccttcaccgtggcccagaacgagagattcgacgccgactacgccgagaagatggccggctgcagcctgagcttcagaagcgagctgtag

SEQ ID NO: 101150 - DNA, 888 bp, synthetic construct; identical to SEQ ID NO: 101149
  misc_feature 1..888: note = Description of Artificial Sequence: Synthetic coding sequence
  source 1..888: mol_type = other DNA

SEQ ID NO: 101151 - DNA, 654 bp, synthetic construct
  misc_feature 1..654: note = Description of Artificial Sequence: Synthetic coding sequence
  source 1..654: mol_type = other DNA
atgctggccaagctgctgtgcgaccaggtggtgggcgcccccatcgccgtgagcgccttctacgccggcatgagcatcctgcagggcaaggacgacatcttcctggacctgaagcagaagttctggaacacctacatggtggtgtacgtggccagaaacgccaaggacgtggccgtgagctactaccacttctaccacatggccaaggtgcaccccgagcccggcacctgggacagcttcctggagaagttcatggtgggcgaggtgagctacggcagctggtaccagcacgtgcaggagtggtgggagctgagcagaacccaccccgtgctgtacctgttctacgaggacatgaaggagaaccccaagagagagatccagaagatcctggagttcgtgggcagaagcctgcccgaggagaccgtggacttcgtggtgcagcacaccagcttcaaggagatgaagaagaaccccatgaccaactacaccaccgtgccccaggagttcatggaccacagcatcagccccttcatgagaaagggcatggccggcgactggaagaccaccttcaccgtggcccagaacgagagattcgacgccgactacgccgagaagatggccggctgcagcctgagcttcagaagcgagctgtag

SEQ ID NO: 101152 - DNA, 888 bp, synthetic construct; identical to SEQ ID NO: 101149
  misc_feature 1..888: note = Description of Artificial Sequence: Synthetic coding sequence
  source 1..888: mol_type = other DNA

SEQ ID NO: 101153 - DNA, 888 bp, synthetic construct; identical to SEQ ID NO: 101149
  misc_feature 1..888: note = Description of Artificial Sequence: Synthetic coding sequence
  source 1..888: mol_type = other DNA

SEQ ID NO: 101154 - DNA, 888 bp, synthetic construct
  misc_feature 1..888: note = Description of Artificial Sequence: Synthetic coding sequence
  source 1..888: mol_type = other DNA
atggagctgatccaggacatcagcagaccccccctggagtacgtgaagggcgtgcccctgatcaagtacttcgccgaggccctgggccccctgcagagcttccaggccagacccgacgacctgctgatcagcacctaccccaagagcggcaccacctgggtgagccagatcctggacatgatctaccagggcggcgacctggagaagtgccacagagcccccatcttcatgagagtgcccttcctggagttcaaggtgcccggcatccccagcggcatggagaccctgaagaacacccccgcccccagactgctgaagacccacctgcccctggccctgctgccccagaccctgctggaccagaaggtgaaggtggtgtacgtggccagaaacgccaaggacgtggccgtgagctactaccacttctaccacatggccaaggtgtacccccaccccggcacctgggagagcttcctggagaagttcatggccggcgaggtgagctacggcagctggtaccagcacgtgcaggagtggtgggagctgagcagaacccaccccgtgctgtacctgttctacgaggacatgaaggagaaccccaagagagagatccagaagatcctggagttcgtgggcagaagcctgcccgaggagaccgtggacctgatggtggagcacaccagcttcaaggagatgaagaagaaccccatgaccaactacaccaccgtgagaagagagttcatggaccacagcatcagccccttcatgagaaagggcatggccggcgactggaagaccaccttcaccgtggcccagaacgagagattcgacgccgactacgccaagaagatggccggctgcagcctgagcttcagaagcgagctgtag

SEQ ID NO: 101155 - DNA, 888 bp, synthetic construct; identical to SEQ ID NO: 101154
  misc_feature 1..888: note = Description of Artificial Sequence: Synthetic coding sequence
  source 1..888: mol_type = other DNA

SEQ ID NO: 101156 - DNA, 579 bp, synthetic construct
  misc_feature 1..579: note = Description of Artificial Sequence: Synthetic coding sequence
  source 1..579: mol_type = other DNA
atggagctgatccaggacatcagcagaccccccctggagtacgtgaagggcgtgcccctgatcaagtacttcgccgaggccctgggccccctgcagagcttccaggccagacccgacgacctgctgatcagcacctaccccaagagcggcaccacctgggtgagccagatcctggacatgatctaccagggcggcgacctggagaagtgccacagagcccccatcttcatgagagtgcccttcctggagttcaaggtgcccggcatccccagcggcatggagaccctgaagaacacccccgcccccagactgctgaagacccacctgcccctggccctgctgccccagaccctgctggaccagaaggtgaaggtggtgtacgtggccagaaacgccaaggacgtggccgtgagctactaccacttctaccacatggccaaggtgtacccccaccccggcacctgggagagcttcctggagaagttcatggccggcgaggtgagctacggcagctggtaccagcacgtgcaggagtggtgggagctgagcagaacccaccccgtgctgtacctgttctag

SEQ ID NO: 101157 - DNA, 891 bp, synthetic construct
  misc_feature 1..891: note = Description of Artificial Sequence: Synthetic coding sequence
  source 1..891: mol_type = other DNA
atggccctgaccagcgacctgggcaagcagatcaagctgaaggaggtggagggcaccctgctgcagcccgccaccgtggacaactggagccagatccagagcttcgaggccaagcccgacgacctgctgatctgcacctaccccaaggccggcaccacctggatccaggagatcgtggacatgatcgagcagaacggcgacgtggagaagtgccagagagccatcatccagcacagacaccccttcatcgagtgggccagacccccccagcccagcggcgtggagaaggccaaggccatgcccagccccagaatcctgaagacccacctgagcacccagctgctgccccccagcttctgggagaacaactgcaagttcctgtacgtggccagaaacgccaaggactgcatggtgagctactaccacttccagagaatgaaccacatgctgcccgaccccggcacctgggaggagtacttcgagaccttcatcaacggcaaggtggtgtggggcagctggttcgaccacgtgaagggctggtgggagatgaaggacagacaccagatcctgttcctgttctacgaggacatcaagagagaccccaagcacgagatcagaaaggtgatgcagttcatgggcaagaaggtggacgagaccgtgctggacaagatcgtgcaggagaccagcttcgagaagatgaaggagaaccccatgaccaacagaagcaccgtgagcaagagcatcctggaccagagcatcagcagcttcatgagaaagggcaccgtgggcgactggaagaaccacttcaccgtggcccagaacgagagattcgacgagatctacagaagaaagatggagggcaccagcatcaacttctgcatggagctgtag

SEQ ID NO: 101158 - DNA, 924 bp, synthetic construct
  misc_feature 1..924: note = Description of Artificial Sequence: Synthetic coding sequence
  source 1..924: mol_type = other DNA
atggccctgaccagcgacctgggcaagcagatcaagctgaaggaggtggagggcaccctgctgcagcccgccaccgtggacaactggagccagatccagagcttcgaggccaagcccgacgacctgctgatctgcacctaccccaaggccggcaccacctggatccaggagatcgtggacatgatcgagcagaacggcgacgtggagaagtgccagagagccatcatccagcacagacaccccttcatcgagtgggccagacccccccagcccagcgagaccggcttccaccacgtggcccaggccggcctgaagctgctgagcagcagcaacccccccgccagcaccagccagagcgccaagatcaccgacctgctgccccccagcttctgggagaacaactgcaagttcctgtacgtggccagaaacgccaaggactgcatggtgagctactaccacttccagagaatgaaccacatgctgcccgaccccggcacctgggaggagtacttcgagaccttcatcaacggcaaggtggtgtggggcagctggttcgaccacgtgaagggctggtgggagatgaaggacagacaccagatcctgttcctgttctacgaggacatcaagagagaccccaagcacgagatcagaaaggtgatgcagttcatgggcaagaaggtggacgagaccgtgctggacaagatcgtgcaggagaccagcttcgagaagatgaaggagaaccccatgaccaacagaagcaccgtgagcaagagcatcctggaccagagcatcagcagcttcatgagaaagggcaccgtgggcgactggaagaaccacttcaccgtggcccagaacgagagattcgacgagatctacagaagaaagatggagggcaccagcatcaacttctgcatggagctgtag

SEQ ID NO: 101159 - DNA, 933 bp, synthetic construct
  misc_feature 1..933: note = Description of Artificial Sequence: Synthetic coding sequence
  source 1..933: mol_type = other DNA
atggccctgaccagcgacctgggcaagcagatcaagctgaaggaggtggagggcaccctgctgcagcccgccaccgtggacaactggagccagatccagagcttcgaggccaagcccgacgacctgctgatctgcacctaccccaaggccggcaccacctggatccaggagatcgtggacatgatcgagcagaacggcgacgtggagaagtgccagagagccatcatccagcacagacaccccttcatcgagtgggccagacccccccagcccagcgtgctggtgctgagaagatgcttcctgctgagctacttcaagggcgtggagaaggccaaggccatgcccagccccagaatcctgaagacccacctgagcacccagctgctgccccccagcttctgggagaacaactgcaagttcctgtacgtggccagaaacgccaaggactgcatggtgagctactaccacttccagagaatgaaccacatgctgcccgaccccggcacctgggaggagtacttcgagaccttcatcaacggcaaggtggtgtggggcagctggttcgaccacgtgaagggctggtgggagatgaaggacagacaccagatcctgttcctgttctacgaggacatcaagagagaccccaagcacgagatcagaaaggtgatgcagttcatgggcaagaaggtggacgagaccgtgctggacaagatcgtgcaggagaccagcttcgagaagatgaaggagaaccccatgaccaacagaagcaccgtgagcaagagcatcctggaccagagcatcagcagcttcatgagaaagggcaccgtgggcgactggaagaaccacttcaccgtggcccagaacgagagattcgacgagatctacagaagaaagatggagggcaccagcatcaacttctgcatggagctgtag

SEQ ID NO: 101160 - DNA, 639 bp, synthetic construct
  misc_feature 1..639: note = Description of Artificial Sequence: Synthetic coding sequence
  source 1..639: mol_type = other DNA
atgggcccccccagcgccagcccccacagagagtgcatcccctggcagggcctgctgctgaccgccagcctgctgaacttctggaacccccccaccaccgccaagctgaccatcgagagcatgcccctgagcgtggccgagggcaaggaggtgctgctgctggtgcacaacctgccccagcacctgttcggctacagctggtacaagggcgagagagtggacggcaacagcctgatcgtgggctacgtgatcggcacccagcaggccacccccggcgccgcctacagcggcagagagaccatctacaccaacgccagcctgctgatccagaacgtgacccagaacgacatcggcttctacaccctgcaggtgatcaagagcgacctggtgaacgaggaggccaccggccagttccacgtgtaccaggagaacgcccccggcctgcccgtgggcgccgtggccggcatcgtgaccggcgtgctggtgggcgtggccctggtggccgccctggtgtgcttcctgctgctggccaagaccggcagaccctggagcctgccccagctgtgcctgctggacgtgcccagcctgcactgccccggcccccccacccagccccaggacagcagcttccacctgtag

SEQ ID NO: 101161 - DNA, 1098 bp, synthetic construct
  misc_feature 1..1098: note = Description of Artificial Sequence: Synthetic coding sequence
  source 1..1098: mol_type = other DNA
atggacggccccgccgagccccagatccccggcctgtgggacacctacgaggacgacatcagcgagatcagccagaagctgcccggcgagtacttcagatacaagggcgtgcccttccccgtgggcctgtacagcctggagagcatcagcctggccgagaacacccaggacgtgagagacgacgacatcttcatcatcacctaccccaagagcggcaccacctggatgatcgagatcatctgcctgatcctgaaggagggcgaccccagctggatcagaagcgtgcccatctgggagagagccccctggtgcgagaccatcgtgggcgccttcagcctgcccgaccagtacagccccagactgatgagcagccacctgcccatccagatcttcaccaaggccttcttcagcagcaaggccaaggtgatctacatgggcagaaaccccagagacgtggtggtgagcctgtaccactacagcaagatcgccggccagctgaaggaccccggcacccccgaccagttcctgagagacttcctgaagggcgaggtgcagttcggcagctggttcgaccacatcaagggctggctgagaatgaagggcaaggacaacttcctgttcatcacctacgaggagctgcagcaggacctgcagggcagcgtggagagaatctgcggcttcctgggcagacccctgggcaaggaggccctgggcagcgtggtggcccacagcaccttcagcgccatgaaggccaacaccatgagcaactacaccctgctgccccccagcctgctggaccacagaagaggcgccttcctgagaaagggcgtgtgcggcgactggaagaaccacttcaccgtggcccagagcgaggccttcgacagagcctacagaaagcagatgagaggcatgcccaccttcccctgggacgaggaccccgaggaggacggcagccccgaccccgagcccagccccgagcccgagcccaagcccagcctggagcccaacaccagcctggagagagagcccagacccaacagcagccccagccccagccccggccaggccagcgagaccccccaccccagacccagctag

SEQ ID NO: 101162 - DNA, 1053 bp, synthetic construct
  misc_feature 1..1053: note = Description of Artificial Sequence: Synthetic coding sequence
  source 1..1053: mol_type = other DNA
atggccagccccccccccttccacagccagaagctgcccggcgagtacttcagatacaagggcgtgcccttccccgtgggcctgtacagcctggagagcatcagcctggccgagaacacccaggacgtgagagacgacgacatcttcatcatcacctaccccaagagcggcaccacctggatgatcgagatcatctgcctgatcctgaaggagggcgaccccagctggatcagaagcgtgcccatctgggagagagccccctggtgcgagaccatcgtgggcgccttcagcctgcccgaccagtacagccccagactgatgagcagccacctgcccatccagatcttcaccaaggccttcttcagcagcaaggccaaggtgatctacatgggcagaaaccccagagacgtggtggtgagcctgtaccactacagcaagatcgccggccagctgaaggaccccggcacccccgaccagttcctgagagacttcctgaagggcgaggtgcagttcggcagctggttcgaccacatcaagggctggctgagaatgaagggcaaggacaacttcctgttcatcacctacgaggagctgcagcaggacctgcagggcagcgtggagagaatctgcggcttcctgggcagacccctgggcaaggaggccctgggcagcgtggtggcccacagcaccttcagcgccatgaaggccaacaccatgagcaactacaccctgctgccccccagcctgctggaccacagaagaggcgccttcctgagaaagggcgtgtgcggcgactggaagaaccacttcaccgtggcccagagcgaggccttcgacagagcctacagaaagcagatgagaggcatgcccaccttcccctgggacgaggaccccgaggaggacggcagccccgaccccgagcccagccccgagcccgagcccaagcccagcctggagcccaacaccagcctggagagagagcccagacccaacagcagccccagccccagccccggccaggccagcgagaccccccaccccagacccagctag

SEQ ID NO: 101163 - DNA, 1041 bp, synthetic construct
  misc_feature 1..1041: note = Description of Artificial Sequence: Synthetic coding sequence
  source 1..1041: mol_type = other DNA
atggtggagaaggaggaggccggcggcggcatcagcgaggaggaggccgcccagtacgacagacagatcagactgtggggcctggaggcccagaagagactgagagccagcagagtgctgctggtgggcctgaagggcctgggcgccgagatcgccaagaacctgatcctggccggcgtgaagggcctgaccatgctggaccacgagcaggtgacccccgaggaccccggcgcccagttcctgatcagaaccggcagcgtgggcagaaacagagccgaggccagcctggagagagcccagaacctgaaccccatggtggacgtgaaggtggacaccgaggacatcgagaagaagcccgagagcttcttcacccagttcgacgccgtgtgcctgacctgctgcagcagagacgtgatcgtgaaggtggaccagatctgccacaagaacagcatcaagttcttcaccggcgacgtgttcggctaccacggctacaccttcgccaacctgggcgagcacgagttcgtggaggagaagaccaaggtggccaaggtgagccagggcgtggaggacggccccgacaccaagagagccaagctggacagcagcgagaccaccatggtgaagaagaaggtggtgttctgccccgtgaaggaggccctggaggtggactggagcagcgagaaggccaaggccgccctgaagagaaccaccagcgactacttcctgctgcaggtgctgctgaagttcagaaccgacaagggcagagaccccagcagcgacacctacgaggaggacagcgagctgctgctgcagatcagaaacgacgtgctggacagcctgggcatcagccccgacctgctgcccgaggacttcgtgagatactgcttcagcgagatggcccccgtgtgcgccgtggtgggcggcatcctggcccaggagatcgtgaaggccctgagccagagagaccccccccacaacaacttcttcttcttcgacggcatgaagggcaacggcatcgtggagtgcctgggccccaagtag

SEQ ID NO: 101164 - DNA, 801 bp, synthetic construct
  misc_feature 1..801: note = Description of Artificial Sequence: Synthetic coding sequence
  source 1..801: mol_type = other DNA
atggtggagaaggaggaggccggcggcggcatcagcgaggaggaggccgcccagtacgacagacagatcagactgtggggcctggaggcccagaagagactgagagccagcagagtgctgctggtgggcctgaagggcctgggcgccgagatcgccaagaacctgatcctggccggcgtgaagggcctgaccatgctggaccacgagcaggtgacccccgaggaccccggcgcccagttcctgatcagaaccggcagcgtgggcagaaacagagccgaggccagcctggagagagcccagaacctgaaccccatggtggacgtgaaggtggacaccgaggacatcgagaagaagcccgagagcttcttcacccagttcgacgccgtgtgcctgacctgctgcagcagagacgtgatcgtgaaggtggaccagatctgccacaagaacagcatcaagttcttcaccggcgacgtgttcggctaccacggctacaccttcgccaacctgggcgagcacgagttcgtggaggagaagaccaaggtggccaaggtgagccagggcgtggaggacggccccgacaccaagagagccaagctggacagcagcgagaccaccatggtgaagaagaaggtggtgttctgccccgtgaaggaggccctggaggtggactggagcagcgagaaggccaaggccgccctgaagagaaccaccagcgactacttcctgctgcagggcaccgccagccccagatggccccagtgcgtgagatggctggagggcttctggcacagaaagctgtag

SEQ ID NO: 101165 - DNA, 900 bp, synthetic construct
  misc_feature 1..900: note = Description of Artificial Sequence: Synthetic coding sequence
  source 1..900: mol_type = other DNA
atggtggagaaggaggaggccggcggcggcatcagcgaggaggaggccgcccagtacgacagacagatcagactgtggggcctggaggcccagaagagactgagagccagcagagtgctgctggtgggcctgaagggcctgggcgccgagatcgccaagaacctgatcctggccggcgtgaagggcctgaccatgctggaccacgagcaggtgacccccgaggaccccggcgcccagttcctgatcagaaccggcagcgtgggcagaaacagagccgaggccagcctggagagagcccagaacctgaaccccatggtggacgtgaaggtggacaccgaggacatcgagaagaagcccgagagcttcttcacccagttcgacgccgtgtgcctgacctgctgcagcagagacgtgatcgtgaaggtggaccagatctgccacaagaacagcatcaagttcttcaccggcgacgtgttcggctaccacggctacaccttcgccaacctgggcgagcacgagttcgtggaggagaagaccaaggtggccaaggtgagccagggcgtggaggacggccccgacaccaagagagccaagctggacagcagcgagaccaccatggtgaagaagaaggtggtgttctgccccgtgaaggaggccctggaggtggactggagcagcgagaaggccaaggccgccctgaagagaaccaccagcgactacttcctgctgcagggccccgtgagcgccggccccagcagccagcagctgctgctgctgagatggcacgagggcgagtgggactgcggcgtgccctggccccaggtgaacagcagattcggcagccccagagacgccaactgcagcatgcccacctgcatcccctgccccctgcccagctag

SEQ ID NO: 101166 - DNA, 900 bp, synthetic construct
  misc_feature 1..900: note = Description of Artificial Sequence: Synthetic coding sequence
  source 1..900: mol_type = other DNA
atggtggagaaggaggaggccggcggcggcatcagcgaggaggaggccgcccagtacgacagacagatcagactgtggggcctggaggcccagaagagactgagagccagcagagtgctgctggtgggcctgaagggcctgggcgccgagatcgccaagaacctgatcctggccggcgtgaagggcctgaccatgctggaccacgagcaggtgacccccgaggaccccggcgcccagttcctgatcagaaccggcagcgtgggcagaaacagagccgaggccagcctggagagagcccagaacctgaaccccatggtggacgtgaaggtggacaccgaggacatcgagaagaagcccgagagcttcttcacccagttcgacgccgtgtgcctgacctgctgcagcagagacgtgatcgtgaaggtggaccagatctgccacaagaacagcatcaagttcttcaccggcgacgtgttcggctaccacggctacaccttcgccaacctgggcgagcacgagttcgtggaggagaagaccaaggtggccaaggtgagccagggcgtggaggacggccccgacaccaagagagccaagctggacagcagcgagaccaccatggtgaagaagaaggtggtgttctgccccgtgaaggaggccctggaggtggactggagcagcgagaaggccaaggccgccctgaagagaaccaccagcgactacttcctgctgcaggagctgttccccagaatcgtggagagagtgtacgcccagagacaccccagaagcaccgagagaacccacgccaagatgctgatccccttcctgaccaaggagaagcccggcttcctgggcgagatggccgtgagcagaagcggcgtgggcaagctgcagtgcagctag

SEQ ID NO: 101167 - DNA, 519 bp, synthetic construct
  misc_feature 1..519: note = Description of Artificial Sequence: Synthetic coding sequence
  source 1..519: mol_type = other DNA
atgctggagaagaccaaggtggccaaggtgagccagggcgtggaggacggccccgacaccaagagagccaagctggacagcagcgagaccaccatggtgaagaagaaggtggtgttctgccccgtgaaggaggccctggaggtggactggagcagcgagaaggccaaggccgccctgaagagaaccaccagcgactacttcctgctgcaggtgctgctgaagttcagaaccgacaagggcagagaccccagcagcgacacctacgaggaggacagcgagctgctgctgcagatcagaaacgacgtgctggacagcctgggcatcagccccgacctgctgcccgaggacttcgtgagatactgcttcagcgagatggcccccgtgtgcgccgtggtgggcggcatcctggcccaggagatcgtgaaggccctgagccagagagaccccccccacaacaacttcttcttcttcgacggcatgaagggcaacggcatcgtggagtgcctgggccccaagtag

SEQ ID NO: 101168 - DNA, 1935 bp, synthetic construct
  misc_feature 1..1935: note = Description of Artificial Sequence: Synthetic coding sequence
  source 1..1935: mol_type = other DNA
atggacgacatcgccgacagaatgagaatggacgccggcgaggtgaccctggtgaaccacaacagcgtgttcaagacccacctgctgccccagaccggcttccccgaggaccagctgagcctgagcgaccagcagatcctgagcagcagacagggccacctggacagaagcttcacctgcagcaccagaagcgccgcctacaaccccagctactacagcgacaaccccagcagcgacagcttcctgggcagcggcgacctgagaaccttcggccagagcgccaacggccagtggagaaacagcacccccagcagcagcagcagcctgcagaagagcagaaacagcagaagcctgtacctggagaccagaaagaccagcagcggcctgagcaacagcttcgccggcaagagcaaccaccactgccacgtgagcgcctacgagaagagcttccccatcaagcccgtgcccagccccagctggagcggcagctgcagaagaagcctgctgagccccaagaagacccagagaagacacgtgagcaccgccgaggagaccgtgcaggaggaggagagagagatctacagacagctgctgcagatggtgaccggcaagcagttcaccatcgccaagcccaccacccacttccccctgcacctgagcagatgcctgagcagcagcaagaacaccctgaaggacagcctgttcaagaacggcaacagctgcgccagccagatcatcggcagcgacaccagcagcagcggcagcgccagcatcctgaccaaccaggagcagctgagccacagcgtgtacagcctgagcagctacacccccgacgtggccttcggcagcaaggacagcggcaccctgcaccacccccaccaccaccacagcgtgccccaccagcccgacaacctggccgccagcaacacccagagcgagggcagcgacagcgtgatcctgctgaaggtgaaggacagccagacccccacccccagcagcaccttcttccaggccgagctgtggatcaaggagctgaccagcgtgtacgacagcagagccagagagagactgagacagatcgaggagcagaaggccctggccctgcagctgcagaaccagagactgcaggagagagagcacagcgtgcacgacagcgtggagctgcacctgagagtgcccctggagaaggagatccccgtgaccgtggtgcaggagacccagaagaagggccacaagctgaccgacagcgaggacgagttccccgagatcaccgaggagatggagaaggagatcaagaacgtgttcagaaacggcaaccaggacgaggtgctgagcgaggccttcagactgaccatcaccagaaaggacatccagaccctgaaccacctgaactggctgaacgacgagatcatcaacttctacatgaacatgctgatggagagaagcaaggagaagggcctgcccagcgtgcacgccttcaacaccttcttcttcaccaagctgaagaccgccggctaccaggccgtgaagagatggaccaagaaggtggacgtgttcagcgtggacatcctgctggtgcccatccacctgggcgtgcactggtgcctggccgtggtggacttcagaaagaagaacatcacctactacgacagcatgggcggcatcaacaacgaggcctgcagaatcctgctgcagtacctgaagcaggagagcatcgacaagaagagaaaggagttcgacaccaacggctggcagctgttcagcaagaagagccaggagatcccccagcagatgaacggcagcgactgcggcatgttcgcctgcaagtacgccgactgcatcaccaaggacagacccatcaacttcacccagcagcacatgccctacttcagaaagagaatggtgtgggagatcctgcacagaaagctgctgtag

SEQ ID NO: 101169 - DNA, 489 bp, synthetic construct
  misc_feature 1..489: note = Description of Artificial Sequence: Synthetic coding sequence
  source 1..489: mol_type = other DNA
atgaagatccccctgaccgccaccatctgcctgcccggcagcagcccccccggcctgtgcatcttcgccaaggtgagcgacgtgaagagactggagatggacgacatcgccgacagaatgagaatggacgccggcgaggtgaccctggtgaaccacaacagcgtgttcaagacccacctgctgccccagaccggcttccccgaggaccagctgagcctgagcgaccagcagatcctgagcagcagacagggccacctggacagaagcttcacctgcagcaccagaagcgccgcctacaaccccagctactacagcggccccggcctgggcgtgctggccagatacagctggggcaagatgctgaccttcggcggccaccacggcgtgaccctgatgcagatcagacacatggccgtggccggcttcagcagcttcatcaacttccagatcatcctgccccagaccgtgttcctggcccaggccatctag

SEQ ID NO: 101170 - DNA, 1932 bp, synthetic construct
  misc_feature 1..1932: note = Description of Artificial Sequence: Synthetic coding sequence
  source 1..1932: mol_type = other DNA
atggacgacatcgccgacagaatgagaatggacgccggcgaggtgaccctggtgaaccacaacagcgtgttcaagacccacctgctgccccagaccggcttccccgaggaccagctgagcctgagcgaccagcagatcctgagcagcagacagggccacctggacagaagcttcacctgcagcaccagaagcgccgcctacaaccccagctactacagcgacaaccccagcagcgacagcttcctgggcagcggcgacctgagaaccttcggccagagcgccaacggccagtggagaaacagcacccccagcagcagcagcagcctgcagaagagcagaaacagcagaagcctgtacctggagaccagaaagaccagcagcggcctgagcaacagcttcgccggcaagagcaaccaccactgccacgtgagcgcctacgagaagagcttccccatcaagcccgtgcccagccccagctggagcggcagctgcagaagaagcctgctgagccccaagaagacccagagaagacacgtgagcaccgccgaggagaccgtgcaggaggaggagagagagatctacagacagctgctgcagatggtgaccggcaagcagttcaccatcgccaagcccaccacccacttccccctgcacctgagcagatgcctgagcagcagcaagaacaccctgaaggacagcctgttcaagaacggcaacagctgcgccagccagatcatcggcagcgacaccagcagcagcggcagcgccagcatcctgaccaaccaggagcagctgagccacagcgtgtacagcctgagcagctacacccccgacgtggccttcggcagcaaggacagcggcaccctgcaccacccccaccaccaccacagcgtgccccaccagcccgacaacctggccgccagcaacacccagagcgagggcagcgacagcgtgatcctgctgaaggtgaaggacagccagacccccacccccagcagcaccttcttccaggccgagctgtggatcaaggagctgaccagcgtgtacgacagcagagccagagagagactgagacagatcgaggagcagaaggccctggccctgcagctgcagaaccagagactgcaggagagagagcacagcgtgcacgacagcgtggagctgcacctgagagtgcccctggagaaggagatccccgtgaccgtggtgcaggagacccagaagaagggccacaagctgaccgacagcgaggacgagttccccgagatcaccgaggagatggagaaggagatcaagaacgtgttcagaaacggcaaccaggacgaggtgctgagcgaggccttcagactgaccatcaccagaaaggacatccagaccctgaaccacctgaactggctgaacgacgagatcatcaacttctacatgaacatgctgatggagagaagcaaggagaagggcctgcccagcgtgcacgccttcaacaccttcttcttcaccaagctgaagaccgccggctaccaggccgtgaagagatggaccaagaaggtggacgtgttcagcgtggacatcctgctggtgcccatccacctgggcgtgcactggtgcctggccgtggtggacttcagaaagaagaacatcacctactacgacagcatgggcggcatcaacaacgaggcctgcagaatcctgctgcagtacctgaagcaggagagcatcgacaagaagagaaaggagttcgacaccaacggctggcagctgttcagcaagaagagccagatcccccagcagatgaacggcagcgactgcggcatgttcgcctgcaagtacgccgactgcatcaccaaggacagacccatcaacttcacccagcagcacatgccctacttcagaaagagaatggtgtgggagatcctgcacagaaagctgctgtag

SEQ ID NO: 101171 - DNA, 1935 bp, synthetic construct; identical to SEQ ID NO: 101168
  misc_feature 1..1935: note = Description of Artificial Sequence: Synthetic coding sequence
  source 1..1935: mol_type = other DNA

SEQ ID NO: 101172 - DNA, 1932 bp, synthetic construct; identical to SEQ ID NO: 101170
  misc_feature 1..1932: note = Description of Artificial Sequence: Synthetic coding sequence
  source 1..1932: mol_type = other DNA

SEQ ID NO: 101173 - DNA, 1935 bp, synthetic construct; identical to SEQ ID NO: 101168
  misc_feature 1..1935: note = Description of Artificial Sequence: Synthetic coding sequence
  source 1..1935: mol_type = other DNA

SEQ ID NO: 101174 - DNA, 2268 bp, synthetic construct
  misc_feature 1..2268: note = Description of Artificial Sequence: Synthetic coding sequence
  source 1..2268: mol_type = other DNA
atgaagaagcagagaaagatcctgtggagaaagggcatccacctggccttcagcgagaagtggaacaccggcttcggcggcttcaagaagttctacttccaccagcacctgtgcatcctgaaggccaagctgggcagacccgtgacctggaacagacagctgagacacttccagggcagaaagaaggccctgcagatccagaagacctggatcaaggacgagcccctgtgcgccaagaccaagttcaacgtggccacccagaacgtgagcaccctgagcagcaaggtgaagagaaaggacgccaagcacttcatcagcagcagcaagaccctgctgagactgcaggccgagaagctgctgagcagcgccaagaacagcgaccacgagtactgcagagagaagaacctgctgaaggccgtgaccgacttccccagcaacagcgccctgggccaggccaacggccacagacccagaaccgacccccagcccagcgacttccccatgaagttcaacggcgagagccagagccccggcgagagcggcaccatcgtggtgaccctgaacaaccacaagagaaagggcttctgctacggctgctgccagggccccgagcaccacagaaacggcggccccctgatccccaagaagttccagctgaaccagcacagaagaatcaagctgagccccctgatgatgtacgagaagctgagcatgatcagattcagatacagaatcctgagaagccagcacttcagaaccaagagcaaggtgtgcaagctgagaaaggcccagagaagctgggtgcagaaggtgaccggcgaccaccaggagaccagaagagagaacggcgagggcggcagctgcagccccttccccagccccgagcccaaggaccccagctgcagacaccagccctacttccccgacatggacagcagcgccgtggtgaagggcaccaacagccacgtgcccgactgccacaccaagggcagcagcttcctgggcaaggagctgagcctggacgaggccttccccgaccagcagaacggcagcgccaccaacgcctgggaccagagcagctgcagcagccccaagtgggagtgcaccgagctgatccacgacatccccctgcccgagcacagaagcaacaccatgttcatcagcgagaccgagagagagatcatgaccctgggccaggagaaccagaccagcagcgtgagcgacgacagagtgaagctgagcgtgagcggcgccgacaccagcgtgagcagcgtggacggccccgtgagccagaaggccgtgcagaacgagaacagctaccagatggaggaggacggcagcctgaagcagagcatcctgagcagcgagctgctggaccacccctactgcaagagccccctggaggcccccctggtgtgcagcggcctgaagctggagaaccaggtgggcggcggcaagaacagccagaaggccagccccgtggacgacgagcagctgagcgtgtgcctgagcggcttcctggacgaggtgatgaagaagtacggcagcctggtgcccctgagcgagaaggaggtgctgggcagactgaaggacgtgttcaacgaggacttcagcaacagaaagcccttcatcaacagagagatcaccaactacagagccagacaccagaagtgcaacttcagaatcttctacaacaagcacatgctggacatggacgacctggccaccctggacggccagaactggctgaacgaccaggtgatcaacatgtacggcgagctgatcatggacgccgtgcccgacaaggtgcacttcttcaacagcttcttccacagacagctggtgaccaagggctacaacggcgtgaagagatggaccaagaaggtggacctgttcaagaagagcctgctgctgatccccatccacctggaggtgcactggagcctgatcaccgtgaccctgagcaacagaatcatcagcttctacgacagccagggcatccacttcaagttctgcgtggagaacatcagaaagtacctgctgaccgaggccagagagaagaacagacccgagttcctgcagggctggcagaccgccgtgaccaagtgcatcccccagcagaagaacgacagcgactgcggcgtgttcgtgctgcagtactgcaagtgcctggccctggagcagcccttccagttcagccaggaggacatgcccagagtgagaaagagaatctacaaggagctgtgcgagtgcagactgatggactag

SEQ ID NO: 101175 - DNA, 3318 bp, synthetic construct
  misc_feature 1..3318: note = Description of Artificial Sequence: Synthetic coding sequence
  source 1..3318: mol_type = other DNA
atggccgccggcaagagcggcggcagcgccggcgagatcaccttcctggaggccctggccagaagcgagagcaagagagacggcggcttcaagaacaactggagcttcgaccacgaggaggagagcgagggcgacaccgacaaggacggcaccaacctgctgagcgtggacgaggacgaggacagcgagaccagcaagggcaagaagctgaacagaagaagcgagatcgtggccaacagcagcggcgagttcatcctgaagacctacgtgagaagaaacaagagcgagagcttcaagaccctgaagggcaaccccatcggcctgaacatgctgagcaacaacaagaagctgagcgagaacacccagaacaccagcctgtgcagcggcaccgtggtgcacggcagaagattccaccacgcccacgcccagatccccgtggtgaagaccgccgcccagagaaaggagtaccccccccacgtgcagaaggtggagatcaaccccgtgagactgagcagactgcagggcgtggagagaatcatgaagaagaccgaggagagcgagagccaggtggagcccgagatcaagagaaaggtgcagcagaagagacactgcagcacctaccagcccaccccccccctgagccccgccagcaagaagtgcctgacccacctggaggacctgcagagaaactgcagacaggccatcaccctgaacgagagcaccggccccctgctgagaaccagcatccaccagaacagcggcggccagaagagccagaacaccggcctgaccaccaagaagttctacggcaacaacgtggagaaggtgcccatcgacatcatcgtgaactgcgacgacagcaagcacacctacctgcagaccaacggcaaggtgatcctgcccggcgccaagatccccaagatcaccaacctgaaggagagaaagaccagcctgagcgacctgaacgaccccatcatcctgagcagcgacgacgacgacgacaacgacagaaccaacagaagagagagcatcagcccccagcccgccgacagcgcctgcagcagccccgcccccagcaccggcaaggtggaggccgccctgaacgagaacacctgcagagccgagagagagctgagaagcatccccgaggacagcgagctgaacaccgtgaccctgcccagaaaggccagaatgaaggaccagttcggcaacagcatcatcaacacccccctgaagagaagaaaggtgttcagccaggagccccccgacgccctggccctgagctgccagagcagcttcgacagcgtgatcctgaactgcagaagcatcagagtgggcaccctgttcagactgctgatcgagcccgtgatcttctgcctggacttcatcaagatccagctggacgagcccgaccacgaccccgtggagatcatcctgaacaccagcgacctgaccaagtgcgagtggtgcaacgtgagaaagctgcccgtggtgttcctgcaggccatccccgccgtgtaccagaagctgagcatccagctgcagatgaacaaggaggacaaggtgtggaacgactgcaagggcgtgaacaagctgaccaacctggaggagcagtacatcatcctgatcttccagaacggcctggacccccccgccaacatggtgttcgagagcatcatcaacgagatcggcatcaagaacaacatcagcaacttcttcgccaagatccccttcgaggaggccaacggcagactggtggcctgcaccagaacctacgaggagagcatcaagggcagctgcggccagaaggagaacaagatcaagaccgtgagcttcgagagcaagatccagctgagaagcaagcaggagttccagttcttcgacgaggaggaggagaccggcgagaaccacaccatcttcatcggccccgtggagaagctgatcgtgtacccccccccccccgccaagggcggcatcagcgtgaccaacgaggacctgcactgcctgaacgagggcgagttcctgaacgacgtgatcatcgacttctacctgaagtacctggtgctggagaagctgaagaaggaggacgccgacagaatccacatcttcagcagcttcttctacaagagactgaaccagagagagagaagaaaccacgagaccaccaacctgagcatccagcagaagagacacggcagagtgaagacctggaccagacacgtggacatcttcgagaaggacttcatcttcgtgcccctgaacgaggccgcccactggttcctggccgtggtgtgcttccccggcctggagaagcccaagtacgagcccaacccccactaccacgagaacgccgtgatccagaagtgcagcaccgtggaggacagctgcatcagcagcagcgccagcgagatggagagctgcagccagaacagcagcgccaagcccgtgatcaagaagatgctgaacaagaagcactgcatcgccgtgatcgacagcaaccccggccaggaggagagcgaccccagatacaagagaaacatctgcagcgtgaagtacagcgtgaagaagatcaaccacaccgccagcgagaacgaggagttcaacaagggcgagagcaccagccagaaggtggccgacagaaccaagagcgagaacggcctgcagaacgagagcctgagcagcacccaccacaccgacggcctgagcaagatcagactgaactacagcgacgagagccccgaggccggcaagatgctggaggacgagctggtggacttcagcgaggaccaggacaaccaggacgacagcagcgacgacggcttcctggccgacgacaactgcagcagcgagatcggccagtggcacctgaagcccaccatctgcaagcagccctgcatcctgctgatggacagcctgagaggccccagcagaagcaacgtggtgaagatcctgagagagtacctggaggtggagtgggaggtgaagaagggcagcaagagaagcttcagcaaggacgtgatgaagggcagcaaccccaaggtgccccagcagaacaacttcagcgactgcggcgtgtacgtgctgcagtacgtggagagcttcttcgagaaccccatcctgagcttcgagctgcccatgaacctggccaactggttccccccccccagaatgagaaccaagagagaggagatcagaaacatcatcctgaagctgcaggaggaccagagcaaggagaagagaaagcacaaggacacctacagcaccgaggcccccctgggcgagggcaccgagcagtacgtgaacagcatcagcgactag

SEQ ID NO: 101176 - DNA, 3339 bp, synthetic construct
  misc_feature 1..3339: note = Description of Artificial Sequence: Synthetic coding sequence
  source 1..3339: mol_type = other DNA
atggccgccggcaagagcggcggcagcgccggcgagatcaccttcctggaggccctggccagaagcgagagcaagagagacggcggcttcaagaacaactggagcttcgaccacgaggaggagagcgagggcgacaccgacaaggacggcaccaacctgctgagcgtggacgaggacgaggacagcgagaccagcaagggcaagaagctgaacagaagaagcgagatcgtggccaacagcagcggcgagttcatcctgaagacctacgtgagaagaaacaagagcgagagcttcaagaccctgaagggcaaccccatcggcctgaacatgctgagcaacaacaagaagctgagcgagaacacccagaacaccagcctgtgcagcggcaccgtggtgcacggcagaagattccaccacgcccacgcccagatccccgtggtgaagaccgccgcccagagactgctgagcaaccagatcctgaaggagtaccccccccacgtgcagaaggtggagatcaaccccgtgagactgagcagactgcagggcgtggagagaatcatgaagaagaccgaggagagcgagagccaggtggagcccgagatcaagagaaaggtgcagcagaagagacactgcagcacctaccagcccaccccccccctgagccccgccagcaagaagtgcctgacccacctggaggacctgcagagaaactgcagacaggccatcaccctgaacgagagcaccggccccctgctgagaaccagcatccaccagaacagcggcggccagaagagccagaacaccggcctgaccaccaagaagttctacggcaacaacgtggagaaggtgcccatcgacatcatcgtgaactgcgacgacagcaagcacacctacctgcagaccaacggcaaggtgatcctgcccggcgccaagatccccaagatcaccaacctgaaggagagaaagaccagcctgagcgacctgaacgaccccatcatcctgagcagcgacgacgacgacgacaacgacagaaccaacagaagagagagcatcagcccccagcccgccgacagcgcctgcagcagccccgcccccagcaccggcaaggtggaggccgccctgaacgagaacacctgcagagccgagagagagctgagaagcatccccgaggacagcgagctgaacaccgtgaccctgcccagaaaggccagaatgaaggaccagttcggcaacagcatcatcaacacccccctgaagagaagaaaggtgttcagccaggagccccccgacgccctggccctgagctgccagagcagcttcgacagcgtgatcctgaactgcagaagcatcagagtgggcaccctgttcagactgctgatcgagcccgtgatcttctgcctggacttcatcaagatccagctggacgagcccgaccacgaccccgtggagatcatcctgaacaccagcgacctgaccaagtgcgagtggtgcaacgtgagaaagctgcccgtggtgttcctgcaggccatccccgccgtgtaccagaagctgagcatccagctgcagatgaacaaggaggacaaggtgtggaacgactgcaagggcgtgaacaagctgaccaacctggaggagcagtacatcatcctgatcttccagaacggcctggacccccccgccaacatggtgttcgagagcatcatcaacgagatcggcatcaagaacaacatcagcaacttcttcgccaagatccccttcgaggaggccaacggcagactggtggcctgcaccagaacctacgaggagagcatcaagggcagctgcggccagaaggagaacaagatcaagaccgtgagcttcgagagcaagatccagctgagaagcaagcaggagttccagttcttcgacgaggaggaggagaccggcgagaaccacaccatcttcatcggccccgtggagaagctgatcgtgtacccccccccccccgccaagggcggcatcagcgtgaccaacgaggacctgcactgcctgaacgagggcgagttcctgaacgacgtgatcatcgacttctacctgaagtacctggtgctggagaagctgaagaaggaggacgccgacagaatccacatcttcagcagcttcttctacaagagactgaaccagagagagagaagaaaccacgagaccaccaacctgagcatccagcagaagagacacggcagagtgaagacctggaccagacacgtggacatcttcgagaaggacttcatcttcgtgcccctgaacgaggccgcccactggttcctggccgtggtgtgcttccccggcctggagaagcccaagtacgagcccaacccccactaccacgagaacgccgtgatccagaagtgcagcaccgtggaggacagctgcatcagcagcagcgccagcgagatggagagctgcagccagaacagcagcgccaagcccgtgatcaagaagatgctgaacaagaagcactgcatcgccgtgatcgacagcaaccccggccaggaggagagcgaccccagatacaagagaaacatctgcagcgtgaagtacagcgtgaagaagatcaaccacaccgccagcgagaacgaggagttcaacaagggcgagagcaccagccagaaggtggccgacagaaccaagagcgagaacggcctgcagaacgagagcctgagcagcacccaccacaccgacggcctgagcaagatcagactgaactacagcgacgagagccccgaggccggcaagatgctggaggacgagctggtggacttcagcgaggaccaggacaaccaggacgacagcagcgacgacggcttcctggccgacgacaactgcagcagcgagatcggccagtggcacctgaagcccaccatctgcaagcagccctgcatcctgctgatggacagcctgagaggccccagcagaagcaacgtggtgaagatcctgagagagtacctggaggtggagtgggaggtgaagaagggcagcaagagaagcttcagcaaggacgtgatgaagggcagcaaccccaaggtgccccagcagaacaacttcagcgactgcggcgtgtacgtgctgcagtacgtggagagcttcttcgagaaccccatcctgagcttcgagctgcccatgaacctggccaactggttccccccccccagaatgagaaccaagagagaggagatcagaaacatcatcctgaagctgcaggaggaccagagcaaggagaagagaaagcacaaggacacctacagcaccgaggcccccctgggcgagggcaccgagcagtacgtgaacagcatcagcgactag

SEQ ID NO: 101177 - DNA, 3339 bp, synthetic construct
  misc_feature 1..3339: note = Description of Artificial Sequence: Synthetic coding sequence
  source 1..3339: mol_type = other DNA
atggccgccggcaagagcggcggcagcgccggcgagatcaccttcctggaggccctggccagaagcgagagcaagagagacggcggcttcaagaacaactggagcttcgaccacgaggaggagagcgagggcgacaccgacaaggacggcaccaacctgctgagcgtggacgaggacgaggacagcgagaccagcaagggcaagaagctgaacagaagaagcgagatcgtggccaacagcagcggcgagttcatcctgaagacctacgtgagaagaaacaagagcgagagcttcaagaccctgaagggcaaccccatcggcctgaacatgctgagcaacaacaagaagctgagcgagaacacccagaacaccagcctgtgcagcggcaccgtggtgcacggcagaagattccaccacgcccacgcccagatccccgtggtgaagaccgccgcccagagcagcctggacagaaaggagagaaaggagtaccccccccacgtgcagaaggtggagatcaaccccgtgagactgagcagactgcagggcgtggagagaatcatgaagaagaccgaggagagcgagagccaggtggagcccgagatcaagagaaaggtgcagcagaagagacactgcagcacctaccagcccaccccccccctgagccccgccagcaagaagtgcctgacccacctggaggacctgcagagaaactgcagacaggccatcaccctgaacgagagcaccggccccctgctgagaaccagcatccaccagaacagcggcggccagaagagccagaacaccggcctgaccaccaagaagttctacggcaacaacgtggagaaggtgcccatcgacatcatcgtgaactgcgacgacagcaagcacacctacctgcagaccaacggcaaggtgatcctgcccggcgccaagatccccaagatcaccaacctgaaggagagaaagaccagcctgagcgacctgaacgaccccatcatcctgagcagcgacgacgacgacgacaacgacagaaccaacagaagagagagcatcagcccccagcccgccgacagcgcctgcagcagccccgcccccagcaccggcaaggtggaggccgccctgaacgagaacacctgcagagccgagagagagctgagaagcatccccgaggacagcgagctgaacaccgtgaccctgcccagaaaggccagaatgaaggaccagttcggcaacagcatcatcaacacccccctgaagagaagaaaggtgttcagccaggagccccccgacgccctggccctgagctgccagagcagcttcgacagcgtgatcctgaactgcagaagcatcagagtgggcaccctgttcagactgctgatcgagcccgtgatcttctgcctggacttcatcaagatccagctggacgagcccgaccacgaccccgtggagatcatcctgaacaccagcgacctgaccaagtgcgagtggtgcaacgtgagaaagctgcccgtggtgttcctgcaggccatccccgccgtgtaccagaagctgagcatccagctgcagatgaacaaggaggacaaggtgtggaacgactgcaagggcgtgaacaagctgaccaacctggaggagcagtacatcatcctgatcttccagaacggcctggacccccccgccaacatggtgttcgagagcatcatcaacgagatcggcatcaagaacaacatcagcaacttcttcgccaagatccccttcgaggaggccaacggcagactggtggcctgcaccagaacctacgaggagagcatcaagggcagctgcggccagaaggagaacaagatcaagaccgtgagcttcgagagcaagatccagctgagaagcaagcaggagttccagttcttcgacgaggaggaggagaccggcgagaaccacaccatcttcatcggccccgtggagaagctgatcgtgtacccccccccccccgccaagggcggcatcagcgtgaccaacgaggacctgcactgcctgaacgagggcgagttcctgaacgacgtgatcatcgacttctacctgaagtacctggtgctggagaagctgaagaaggaggacgccgacagaatccacatcttcagcagcttcttctacaagagactgaaccagagagagagaagaaaccacgagaccaccaacctgagcatccagcagaagagacacggcagagtgaagacctggaccagacacgtggacatcttcgagaaggacttcatcttcgtgcccctgaacgaggccgcccactggttcctggccgtggtgtgcttccccggcctggagaagcccaagtacgagcccaacccccactaccacgagaacgccgtgatccagaagtgcagcaccgtggaggacagctgcatcagcagcagcgccagcgagatggagagctgcagccagaacagcagcgccaagcccgtgatcaagaagatgctgaacaagaagcactgcatcgccgtgatcgacagcaaccccggccaggaggagagcgaccccagatacaagagaaacatctgcagcgtgaagtacagcgtgaagaagatcaaccacaccgccagcgagaacgaggagttcaacaagggcgagagcaccagccagaaggtggccgacagaaccaagagcgagaacggcctgcagaacgagagcctgagcagcacccaccacaccgacggcctgagcaagatcagactgaactacagcgacgagagccccgaggccggcaagatgctggaggacgagctggtggacttcagcgaggaccaggacaaccaggacgacagcagcgacgacggcttcctggccgacgacaactgcagcagcgagatcggccagtggcacctgaagcccaccatctgcaagcagccctgcatcctgctgatggacagcctgagaggccccagcagaagcaacgtggtgaagatcctgagagagtacctggaggtggagtgggaggtgaagaagggcagcaagagaagcttcagcaaggacgtgatgaagggcagcaaccccaaggtgccccagcagaacaacttcagcgactgcggcgtgtacgtgctgcagtacgtggagagcttcttcgagaaccccatcctgagcttcgagctgcccatgaacctggccaactggttccccccccccagaatgagaaccaagagagaggagatcagaaacatcatcctgaagctgcaggaggaccagagcaaggagaagagaaagcacaaggacacctacagcaccgaggcccccctgggcgagggcaccgagcagtacgtgaacagcatcagcgactag

SEQ ID NO: 101178 - DNA, 1074 bp, synthetic construct
  misc_feature 1..1074: note = Description of Artificial Sequence: Synthetic coding sequence
  source 1..1074: mol_type = other DNA
atggccgccggcaagagcggcggcagcgccggcgagatcaccttcctggaggccctggccagaagcgagagcaagagagacggcggcttcaagaacaactggagcttcgaccacgaggaggagagcgagggcgacaccgacaaggacggcaccaacctgctgagcgtggacgaggacgaggacagcgagaccagcaagggcaagaagctgaacagaagaagcgagatcgtggccaacagcagcggcgagttcatcctgaagacctacgtgagaagaaacaagagcgagagcttcaagaccctgaagggcaaccccatcggcctgaacatgctgagcaacaacaagaagctgagcgagaacacccagaacaccagcctgtgcagcggcaccgtggtgcacggcagaagattccaccacgcccacgcccagatccccgtggtgaagaccgccgcccagagcaaccagatcctgaaggagtaccccccccacgtgcagaaggtggagatcaaccccgtgagactgagcagactgcagggcgtggtgatcctgagcagcgacgacgacgacgacaacgacagaaccaacagaagagagagcatcagcccccagcccgccgacagcgcctgcagcagccccgcccccagcaccggcaaggtggaggccgccctgaacgagaacacctgcagagccgagagagagctgagaagcatccccgaggacagcgagctgaacaccgtgaccctgcccagaaaggccagaatgaaggaccagttcggcaacagcatcatcaacacccccctgaagagaagaaaggtgttcagccaggagccccccgacgccctggccctgagctgccagagcagcttcgacagcgtgatcctgaactgcagaagcatcagagtgggcaccctgttcagactgctgatcgagcccgtgatcgtgatcatcaagatcttcttcatcacccacaagaagcccgaccacgaccccgtggagatcatcctgaacaccagcgacctgaccaagtgcgagtggtgcaacgtgagaaagctgcccgtggtgttcctgcagtag

SEQ ID NO: 101179 - DNA, 1107 bp, synthetic construct
  misc_feature 1..1107: note = Description of Artificial Sequence: Synthetic coding sequence
  source 1..1107: mol_type = other DNA
atgaaggaccagttcggcaacagcatcatcaacacccccctgaagagaagaaaggtgttcagccaggagccccccgacgccctggccctgagctgccagagcagcttcgacagcgtgatcctgaactgcagaagcatcagagtgggcaccctgttcagactgctgatcgagcccgtgatcttctgcctggacttcatcaagatccagctggacgagcccgaccacgaccccgtggagatcatcctgaacaccagcgacctgaccaagtgcgagtggtgcaacgtgagaaagctgcccgtggtgttcctgcaggccatccccgccgtgtaccagaagctgagcatccagctgcagatgaacaaggaggacaaggtgtggaacgactgcaagggcgtgaacaagctgaccaacctggaggagcagtacatcatcctgatcttccagaacggcctggacccccccgccaacatggtgttcgagagcatcatcaacgagatcggcatcaagaacaacatcagcaacttcttcgccaagatccccttcgaggaggccaacggcagactggtggcctgcaccagaacctacgaggagagcatcaagggcagctgcggccagaaggagaacaagatcaagaccgtgagcttcgagagcaagatccagctgagaagcaagcaggagttccagttcttcgacgaggaggaggagaccggcgagaaccacaccatcttcatcggccccgtggagaagctgatcgtgtacccccccccccccgccaagggcggcatcagcgtgaccaacgaggacctgcactgcctgaacgagggcgagttcctgaacgacgtgatcatcgacttctacctgaagtacctggtgctggagaagctgaagaaggaggacgccgacagaatccacatcttcagcagcttcttctacaagagactgaaccagagagagagaagaaaccacgagaccaccaacctgagcatccagcagaagagacacggcagagtgaagacctggaccagacacgtggacatcttcgagaaggacttcatcttcgtgcccctgaacgaggcctggctgaagcagaaccagaccaagctgtag

SEQ ID NO: 101180 - DNA, 2955 bp, synthetic construct
  misc_feature 1..2955: note = Description of Artificial Sequence: Synthetic coding sequence
  source 1..2955: mol_type = other DNA
atggacaagagaaagctgggcagaagacccagcagcagcgagatcatcaccgagggcaagagaaagaagagcagcagcgacctgagcgagatcagaaagatgctgaacgccaagcccgaggacgtgcacgtgcagagccccctgagcaagttcagaagcagcgagagatggaccctgcccctgcagtgggagagaagcctgagaaacaaggtgatcagcctggaccacaagaacaagaagcacatcagaggctgccccgtgaccagcaagagcagccccgagagaatccccagagtgatcctgaccaacgtgctgggcaccgagctgggcagaaagtacatcagaaccccccccgtgaccgagggcagcctgagcgacaccgacaacctgcagagcgagcagctgagcagcagcagcgacggcagcctggagagctaccagaacctgaacccccacaagagctgctacctgagcgagagaggcagccagagaagcaagaccgtggacgacaacagcgccaagcagaccgcccacaacaaggagaagagaagaaaggacgacggcatcagcctgctgatcagcgacacccagcccgaggacctgaacagcggcagcagaggctgcgaccacctggagcaggagagcagaaacaaggacgtgaagtacagcgacagcaaggtggagctgaccctgatcagcagaaagaccaagagaagactgagaaacaacctgcccgacagccagtactgcaccagcctggacaagagcaccgagcagaccaagaagcaggaggacgacagcaccatcagcaccgagttcgagaagcccagcgagaactaccaccaggaccccaagctgcccgaggagatcaccaccaagcccaccaagagcgacttcaccaagctgagcagcctgaacagccaggagctgaccctgagcaacgccaccaagagcgccagcgccggcagcaccaccgagaccgtggagaacagcaacagcatcgacatcgtgggcatcagcagcctggtggagaaggacgagaacgagctgaacaccatcgagaagcccatcctgagaggccacaacgagggcaaccagagcctgatcagcgccgagcccatcgtggtgagcagcgacgaggagggccccgtggagcacaagagcagcgagatcctgaagctgcagagcaagcaggacagagagaccaccaacgagaacgagagcaccagcgagagcgccctgctggagctgcccctgatcacctgcgagagcgtgcagatgagcagcgagctgtgcccctacaaccccgtgatggagaacatcagcagcatcatgcccagcaacgagatggacctgcagctggacttcatcttcaccagcgtgtacatcggcaagatcaagggcgccagcaagggctgcgtgaccatcaccaagaagtacatcaagatccccttccaggtgagcctgaacgagatcagcctgctggtggacaccacccacctgaagagattcggcctgtggaagagcaaggacgacaaccacagcaagagaagccacgccatcctgttcttctgggtgagcagcgactacctgcaggagatccagacccagctggagcacagcgtgctgagccagcagagcaagagcagcgagttcatcttcctggagctgcacaaccccgtgagccagagagaggagctgaagctgaaggacatcatgaccgagatcagcatcatcagcggcgagctggagctgagctaccccctgagctgggtgcaggccttccccctgttccagaacctgagcagcaaggagagcagcttcatccactactactgcgtgagcacctgcagcttccccgccggcgtggccgtggccgaggagatgaagctgaagagcgtgagccagcccagcaacaccgacgccgccaagcccacctacaccttcctgcagaagcagagcagcggctgctacagcctgagcatcaccagcaaccccgacgaggagtggagagaggtgagacacaccggcctggtgcagaagctgatcgtgtacccccccccccccaccaagggcggcctgggcgtgaccaacgaggacctggagtgcctggaggagggcgagttcctgaacgacgtgatcatcgacttctacctgaagtacctgatcctggagaaggccagcgacgagctggtggagagaagccacatcttcagcagcttcttctacaagtgcctgaccagaaaggagaacaacctgaccgaggacaaccccaacctgagcatggcccagagaagacacaagagagtgagaacctggaccagacacatcaacatcttcaacaaggactacatcttcgtgcccgtgaacgagagcagccactggtacctggccgtgatctgcttcccctggctggaggaggccgtgtacgaggacttcccccagaccgtgagccagcagagccaggcccagcagagccagaacgacaacaagaccatcgacaacgacctgagaaccaccagcaccctgagcctgagcgccgaggacagccagagcaccgagagcaacatgagcgtgcccaagaagatgtgcaagagaccctgcatcctgatcctggacagcctgaaggccgccagcgtgcagaacaccgtgcagaacctgagagagtacctggaggtggagtgggaggtgaagctgaagacccacagacagttcagcaagaccaacatggtggacctgtgccccaaggtgcccaagcaggacaacagcagcgactgcggcgtgtacctgctgcagtacgtggagagcttcttcaaggaccccatcgtgaacttcgagctgcccatccacctggagaagtggttccccagacacgtgatcaagaccaagagagaggacatcagagagctgatcctgaagctgcacctgcagcagcagaagggcagcagcagctag

SEQ ID NO: 101181 - DNA, 3054 bp, synthetic construct
  misc_feature 1..3054: note = Description of Artificial Sequence: Synthetic coding sequence
  source 1..3054: mol_type = other DNA
atgctgaacgccaagcccgaggacgtgcacgtgcagagccccctgagcaagttcagaagcagcgagagatggaccctgcccctgcagtgggagagaagcctgagaaacaaggtgatcagcctggaccacaagaacaagaagcacatcagaggctgccccgtgaccagcaagagcagccccgagagacagctgaaggtgatgctgaccaacgtgctgtggaccgacctgggcagaaagttcagaaagaccctgcccagaaacgacgccaacctgtgcgacgccaacaaggtgcagagcgacagcctgcccagcaccagcgtggacagcctggagacctgccagaagctggagcccctgagacagagcctgaacctgagcgagagaatccccagagtgatcctgaccaacgtgctgggcaccgagctgggcagaaagtacatcagaaccccccccgtgaccgagggcagcctgagcgacaccgacaacctgcagagcgagcagctgagcagcagcagcgacggcagcctggagagctaccagaacctgaacccccacaagagctgctacctgagcgagagaggcagccagagaagcaagaccgtggacgacaacagcgccaagcagaccgcccacaacaaggagaagagaagaaaggacgacggcatcagcctgctgatcagcgacacccagcccgaggacctgaacagcggcagcagaggctgcgaccacctggagcaggagagcagaaacaaggacgtgaagtacagcgacagcaaggtggagctgaccctgatcagcagaaagaccaagagaagactgagaaacaacctgcccgacagccagtactgcaccagcctggacaagagcaccgagcagaccaagaagcaggaggacgacagcaccatcagcaccgagttcgagaagcccagcgagaactaccaccaggaccccaagctgcccgaggagatcaccaccaagcccaccaagagcgacttcaccaagctgagcagcctgaacagccaggagctgaccctgagcaacgccaccaagagcgccagcgccggcagcaccaccgagaccgtggagaacagcaacagcatcgacatcgtgggcatcagcagcctggtggagaaggacgagaacgagctgaacaccatcgagaagcccatcctgagaggccacaacgagggcaaccagagcctgatcagcgccgagcccatcgtggtgagcagcgacgaggagggccccgtggagcacaagagcagcgagatcctgaagctgcagagcaagcaggacagagagaccaccaacgagaacgagagcaccagcgagagcgccctgctggagctgcccctgatcacctgcgagagcgtgcagatgagcagcgagctgtgcccctacaaccccgtgatggagaacatcagcagcatcatgcccagcaacgagatggacctgcagctggacttcatcttcaccagcgtgtacatcggcaagatcaagggcgccagcaagggctgcgtgaccatcaccaagaagtacatcaagatccccttccaggtgagcctgaacgagatcagcctgctggtggacaccacccacctgaagagattcggcctgtggaagagcaaggacgacaaccacagcaagagaagccacgccatcctgttcttctgggtgagcagcgactacctgcaggagatccagacccagctggagcacagcgtgctgagccagcagagcaagagcagcgagttcatcttcctggagctgcacaaccccgtgagccagagagaggagctgaagctgaaggacatcatgaccgagatcagcatcatcagcggcgagctggagctgagctaccccctgagctgggtgcaggccttccccctgttccagaacctgagcagcaaggagagcagcttcatccactactactgcgtgagcacctgcagcttccccgccggcgtggccgtggccgaggagatgaagctgaagagcgtgagccagcccagcaacaccgacgccgccaagcccacctacaccttcctgcagaagcagagcagcggctgctacagcctgagcatcaccagcaaccccgacgaggagtggagagaggtgagacacaccggcctggtgcagaagctgatcgtgtacccccccccccccaccaagggcggcctgggcgtgaccaacgaggacctggagtgcctggaggagggcgagttcctgaacgacgtgatcatcgacttctacctgaagtacctgatcctggagaaggccagcgacgagctggtggagagaagccacatcttcagcagcttcttctacaagtgcctgaccagaaaggagaacaacctgaccgaggacaaccccaacctgagcatggcccagagaagacacaagagagtgagaacctggaccagacacatcaacatcttcaacaaggactacatcttcgtgcccgtgaacgagagcagccactggtacctggccgtgatctgcttcccctggctggaggaggccgtgtacgaggacttcccccagaccgtgagccagcagagccaggcccagcagagccagaacgacaacaagaccatcgacaacgacctgagaaccaccagcaccctgagcctgagcgccgaggacagccagagcaccgagagcaacatgagcgtgcccaagaagatgtgcaagagaccctgcatcctgatcctggacagcctgaaggccgccagcgtgcagaacaccgtgcagaacctgagagagtacctggaggtggagtgggaggtgaagctgaagacccacagacagttcagcaagaccaacatggtggacctgtgccccaaggtgcccaagcaggacaacagcagcgactgcggcgtgtacctgctgcagtacgtggagagcttcttcaaggaccccatcgtgaacttcgagctgcccatccacctggagaagtggttccccagacacgtgatcaagaccaagagagaggacatcagagagctgatcctgaagctgcacctgcagcagcagaagggcagcagcagctag

SEQ ID NO: 101182 - DNA, 2661 bp, synthetic construct
  misc_feature 1..2661: note = Description of Artificial Sequence: Synthetic coding sequence
  source 1..2661: mol_type = other DNA
atgctgaacgccaagcccgaggacgtgcacgtgcagagccccctgagcaagttcagaagcagcgagagatggaccctgcccctgcagtgggagagaagcctgagaaacaaggtgatcagcctggaccacaagaacaagaagcacatcagaggctgccccgtgaccagcaagagcagccccgagagaggcagccagagaagcaagaccgtggacgacaacagcgccaagcagaccgcccacaacaaggagaagagaagaaaggacgacggcatcagcctgctgatcagcgacacccagcccgaggacctgaacagcggcagcagaggctgcgaccacctggagcaggagagcagaaacaaggacgtgaagtacagcgacagcaaggtggagctgaccctgatcagcagaaagaccaagagaagactgagaaacaacctgcccgacagccagtactgcaccagcctggacaagagcaccgagcagaccaagaagcaggaggacgacagcaccatcagcaccgagttcgagaagcccagcgagaactaccaccaggaccccaagctgcccgaggagatcaccaccaagcccaccaagagcgacttcaccaagctgagcagcctgaacagccaggagctgaccctgagcaacgccaccaagagcgccagcgccggcagcaccaccgagaccgtggagaacagcaacagcatcgacatcgtgggcatcagcagcctggtggagaaggacgagaacgagctgaacaccatcgagaagcccatcctgagaggccacaacgagggcaaccagagcctgatcagcgccgagcccatcgtggtgagcagcgacgaggagggccccgtggagcacaagagcagcgagatcctgaagctgcagagcaagcaggacagagagaccaccaacgagaacgagagcaccagcgagagcgccctgctggagctgcccctgatcacctgcgagagcgtgcagatgagcagcgagctgtgcccctacaaccccgtgatggagaacatcagcagcatcatgcccagcaacgagatggacctgcagctggacttcatcttcaccagcgtgtacatcggcaagatcaagggcgccagcaagggctgcgtgaccatcaccaagaagtacatcaagatccccttccaggtgagcctgaacgagatcagcctgctggtggacaccacccacctgaagagattcggcctgtggaagagcaaggacgacaaccacagcaagagaagccacgccatcctgttcttctgggtgagcagcgactacctgcaggagatccagacccagctggagcacagcgtgctgagccagcagagcaagagcagcgagttcatcttcctggagctgcacaaccccgtgagccagagagaggagctgaagctgaaggacatcatgaccgagatcagcatcatcagcggcgagctggagctgagctaccccctgagctgggtgcaggccttccccctgttccagaacctgagcagcaaggagagcagcttcatccactactactgcgtgagcacctgcagcttccccgccggcgtggccgtggccgaggagatgaagctgaagagcgtgagccagcccagcaacaccgacgccgccaagcccacctacaccttcctgcagaagcagagcagcggctgctacagcctgagcatcaccagcaaccccgacgaggagtggagagaggtgagacacaccggcctggtgcagaagctgatcgtgtacccccccccccccaccaagggcggcctgggcgtgaccaacgaggacctggagtgcctggaggagggcgagttcctgaacgacgtgatcatcgacttctacctgaagtacctgatcctggagaaggccagcgacgagctggtggagagaagccacatcttcagcagcttcttctacaagtgcctgaccagaaaggagaacaacctgaccgaggacaaccccaacctgagcatggcccagagaagacacaagagagtgagaacctggaccagacacatcaacatcttcaacaaggactacatcttcgtgcccgtgaacgagagcagccactggtacctggccgtgatctgcttcccctggctggaggaggccgtgtacgaggacttcccccagaccgtgagccagcagagccaggcccagcagagccagaacgacaacaagaccatcgacaacgacctgagaaccaccagcaccctgagcctgagcgccgaggacagccagagcaccgagagcaacatgagcgtgcccaagaagatgtgcaagagaccctgcatcctgatcctggacagcctgaaggccgccagcgtgcagaacaccgtgcagaacctgagagagtacctggaggtggagtgggaggtgaagctgaagacccacagacagttcagcaagaccaacatggtggacctgtgccccaaggtgcccaagcaggacaacagcagcgactgcggcgtgtacctgctgcagtacgtggagagcttcttcaaggaccccatcgtgaacttcgagctgcccatccacctggagaagtggttccccagacacgtgatcaagaccaagagagaggacatcagagagctgatcctgaagctgcacctgcagcagcagaagggcagcagcagctag

SEQ ID NO: 101183 - DNA, 717 bp, synthetic construct
  misc_feature 1..717: note = Description of Artificial Sequence: Synthetic coding sequence
  source 1..717: mol_type = other DNA
atgaagaagttcctgtacatcaagagcgtgttccacaccctgagaatggcccagagaagacacaagagagtgagaacctggaccagacacatcaacatcttcaacaaggactacatcttcgtgcccgtgaacgagagcagccactggtacctggccgtgatctgcttcccctggctggaggaggccgtgtacgaggacttcccccagaccgtgagccagcagagccaggcccagcagagccagaacgacaacaagaccatcgacaacgacctgagaaccaccagcaccctgagcctgagcgccgaggacagccagagcaccgagagcaacatgagcgtgcccaagaagatgtgcaagagaccctgcatcctgatcctggacagcctgaaggccgccagcgtgcagaacaccgtgcagaacctgagagagtacctggaggtggagtgggaggtgaagctgaagacccacagacagttcagcaagaccaacatggtggacctgtgccccaaggtgcccaagcaggacaacagcagcgactgcggcgtgtacctgctgcagtacgtggagagcttcttcaaggaccccatcgtgaacttcgagctgcccatccacctggagaagtggttccccagacacgtgatcaagaccaagagagaggacatcagagagctgatcctgaagctgcacctgcagcagcagaagggcagcagcagctag

SEQ ID NO: 101184 - DNA, 2958 bp, synthetic construct
  misc_feature 1..2958: note = Description of Artificial Sequence: Synthetic coding sequence
  source 1..2958: mol_type = other DNA
atggacaagagaaagctgggcagaagacccagcagcagcgagatcatcaccgagggcaagagaaagaagagcagcagcgacctgagcgagatcagaaagatgctgaacgccaagcccgaggacgtgcacgtgcagagccccctgagcaagttcagaagcagcgagagatggaccctgcccctgcagtgggagagaagcctgagaaacaaggtgatcagcctggaccacaagaacaagaagcacatcagaggctgccccgtgaccagcaagagcagccccgagagacagctgaaggtgatgctgaccaacgtgctgtggaccgacctgggcagaaagttcagaaagaccctgcccagaaacgacgccaacctgtgcgacgccaacaaggtgcagagcgacagcctgcccagcaccagcgtggacagcctggagacctgccagaagctggagcccctgagacagagcctgaacctgagcgagagaggcagccagagaagcaagaccgtggacgacaacagcgccaagcagaccgcccacaacaaggagaagagaagaaaggacgacggcatcagcctgctgatcagcgacacccagcccgaggacctgaacagcggcagcagaggctgcgaccacctggagcaggagagcagaaacaaggacgtgaagtacagcgacagcaaggtggagctgaccctgatcagcagaaagaccaagagaagactgagaaacaacctgcccgacagccagtactgcaccagcctggacaagagcaccgagcagaccaagaagcaggaggacgacagcaccatcagcaccgagttcgagaagcccagcgagaactaccaccaggaccccaagctgcccgaggagatcaccaccaagcccaccaagagcgacttcaccaagctgagcagcctgaacagccaggagctgaccctgagcaacgccaccaagagcgccagcgccggcagcaccaccgagaccgtggagaacagcaacagcatcgacatcgtgggcatcagcagcctggtggagaaggacgagaacgagctgaacaccatcgagaagcccatcctgagaggccacaacgagggcaaccagagcctgatcagcgccgagcccatcgtggtgagcagcgacgaggagggccccgtggagcacaagagcagcgagatcctgaagctgcagagcaagcaggacagagagaccaccaacgagaacgagagcaccagcgagagcgccctgctggagctgcccctgatcacctgcgagagcgtgcagatgagcagcgagctgtgcccctacaaccccgtgatggagaacatcagcagcatcatgcccagcaacgagatggacctgcagctggacttcatcttcaccagcgtgtacatcggcaagatcaagggcgccagcaagggctgcgtgaccatcaccaagaagtacatcaagatccccttccaggtgagcctgaacgagatcagcctgctggtggacaccacccacctgaagagattcggcctgtggaagagcaaggacgacaaccacagcaagagaagccacgccatcctgttcttctgggtgagcagcgactacctgcaggagatccagacccagctggagcacagcgtgctgagccagcagagcaagagcagcgagttcatcttcctggagctgcacaaccccgtgagccagagagaggagctgaagctgaaggacatcatgaccgagatcagcatcatcagcggcgagctggagctgagctaccccctgagctgggtgcaggccttccccctgttccagaacctgagcagcaaggagagcagcttcatccactactactgcgtgagcacctgcagcttccccgccggcgtggccgtggccgaggagatgaagctgaagagcgtgagccagcccagcaacaccgacgccgccaagcccacctacaccttcctgcagaagcagagcagcggctgctacagcctgagcatcaccagcaaccccgacgaggagtggagagaggtgagacacaccggcctggtgcagaagctgatcgtgtacccccccccccccaccaagggcggcctgggcgtgaccaacgaggacctggagtgcctggaggagggcgagttcctgaacgacgtgatcatcgacttctacctgaagtacctgatcctggagaaggccagcgacgagctggtggagagaagccacatcttcagcagcttcttctacaagtgcctgaccagaaaggagaacaacctgaccgaggacaaccccaacctgagcatggcccagagaagacacaagagagtgagaacctggaccagacacatcaacatcttcaacaaggactacatcttcgtgcccgtgaacgagagcagccactggtacctggccgtgatctgcttcccctggctggaggaggccgtgtacgaggacttcccccagaccgtgagccagcagagccaggcccagcagagccagaacgacaacaagaccatcgacaacgacctgagaaccaccagcaccctgagcctgagcgccgaggacagccagagcaccgagagcaacatgagcgtgcccaagaagatgtgcaagagaccctgcatcctgatcctggacagcctgaaggccgccagcgtgcagaacaccgtgcagaacctgagagagtacctggaggtggagtgggaggtgaagctgaagacccacagacagttcagcaagaccaacatggtggacctgtgccccaaggtgcccaagcaggacaacagcagcgactgcggcgtgtacctgctgcagtacgtggagagcttcttcaaggaccccatcgtgaacttcgagctgcccatccacctggagaagtggttccccagacacgtgatcaagaccaagagagaggacatcagagagctgatcctgaagctgcacctgcagcagcagaagggcagcagcagctag

SEQ ID NO: 101185 - DNA, 3153 bp, synthetic construct
  misc_feature 1..3153: note = Description of Artificial Sequence: Synthetic coding sequence
  source 1..3153: mol_type = other DNA
atggacaagagaaagctgggcagaagacccagcagcagcgagatcatcaccgagggcaagagaaagaagagcagcagcgacctgagcgagatcagaaagatgctgaacgccaagcccgaggacgtgcacgtgcagagccccctgagcaagttcagaagcagcgagagatggaccctgcccctgcagtgggagagaagcctgagaaacaaggtgatcagcctggaccacaagaacaagaagcacatcagaggctgccccgtgaccagcaagagcagccccgagagacagctgaaggtgatgctgaccaacgtgctgtggaccgacctgggcagaaagttcagaaagaccctgcccagaaacgacgccaacctgtgcgacgccaacaaggtgcagagcgacagcctgcccagcaccagcgtggacagcctggagacctgccagaagctggagcccctgagacagagcctgaacctgagcgagagaatccccagagtgatcctgaccaacgtgctgggcaccgagctgggcagaaagtacatcagaaccccccccgtgaccgagggcagcctgagcgacaccgacaacctgcagagcgagcagctgagcagcagcagcgacggcagcctggagagctaccagaacctgaacccccacaagagctgctacctgagcgagagaggcagccagagaagcaagaccgtggacgacaacagcgccaagcagaccgcccacaacaaggagaagagaagaaaggacgacggcatcagcctgctgatcagcgacacccagcccgaggacctgaacagcggcagcagaggctgcgaccacctggagcaggagagcagaaacaaggacgtgaagtacagcgacagcaaggtggagctgaccctgatcagcagaaagaccaagagaagactgagaaacaacctgcccgacagccagtactgcaccagcctggacaagagcaccgagcagaccaagaagcaggaggacgacagcaccatcagcaccgagttcgagaagcccagcgagaactaccaccaggaccccaagctgcccgaggagatcaccaccaagcccaccaagagcgacttcaccaagctgagcagcctgaacagccaggagctgaccctgagcaacgccaccaagagcgccagcgccggcagcaccaccgagaccgtggagaacagcaacagcatcgacatcgtgggcatcagcagcctggtggagaaggacgagaacgagctgaacaccatcgagaagcccatcctgagaggccacaacgagggcaaccagagcctgatcagcgccgagcccatcgtggtgagcagcgacgaggagggccccgtggagcacaagagcagcgagatcctgaagctgcagagcaagcaggacagagagaccaccaacgagaacgagagcaccagcgagagcgccctgctggagctgcccctgatcacctgcgagagcgtgcagatgagcagcgagctgtgcccctacaaccccgtgatggagaacatcagcagcatcatgcccagcaacgagatggacctgcagctggacttcatcttcaccagcgtgtacatcggcaagatcaagggcgccagcaagggctgcgtgaccatcaccaagaagtacatcaagatccccttccaggtgagcctgaacgagatcagcctgctggtggacaccacccacctgaagagattcggcctgtggaagagcaaggacgacaaccacagcaagagaagccacgccatcctgttcttctgggtgagcagcgactacctgcaggagatccagacccagctggagcacagcgtgctgagccagcagagcaagagcagcgagttcatcttcctggagctgcacaaccccgtgagccagagagaggagctgaagctgaaggacatcatgaccgagatcagcatcatcagcggcgagctggagctgagctaccccctgagctgggtgcaggccttccccctgttccagaacctgagcagcaaggagagcagcttcatccactactactgcgtgagcacctgcagcttccccgccggcgtggccgtggccgaggagatgaagctgaagagcgtgagccagcccagcaacaccgacgccgccaagcccacctacaccttcctgcagaagcagagcagcggctgctacagcctgagcatcaccagcaaccccgacgaggagtggagagaggtgagacacaccggcctggtgcagaagctgatcgtgtacccccccccccccaccaagggcggcctgggcgtgaccaacgaggacctggagtgcctggaggagggcgagttcctgaacgacgtgatcatcgacttctacctgaagtacctgatcctggagaaggccagcgacgagctggtggagagaagccacatcttcagcagcttcttctacaagtgcctgaccagaaaggagaacaacctgaccgaggacaaccccaacctgagcatggcccagagaagacacaagagagtgagaacctggaccagacacatcaacatcttcaacaaggactacatcttcgtgcccgtgaacgagagcagccactggtacctggccgtgatctgcttcccctggctggaggaggccgtgtacgaggacttcccccagaccgtgagccagcagagccaggcccagcagagccagaacgacaacaagaccatcgacaacgacctgagaaccaccagcaccctgagcctgagcgccgaggacagccagagcaccgagagcaacatgagcgtgcccaagaagatgtgcaagagaccctgcatcctgatcctggacagcctgaaggccgccagcgtgcagaacaccgtgcagaacctgagagagtacctggaggtggagtgggaggtgaagctgaagacccacagacagttcagcaagaccaacatggtggacctgtgccccaaggtgcccaagcaggacaacagcagcgactgcggcgtgtacctgctgcagtacgtggagagcttcttcaaggaccccatcgtgaacttcgagctgcccatccacctggagaagtggttccccagacacgtgatcaagaccaagagagaggacatcagagagctgatcctgaagctgcacctgcagcagcagaagggcagcagcagctag

SEQ ID NO: 101186 - DNA, 1770 bp, synthetic construct
  misc_feature 1..1770: note = Description of Artificial Sequence: Synthetic coding sequence
  source 1..1770: mol_type = other DNA
atgtacagatggctggtgagaatcctgggcaccatcttcagattctgcgacagaagcgtgccccccgccagagccctgctgaagagaagaagaagcgacagcaccctgttcagcaccgtggacaccgacgagatccccgccaagagacccagactggactgcttcatccaccaggtgaagaacagcctgtacaacgccgccagcctgttcggcttccccttccagctgaccaccaagcccatggtgaccagcgcctgcaacggcaccagaaacgtggcccccagcggcgaggtgttcagcaacagcagcagctgcgagctgaccggcagcggcagctggaacaacatgctgaagctgggcaacaagagccccaacggcatcagcgactaccccaagatcagagtgaccgtgaccagagaccagcccagaagagtgctgcccagcttcggcttcaccctgaacagcgagggctgcaacagaagacccggcggcagaagacacagcaagggcaaccccgagagcagcctgatgtggaagccccaggagcaggccgtgaccgagatgatcagcgaggagagcggcaagggcctgagaagaccccactgcaccgtggaggagggcgtgcagaaggaggagagagagaagtacagaaagctgctggagagactgaaggagagcggccacggcaacagcgtgtgccccgtgaccagcaactaccacagcagccagagaagccagatggacaccctgaagaccaagggctggggcgaggagcagaaccacggcgtgaagaccacccagttcgtgcccaagcagtacagactggtggagaccagaggccccctgtgcagcctgagaagcgagaagagatgcagcaagggcaagatcaccgacaccgagaccatggtgggcatcagattcgagaacgagagcagaagaggctaccagctggagcccgacctgagcgaggaggtgagcgccagactgagactgggcagcggcagcaacggcctgctgagaagaaaggtgagcatcatcgagaccaaggagaagaactgcagcggcaaggagagagacagaagaaccgacgacctgctggagctgaccgaggacatggagaaggagatcagcaacgccctgggccacggcccccaggacgagatcctgagcagcgccttcaagctgagaatcaccagaggcgacatccagaccctgaagaactaccactggctgaacgacgaggtgatcaacttctacatgaacctgctggtggagagaaacaagaagcagggctaccccgccctgcacgtgttcagcaccttcttctaccccaagctgaagagcggcggctaccaggccgtgaagagatggaccaagggcgtgaacctgttcgagcaggagatcatcctggtgcccatccacagaaaggtgcactggagcctggtggtgatcgacctgagaaagaagtgcctgaagtacctggacagcatgggccagaagggccacagaatctgcgagatcctgctgcagtacctgcaggacgagagcaagaccaagagaaacagcgacctgaacctgctggagtggacccaccacagcatgaagccccacgagatcccccagcagctgaacggcagcgactgcggcatgttcacctgcaagtacgccgactacatcagcagagacaagcccatcaccttcacccagcaccagatgcccctgttcagaaagaagatggtgtgggagatcctgcaccagcagctgctgtag

SEQ ID NO: 101187 - DNA, 1242 bp, synthetic construct
  misc_feature 1..1242: note = Description of Artificial Sequence: Synthetic coding sequence
  source 1..1242: mol_type = other DNA
atgtggaagccccaggagcaggccgtgaccgagatgatcagcgaggagagcggcaagggcctgagaagaccccactgcaccgtggaggagggcgtgcagaaggaggagagagagaagtacagaaagctgctggagagactgaaggagagcggccacggcaacagcgtgtgccccgtgaccagcaactaccacagcagccagagaagccagatggacaccctgaagaccaagggctggggcgaggagcagaaccacggcgtgaagaccacccagttcgtgcccaagcagtacagactggtggagaccagaggccccctgtgcagcctgagaagcgagaagagatgcagcaagggcaagatcaccgacaccgagaccatggtgggcatcagattcgagaacgagagcagaagaggctaccagctggagcccgacctgagcgaggaggtgagcgccagactgagactgggcagcggcagcaacggcctgctgagaagaaaggtgagcatcatcgagaccaaggagaagaactgcagcggcaaggagagagacagaagaaccgacgacctgctggagctgaccgaggacatggagaaggagatcagcaacgccctgggccacggcccccaggacgagatcctgagcagcgccttcaagctgagaatcaccagaggcgacatccagaccctgaagaactaccactggctgaacgacgaggtgatcaacttctacatgaacctgctggtggagagaaacaagaagcagggctaccccgccctgcacgtgttcagcaccttcttctaccccaagctgaagagcggcggctaccaggccgtgaagagatggaccaagggcgtgaacctgttcgagcaggagatcatcctggtgcccatccacagaaaggtgcactggagcctggtggtgatcgacctgagaaagaagtgcctgaagtacctggacagcatgggccagaagggccacagaatctgcgagatcctgctgcagtacctgcaggacgagagcaagaccaagagaaacagcgacctgaacctgctggagtggacccaccacagcatgaagccccacgagatcccccagcagctgaacggcagcgactgcggcatgttcacctgcaagtacgccgactacatcagcagagacaagcccatcaccttcacccagcaccagatgcccctgttcagaaagaagatggtgtgggagatcctgcaccagcagctgctgtag

SEQ ID NO: 101188 - DNA, 1383 bp, synthetic construct
  misc_feature 1..1383: note = Description of Artificial Sequence: Synthetic coding sequence
  source 1..1383: mol_type = other DNA
atgtacagatggctggtgagaatcctgggcaccatcttcagattctgcgacagaagcgtgccccccgccagagccctgctgaagagaagaagaagcgacagcaccctgttcagcaccgtggacaccgacgagatccccgccaagagacccagactggactgcttcatccaccaggtgaagaacagcctgtacaacgccgccagcctgttcggcttccccttccagctgaccaccaagcccatggtgaccagcgcctgcaacggcaccagaaacgtggcccccagcggcgaggtgaacggcaacagcgtgtgccccgtgaccagcaactaccacagcagccagagaagccagatggacaccctgaagaccaagggctggggcgaggagcagaaccacggcgtgaagaccacccagttcgtgcccaagcagtacagactggtggagaccagaggccccctgtgcagcctgagaagcgagaagagatgcagcaagggcaagatcaccgacaccgagaccatggtgggcatcagattcgagaacgagagcagaagaggctaccagctggagcccgacctgagcgaggaggtgagcgccagactgagactgggcagcggcagcaacggcctgctgagaagaaaggtgagcatcatcgagaccaaggagaagaactgcagcggcaaggagagagacagaagaaccgacgacctgctggagctgaccgaggacatggagaaggagatcagcaacgccctgggccacggcccccaggacgagatcctgagcagcgccttcaagctgagaatcaccagaggcgacatccagaccctgaagaactaccactggctgaacgacgaggtgatcaacttctacatgaacctgctggtggagagaaacaagaagcagggctaccccgccctgcacgtgttcagcaccttcttctaccccaagctgaagagcggcggctaccaggccgtgaagagatggaccaagggcgtgaacctgttcgagcaggagatcatcctggtgcccatccacagaaaggtgcactggagcctggtggtgatcgacctgagaaagaagtgcctgaagtacctggacagcatgggccagaagggccacagaatctgcgagatcctgctgcagtacctgcaggacgagagcaagaccaagagaaacagcgacctgaacctgctggagtggacccaccacagcatgaagccccacgagatcccccagcagctgaacggcagcgactgcggcatgttcacctgcaagtacgccgactacatcagcagagacaagcccatcaccttcacccagcaccagatgcccctgttcagaaagaagatggtgtgggagatcctgcaccagcagctgctgtag

SEQ ID NO: 101189 - DNA, 1740 bp, synthetic construct
  misc_feature 1..1740: note = Description of Artificial Sequence: Synthetic coding sequence
  source 1..1740: mol_type = other DNA
atggacagccacccctgcctgtactgcggcccccaggacagcgagggcaccaactggcagaccagccccagcaccctgttcagcaccgtggacaccgacgagatccccgccaagagacccagactggactgcttcatccaccaggtgaagaacagcctgtacaacgccgccagcctgttcggcttccccttccagctgaccaccaagcccatggtgaccagcgcctgcaacggcaccagaaacgtggcccccagcggcgaggtgttcagcaacagcagcagctgcgagctgaccggcagcggcagctggaacaacatgctgaagctgggcaacaagagccccaacggcatcagcgactaccccaagatcagagtgaccgtgaccagagaccagcccagaagagtgctgcccagcttcggcttcaccctgaacagcgagggctgcaacagaagacccggcggcagaagacacagcaagggcaaccccgagagcagcctgatgtggaagccccaggagcaggccgtgaccgagatgatcagcgaggagagcggcaagggcctgagaagaccccactgcaccgtggaggagggcgtgcagaaggaggagagagagaagtacagaaagctgctggagagactgaaggagagcggccacggcaacagcgtgtgccccgtgaccagcaactaccacagcagccagagaagccagatggacaccctgaagaccaagggctggggcgaggagcagaaccacggcgtgaagaccacccagttcgtgcccaagcagtacagactggtggagaccagaggccccctgtgcagcctgagaagcgagaagagatgcagcaagggcaagatcaccgacaccgagaccatggtgggcatcagattcgagaacgagagcagaagaggctaccagctggagcccgacctgagcgaggaggtgagcgccagactgagactgggcagcggcagcaacggcctgctgagaagaaaggtgagcatcatcgagaccaaggagaagaactgcagcggcaaggagagagacagaagaaccgacgacctgctggagctgaccgaggacatggagaaggagatcagcaacgccctgggccacggcccccaggacgagatcctgagcagcgccttcaagctgagaatcaccagaggcgacatccagaccctgaagaactaccactggctgaacgacgaggtgatcaacttctacatgaacctgctggtggagagaaacaagaagcagggctaccccgccctgcacgtgttcagcaccttcttctaccccaagctgaagagcggcggctaccaggccgtgaagagatggaccaagggcgtgaacctgttcgagcaggagatcatcctggtgcccatccacagaaaggtgcactggagcctggtggtgatcgacctgagaaagaagtgcctgaagtacctggacagcatgggccagaagggccacagaatctgcgagatcctgctgcagtacctgcaggacgagagcaagaccaagagaaacagcgacctgaacctgctggagtggacccaccacagcatgaagccccacgagatcccccagcagctgaacggcagcgactgcggcatgttcacctgcaagtacgccgactacatcagcagagacaagcccatcaccttcacccagcaccagatgcccctgttcagaaagaagatggtgtgggagatcctgcaccagcagctgctgtag

SEQ ID NO: 101190 - DNA, 1722 bp, synthetic construct
  misc_feature 1..1722: note = Description of Artificial Sequence: Synthetic coding sequence
  source 1..1722: mol_type = other DNA
atgaaggagaccatccagggcaccggcagctggggccccgagccccccggccccggcatcccccccgcctacagcagccccagaagagagagactgagatggccccccccccccaagcccagactgaagagcggcggcggcttcggccccgaccccggcagcggcaccaccgtgcccgccagaagactgcccgtgcccagacccagcttcgacgccagcgccagcgaggaggaggaggaggaggaggaggaggaggacgaggacgaggaggaggaggtggccgcctggagactgccccccagatggagccagctgggcaccagccagagacccagacccagcagacccacccacagaaagacctgcagccagagaagaagaagagccatgagagccttcagaatgctgctgtacagcaagagcaccagcctgaccttccactggaagctgtggggcagacacagaggcagaagaagaggcctggcccaccccaagaaccacctgagcccccagcagggcggcgccaccccccaggtgcccagcccctgctgcagattcgacagccccagaggcccccccccccccagactgggcctgctgggcgccctgatggccgaggacggcgtgagaggcagcccccccgtgcccagcggcccccccatggaggaggacggcctgagatggacccccaagagccccctggaccccgacagcggcctgctgagctgcaccctgcccaacggcttcggcggccagagcggccccgagggcgagagaagcctggccccccccgacgccagcatcctgatcagcaacgtgtgcagcatcggcgaccacgtggcccaggagctgttccagggcagcgacctgggcatggccgaggaggccgagagacccggcgagaaggccggccagcacagccccctgagagaggagcacgtgacctgcgtgcagagcatcctggacgagttcctgcagacctacggcagcctgatccccctgagcaccgacgaggtggtggagaagctggaggacatcttccagcaggagttcagcacccccagcagaaagggcctggtgctgcagctgatccagagctaccagagaatgcccggcaacgccatggtgagaggcttcagagtggcctacaagagacacgtgctgaccatggacgacctgggcaccctgtacggccagaactggctgaacgaccaggtgatgaacatgtacggcgacctggtgatggacaccgtgcccgagaaggtgcacttcttcaacagcttcttctacgacaagctgagaaccggctacgacggcgtgaagagatggaccaagaacgtggacatcttcaacaaggagctgctgctgatccccatccacctggaggtgcactggagcctgatcagcgtggacgtgagaagaagaaccatcacctacttcgacagccagagaaccctgaacagaagatgccccaagcacatcgccaagtacctgcaggccgaggccgtgaagaaggacagactggacttccaccagggctggaagggctacttcaagatgaacgtggccagacagaacaacgacagcgactgcggcgccttcgtgctgcagtactgcaagcacctggccctgagccagcccttcagcttcacccagcaggacatgcccaagctgagaagacagatctacaaggagctgtgccactgcaagctgaccgtgtag

SEQ ID NO: 101191 - DNA, 1725 bp, synthetic construct
  misc_feature 1..1725: note = Description of Artificial Sequence: Synthetic coding sequence
  source 1..1725: mol_type = other DNA
atgaaggagaccatccagggcaccggcagctggggccccgagccccccggccccggcatcccccccgcctacagcagccccagaagagagagactgagatggccccccccccccaagcccagactgaagagcggcggcggcttcggccccgaccccggcagcggcaccaccgtgcccgccagaagactgcccgtgcccagacccagcttcgacgccagcgccagcgaggaggaggaggaggaggaggaggaggaggacgaggacgaggaggaggaggtggccgcctggagactgccccccagatggagccagctgggcaccagccagagacccagacccagcagacccacccacagaaagacctgcagccagagaagaagaagagccatgagagccttcagaatgctgctgtacagcaagagcaccagcctgaccttccactggaagctgtggggcagacacagaggcagaagaagaggcctggcccaccccaagaaccacctgagcccccagcagggcggcgccaccccccaggtgcccagcccctgctgcagattcgacagccccagaggcccccccccccccagactgggcctgctgggcgccctgatggccgaggacggcgtgagaggcagcccccccgtgcccagcggcccccccatggaggaggacggcctgagatggacccccaagagccccctggaccccgacagcggcctgctgagctgcaccctgcccaacggcttcggcggccagagcggccccgagggcgagagaagcctggccccccccgacgccagcatcctgatcagcaacgtgtgcagcatcggcgaccacgtggcccaggagctgttccagggcagcgacctgggcatggccgaggaggccgagagacccggcgagaaggccggccagcacagccccctgagagaggagcacgtgacctgcgtgcagagcatcctggacgagttcctgcagacctacggcagcctgatccccctgagcaccgacgaggtggtggagaagctggaggacatcttccagcaggagttcagcacccccagcagaaagggcctggtgctgcagctgatccagagctaccagagaatgcccggcaacgccatggtgagaggcttcagagtggcctacaagagacacgtgctgaccatggacgacctgggcaccctgtacggccagaactggctgaacgaccaggtgatgaacatgtacggcgacctggtgatggacaccgtgcccgagaaggtgcacttcttcaacagcttcttctacgacaagctgagaaccaagggctacgacggcgtgaagagatggaccaagaacgtggacatcttcaacaaggagctgctgctgatccccatccacctggaggtgcactggagcctgatcagcgtggacgtgagaagaagaaccatcacctacttcgacagccagagaaccctgaacagaagatgccccaagcacatcgccaagtacctgcaggccgaggccgtgaagaaggacagactggacttccaccagggctggaagggctacttcaagatgaacgtggccagacagaacaacgacagcgactgcggcgccttcgtgctgcagtactgcaagcacctggccctgagccagcccttcagcttcacccagcaggacatgcccaagctgagaagacagatctacaaggagctgtgccactgcaagctgaccgtgtag

SEQ ID NO: 101192 - DNA, 3741 bp, synthetic construct
  misc_feature 1..3741: note = Description of Artificial Sequence: Synthetic coding sequence
  source 1..3741: mol_type = other DNA
atgatggagaccgagagactggtgctgcccccccccgaccccctggacctgcccctgagagccgtggagctgggctgcaccggccactgggagctgctgaacctgcccggcgcccccgagagcagcctgccccacggcctgcccccctgcgcccccgacctgcagcaggaggccgagcagctgttcctgagcagccccgcctggctgcccctgcacggcgtggagcacagcgccagaaagtggcagagaaagaccgacccctggagcctgctggccgtgctgggcgcccccgtgcccagcgacctgcaggcccagagacaccccaccaccggccagatcctgggctacaaggaggtgctgctggagaacaccaacctgagcgccaccaccagcctgagcctgagaagaccccccggccccgccagccagagcctgtggggcaaccccacccagtaccccttctggcccggcggcatggacgagcccaccatcaccgacctgaacaccagagaggaggccgaggaggagatcgacttcgagaaggacctgctgaccatcccccccggcttcaagaagggcatggacttcgcccccaaggactgccccacccccgcccccggcctgctgagcctgagctgcatgctggagcccctggacctgggcggcggcgacgaggacgagaacgaggccgtgggccagcccggcggccccagaggcgacaccgtgagcgccagcccctgcagcgcccccctggccagagccagcagcctggaggacctggtgctgaaggaggccagcaccgccgtgagcacccccgaggcccccgagccccccagccaggagcagtgggccatccccgtggacgccaccagccccgtgggcgacttctacagactgatcccccagcccgccttccagtgggccttcgagcccgacgtgttccagaagcaggccatcctgcacctggagagacacgacagcgtgttcgtggccgcccacaccagcgccggcaagaccgtggtggccgagtacgccatcgccctggcccagaagcacatgaccagaaccatctacaccagccccatcaaggccctgagcaaccagaagttcagagacttcagaaacaccttcggcgacgtgggcctgctgaccggcgacgtgcagctgcaccccgaggccagctgcctgatcatgaccaccgagatcctgagaagcatgctgtacagcggcagcgacgtgatcagagacctggagtgggtgatcttcgacgaggtgcactacatcaacgacgtggagagaggcgtggtgtgggaggaggtgctgatcatgctgcccgaccacgtgagcatcatcctgctgagcgccaccgtgcccaacgccctggagttcgccgactggatcggcagactgaagagaagacagatctacgtgatcagcaccgtgaccagacccgtgcccctggagcactacctgttcaccggcaacagcagcaagacccagggcgagctgttcctgctgctggacagcagaggcgccttccacaccaagggctactacgccgccgtggaggccaagaaggagagaatgagcaagcacgcccagaccttcggcgccaagcagcccacccaccagggcggccccgcccaggacagaggcgtgtacctgagcctgctggccagcctgagaaccagagcccagctgcccgtggtggtgttcaccttcagcagaggcagatgcgacgagcaggccagcggcctgaccagcctggacctgaccaccagcagcgagaagagcgagatccacctgttcctgcagagatgcctggccagactgagaggcagcgacagacagctgccccaggtgctgcacatgagcgagctgctgaacagaggcctgggcgtgcaccacagcggcatcctgcccatcctgaaggagatcgtggagatgctgttcagcagaggcctggtgaaggtgctgttcgccaccgagaccttcgccatgggcgtgaacatgcccgccagaaccgtggtgttcgacagcatgagaaagcacgacggcagcaccttcagagacctgctgcccggcgagtacgtgcagatggccggcagagccggcagaagaggcctggaccccaccggcaccgtgatcctgctgtgcaagggcagagtgcccgagatggccgacctgcacagaatgatgatgggcaagcccagccagctgcagagccagttcagactgacctacaccatgatcctgaacctgctgagagtggacgccctgagagtggaggacatgatgaagagaagcttcagcgagttccccagcagaaaggacagcaaggcccacgagcaggccctggccgagctgaccaagagactgggcgccctggaggagcccgacatgaccggccagctggtggacctgcccgagtactacagctggggcgaggagctgaccgagacccagcacatgatccagagaagaatcatggagagcgtgaacggcctgaagagcctgagcgccggcagagtggtggtggtgaagaaccaggagcaccacaacgccctgggcgtgatcctgcaggtgagcagcaacagcaccagcagagtgttcaccaccctggtgctgtgcgacaagcccctgagccaggacccccaggacagaggccccgccaccgccgaggtgccctaccccgacgacctggtgggcttcaagctgttcctgcccgagggcccctgcgaccacaccgtggtgaagctgcagcccggcgacatggccgccatcaccaccaaggtgctgagagtgaacggcgagaagatcctggaggacttcagcaagagacagcagcccaagttcaagaaggacccccccctggccgccgtgaccaccgccgtgcaggagctgctgagactggcccaggcccaccccgccggcccccccaccctggaccccgtgaacgacctgcagctgaaggacatgagcgtggtggagggcggcctgagagccagaaagctggaggagctgatccagggcgcccagtgcgtgcacagccccagattccccgcccagtacctgaagctgagagagagaatgcagatccagaaggagatggagagactgagattcctgctgagcgaccagagcctgctgctgctgcccgagtaccaccagagagtggaggtgctgagaaccctgggctacgtggacgaggccggcaccgtgaagctggccggcagagtggcctgcgccatgagcagccacgagctgctgctgaccgagctgatgttcgacaacgccctgagcaccctgagacccgaggagatcgccgccctgctgagcggcctggtgtgccagagccccggcgacgccggcgaccagctgcccaacaccctgaagcagggcatcgagagagtgagagccgtggccaagagaatcggcgaggtgcaggtggcctgcggcctgaaccagaccgtggaggagttcgtgggcgagctgaacttcggcctggtggaggtggtgtacgagtgggccagaggcatgcccttcagcgagctggccggcctgagcggcacccccgagggcctggtggtgagatgcatccagagactggccgagatgtgcagaagcctgagaggcgccgccagactggtgggcgagcccgtgctgggcgccaagatggagaccgccgccaccctgctgagaagagacatcgtgttcgccgccagcctgtacacccagtag

SEQ ID NO: 101193 - DNA, 3741 bp, synthetic construct
  misc_feature 1..3741: note = Description of Artificial Sequence: Synthetic coding sequence
  source 1..3741: mol_type = other DNA
atgatggagaccgagagactggtgctgcccccccccgaccccctggacctgcccctgagagccgtggagctgggctgcaccggccactgggagctgctgaacctgcccggcgcccccgagagcagcctgccccacggcctgcccccctgcgcccccgacctgcagcaggaggccgagcagctgttcctgagcagccccgcctggctgcccctgcacggcgtggagcacagcgccagaaagtggcagagaaagaccgacccctggagcctgctggccgtgctgggcgcccccgtgcccagcgacctgcaggcccagagacaccccaccaccggccagatcctgggctacaaggaggtgctgctggagaacaccaacctgagcgccaccaccagcctgagcctgagaagaccccccggccccgccagccagagcctgtggggcaaccccacccagtaccccttctggcccggcggcatggacgagcccaccatcaccgacctgaacaccagagaggaggccgaggaggagatcgacttcgagaaggacctgctgaccatcccccccggcttcaagaagggcatggacttcgcccccaaggactgccccacccccgcccccggcctgctgagcctgagctgcctgctggagcccctggacctgggcggcggcgacgaggacgagaacgaggccgtgggccagcccggcggccccagaggcgacaccgtgagcgccagcccctgcagcgcccccctggccagagccagcagcctggaggacctggtgctgaaggaggccagcaccgccgtgagcacccccgaggcccccgagccccccagccaggagcagtgggccatccccgtggacgccaccagccccgtgggcgacttctacagactgatcccccagcccgccttccagtgggccttcgagcccgacgtgttccagaagcaggccatcctgcacctggagagacacgacagcgtgttcgtggccgcccacaccagcgccggcaagaccgtggtggccgagtacgccatcgccctggcccagaagcacatgaccagaaccatctacaccagccccatcaaggccctgagcaaccagaagttcagagacttcagaaacaccttcggcgacgtgggcctgctgaccggcgacgtgcagctgcaccccgaggccagctgcctgatcatgaccaccgagatcctgagaagcatgctgtacagcggcagcgacgtgatcagagacctggagtgggtgatcttcgacgaggtgcactacatcaacgacgtggagagaggcgtggtgtgggaggaggtgctgatcatgctgcccgaccacgtgagcatcatcctgctgagcgccaccgtgcccaacgccctggagttcgccgactggatcggcagactgaagagaagacagatctacgtgatcagcaccgtgaccagacccgtgcccctggagcactacctgttcaccggcaacagcagcaagacccagggcgagctgttcctgctgctggacagcagaggcgccttccacaccaagggctactacgccgccgtggaggccaagaaggagagaatgagcaagcacgcccagaccttcggcgccaagcagcccacccaccagggcggccccgcccaggacagaggcgtgtacctgagcctgctggccagcctgagaaccagagcccagctgcccgtggtggtgttcaccttcagcagaggcagatgcgacgagcaggccagcggcctgaccagcctggacctgaccaccagcagcgagaagagcgagatccacctgttcctgcagagatgcctggccagactgagaggcagcgacagacagctgccccaggtgctgcacatgagcgagctgctgaacagaggcctgggcgtgcaccacagcggcatcctgcccatcctgaaggagatcgtggagatgctgttcagcagaggcctggtgaaggtgctgttcgccaccgagaccttcgccatgggcgtgaacatgcccgccagaaccgtggtgttcgacagcatgagaaagcacgacggcagcaccttcagagacctgctgcccggcgagtacgtgcagatggccggcagagccggcagaagaggcctggaccccaccggcaccgtgatcctgctgtgcaagggcagagtgcccgagatggccgacctgcacagaatgatgatgggcaagcccagccagctgcagagccagttcagactgacctacaccatgatcctgaacctgctgagagtggacgccctgagagtggaggacatgatgaagagaagcttcagcgagttccccagcagaaaggacagcaaggcccacgagcaggccctggccgagctgaccaagagactgggcgccctggaggagcccgacatgaccggccagctggtggacctgcccgagtactacagctggggcgaggagctgaccgagacccagcacatgatccagagaagaatcatggagagcgtgaacggcctgaagagcctgagcgccggcagagtggtggtggtgaagaaccaggagcaccacaacgccctgggcgtgatcctgcaggtgagcagcaacagcaccagcagagtgttcaccaccctggtgctgtgcgacaagcccctgagccaggacccccaggacagaggccccgccaccgccgaggtgccctaccccgacgacctggtgggcttcaagctgttcctgcccgagggcccctgcgaccacaccgtggtgaagctgcagcccggcgacatggccgccatcaccaccaaggtgctgagagtgaacggcgagaagatcctggaggacttcagcaagagacagcagcccaagttcaagaaggacccccccctggccgccgtgaccaccgccgtgcaggagctgctgagactggcccaggcccaccccgccggcccccccaccctggaccccgtgaacgacctgcagctgaaggacatgagcgtggtggagggcggcctgagagccagaaagctggaggagctgatccagggcgcccagtgcgtgcacagccccagattccccgcccagtacctgaagctgagagagagaatgcagatccagaaggagatggagagactgagattcctgctgagcgaccagagcctgctgctgctgcccgagtaccaccagagagtggaggtgctgagaaccctgggctacgtggacgaggccggcaccgtgaagctggccggcagagtggcctgcgccatgagcagccacgagctgctgctgaccgagctgatgttcgacaacgccctgagcaccctgagacccgaggagatcgccgccctgctgagcggcctggtgtgccagagccccggcgacgccggcgaccagctgcccaacaccctgaagcagggcatcgagagagtgagagccgtggccaagagaatcggcgaggtgcaggtggcctgcggcctgaaccagaccgtggaggagttcgtgggcgagctgaacttcggcctggtggaggtggtgtacgagtgggccagaggcatgcccttcagcgagctggccggcctgagcggcacccccgagggcctggtggtgagatgcatccagagactggccgagatgtgcagaagcctgagaggcgccgccagactggtgggcgagcccgtgctgggcgccaagatggagaccgccgccaccctgctgagaagagacatcgtgttcgccgccagcctgtacacccagtag

SEQ ID NO: 101194 - DNA, 3741 bp, synthetic construct; identical to SEQ ID NO: 101193
  misc_feature 1..3741: note = Description of Artificial Sequence: Synthetic coding sequence
  source 1..3741: mol_type = other DNA

SEQ ID NO: 101195 - DNA, 3741 bp, synthetic construct; identical to SEQ ID NO: 101193
  misc_feature 1..3741: note = Description of Artificial Sequence: Synthetic coding sequence
  source 1..3741: mol_type = other DNA

SEQ ID NO: 101196 - DNA, 3741 bp, synthetic construct; identical to SEQ ID NO: 101193
  misc_feature 1..3741: note = Description of Artificial Sequence: Synthetic coding sequence
  source 1..3741: mol_type = other DNA

SEQ ID NO: 101197 - DNA, 3267 bp, synthetic construct
  misc_feature 1..3267: note = Description of Artificial Sequence: Synthetic coding sequence
  source 1..3267: mol_type = other DNA
atggacgagcccaccatcaccgacctgaacaccagagaggaggccgaggaggagatcgacttcgagaaggacctgctgaccatcccccccggcttcaagaagggcatggacttcgcccccaaggactgccccacccccgcccccggcctgctgagcctgagctgcatgctggagcccctggacctgggcggcggcgacgaggacgagaacgaggccgtgggccagcccggcggccccagaggcgacaccgtgagcgccagcccctgcagcgcccccctggccagagccagcagcctggaggacctggtgctgaaggaggccagcaccgccgtgagcacccccgaggcccccgagccccccagccaggagcagtgggccatccccgtggacgccaccagccccgtgggcgacttctacagactgatcccccagcccgccttccagtgggccttcgagcccgacgtgttccagaagcaggccatcctgcacctggagagacacgacagcgtgttcgtggccgcccacaccagcgccggcaagaccgtggtggccgagtacgccatcgccctggcccagaagcacatgaccagaaccatctacaccagccccatcaaggccctgagcaaccagaagttcagagacttcagaaacaccttcggcgacgtgggcctgctgaccggcgacgtgcagctgcaccccgaggccagctgcctgatcatgaccaccgagatcctgagaagcatgctgtacagcggcagcgacgtgatcagagacctggagtgggtgatcttcgacgaggtgcactacatcaacgacgtggagagaggcgtggtgtgggaggaggtgctgatcatgctgcccgaccacgtgagcatcatcctgctgagcgccaccgtgcccaacgccctggagttcgccgactggatcggcagactgaagagaagacagatctacgtgatcagcaccgtgaccagacccgtgcccctggagcactacctgttcaccggcaacagcagcaagacccagggcgagctgttcctgctgctggacagcagaggcgccttccacaccaagggctactacgccgccgtggaggccaagaaggagagaatgagcaagcacgcccagaccttcggcgccaagcagcccacccaccagggcggccccgcccaggacagaggcgtgtacctgagcctgctggccagcctgagaaccagagcccagctgcccgtggtggtgttcaccttcagcagaggcagatgcgacgagcaggccagcggcctgaccagcctggacctgaccaccagcagcgagaagagcgagatccacctgttcctgcagagatgcctggccagactgagaggcagcgacagacagctgccccaggtgctgcacatgagcgagctgctgaacagaggcctgggcgtgcaccacagcggcatcctgcccatcctgaaggagatcgtggagatgctgttcagcagaggcctggtgaaggtgctgttcgccaccgagaccttcgccatgggcgtgaacatgcccgccagaaccgtggtgttcgacagcatgagaaagcacgacggcagcaccttcagagacctgctgcccggcgagtacgtgcagatggccggcagagccggcagaagaggcctggaccccaccggcaccgtgatcctgctgtgcaagggcagagtgcccgagatggccgacctgcacagaatgatgatgggcaagcccagccagctgcagagccagttcagactgacctacaccatgatcctgaacctgctgagagtggacgccctgagagtggaggacatgatgaagagaagcttcagcgagttccccagcagaaaggacagcaaggcccacgagcaggccctggccgagctgaccaagagactgggcgccctggaggagcccgacatgaccggccagctggtggacctgcccgagtactacagctggggcgaggagctgaccgagacccagcacatgatccagagaagaatcatggagagcgtgaacggcctgaagagcctgagcgccggcagagtggtggtggtgaagaaccaggagcaccacaacgccctgggcgtgatcctgcaggtgagcagcaacagcaccagcagagtgttcaccaccctggtgctgtgcgacaagcccctgagccaggacccccaggacagaggccccgccaccgccgaggtgccctaccccgacgacctggtgggcttcaagctgttcctgcccgagggcccctgcgaccacaccgtggtgaagctgcagcccggcgacatggccgccatcaccaccaaggtgctgagagtgaacggcgagaagatcctggaggacttcagcaagagacagcagcccaagttcaagaaggacccccccctggccgccgtgaccaccgccgtgcaggagctgctgagactggcccaggcccaccccgccggcccccccaccctggaccccgtgaacgacctgcagctgaaggacatgagcgtggtggagggcggcctgagagccagaaagctggaggagctgatccagggcgcccagtgcgtgcacagccccagattccccgcccagtacctgaagctgagagagagaatgcagatccagaaggagatggagagactgagattcctgctgagcgaccagagcctgctgctgctgcccgagtaccaccagagagtggaggtgctgagaaccctgggctacgtggacgaggccggcaccgtgaagctggccggcagagtggcctgcgccatgagcagccacgagctgctgctgaccgagctgatgttcgacaacgccctgagcaccctgagacccgaggagatcgccgccctgctgagcggcctggtgtgccagagccccggcgacgccggcgaccagctgcccaacaccctgaagcagggcatcgagagagtgagagccgtggccaagagaatcggcgaggtgcaggtggcctgcggcctgaaccagaccgtggaggagttcgtgggcgagctgaacttcggcctggtggaggtggtgtacgagtgggccagaggcatgcccttcagcgagctggccggcctgagcggcacccccgagggcctggtggtgagatgcatccagagactggccgagatgtgcagaagcctgagaggcgccgccagactggtgggcgagcccgtgctgggcgccaagatggagaccgccgccaccctgctgagaagagacatcgtgttcgccgccagcctgtacacccagtag

SEQ ID NO: 101198 - DNA, 3741 bp, synthetic construct; identical to SEQ ID NO: 101192
  misc_feature 1..3741: note = Description of Artificial Sequence: Synthetic coding sequence
  source 1..3741: mol_type = other DNA

SEQ ID NO: 101199 - DNA, 3162 bp, synthetic construct
  misc_feature 1..3162: note = Description of Artificial Sequence: Synthetic coding sequence
  source 1..3162: mol_type = other DNA
atggacttcgcccccaaggactgccccacccccgcccccggcctgctgagcctgagctgcatgctggagcccctggacctgggcggcggcgacgaggacgagaacgaggccgtgggccagcccggcggccccagaggcgacaccgtgagcgccagcccctgcagcgcccccctggccagagccagcagcctggaggacctggtgctgaaggaggccagcaccgccgtgagcacccccgaggcccccgagccccccagccaggagcagtgggccatccccgtggacgccaccagccccgtgggcgacttctacagactgatcccccagcccgccttccagtgggccttcgagcccgacgtgttccagaagcaggccatcctgcacctggagagacacgacagcgtgttcgtggccgcccacaccagcgccggcaagaccgtggtggccgagtacgccatcgccctggcccagaagcacatgaccagaaccatctacaccagccccatcaaggccctgagcaaccagaagttcagagacttcagaaacaccttcggcgacgtgggcctgctgaccggcgacgtgcagctgcaccccgaggccagctgcctgatcatgaccaccgagatcctgagaagcatgctgtacagcggcagcgacgtgatcagagacctggagtgggtgatcttcgacgaggtgcactacatcaacgacgtggagagaggcgtggtgtgggaggaggtgctgatcatgctgcccgaccacgtgagcatcatcctgctgagcgccaccgtgcccaacgccctggagttcgccgactggatcggcagactgaagagaagacagatctacgtgatcagcaccgtgaccagacccgtgcccctggagcactacctgttcaccggcaacagcagcaagacccagggcgagctgttcctgctgctggacagcagaggcgccttccacaccaagggctactacgccgccgtggaggccaagaaggagagaatgagcaagcacgcccagaccttcggcgccaagcagcccacccaccagggcggccccgcccaggacagaggcgtgtacctgagcctgctggccagcctgagaaccagagcccagctgcccgtggtggtgttcaccttcagcagaggcagatgcgacgagcaggccagcggcctgaccagcctggacctgaccaccagcagcgagaagagcgagatccacctgttcctgcagagatgcctggccagactgagaggcagcgacagacagctgccccaggtgctgcacatgagcgagctgctgaacagaggcctgggcgtgcaccacagcggcatcctgcccatcctgaaggagatcgtggagatgctgttcagcagaggcctggtgaaggtgctgttcgccaccgagaccttcgccatgggcgtgaacatgcccgccagaaccgtggtgttcgacagcatgagaaagcacgacggcagcaccttcagagacctgctgcccggcgagtacgtgcagatggccggcagagccggcagaagaggcctggaccccaccggcaccgtgatcctgctgtgcaagggcagagtgcccgagatggccgacctgcacagaatgatgatgggcaagcccagccagctgcagagccagttcagactgacctacaccatgatcctgaacctgctgagagtggacgccctgagagtggaggacatgatgaagagaagcttcagcgagttccccagcagaaaggacagcaaggcccacgagcaggccctggccgagctgaccaagagactgggcgccctggaggagcccgacatgaccggccagctggtggacctgcccgagtactacagctggggcgaggagctgaccgagacccagcacatgatccagagaagaatcatggagagcgtgaacggcctgaagagcctgagcgccggcagagtggtggtggtgaagaaccaggagcaccacaacgccctgggcgtgatcctgcaggtgagcagcaacagcaccagcagagtgttcaccaccctggtgctgtgcgacaagcccctgagccaggacccccaggacagaggccccgccaccgccgaggtgccctaccccgacgacctggtgggcttcaagctgttcctgcccgagggcccctgcgaccacaccgtggtgaagctgcagcccggcgacatggccgccatcaccaccaaggtgctgagagtgaacggcgagaagatcctggaggacttcagcaagagacagcagcccaagttcaagaaggacccccccctggccgccgtgaccaccgccgtgcaggagctgctgagactggcccaggcccaccccgccggcccccccaccctggaccccgtgaacgacctgcagctgaaggacatgagcgtggtggagggcggcctgagagccagaaagctggaggagctgatccagggcgcccagtgcgtgcacagccccagattccccgcccagtacctgaagctgagagagagaatgcagatccagaaggagatggagagactgagattcctgctgagcgaccagagcctgctgctgctgcccgagtaccaccagagagtggaggtgctgagaaccctgggctacgtggacgaggccggcaccgtgaagctggccggcagagtggcctgcgccatgagcagccacgagctgctgctgaccgagctgatgttcgacaacgccctgagcaccctgagacccgaggagatcgccgccctgctgagcggcctggtgtgccagagccccggcgacgccggcgaccagctgcccaacaccctgaagcagggcatcgagagagtgagagccgtggccaagagaatcggcgaggtgcaggtggcctgcggcctgaaccagaccgtggaggagttcgtgggcgagctgaacttcggcctggtggaggtggtgtacgagtgggccagaggcatgcccttcagcgagctggccggcctgagcggcacccccgagggcctggtggtgagatgcatccagagactggccgagatgtgcagaagcctgagaggcgccgccagactggtgggcgagcccgtgctgggcgccaagatggagaccgccgccaccctgctgagaagagacatcgtgttcgccgccagcctgtacacccagtag

SEQ ID NO: 101200 - DNA, 3162 bp, synthetic construct; identical to SEQ ID NO: 101199
  misc_feature 1..3162: note = Description of Artificial Sequence: Synthetic coding sequence
  source 1..3162: mol_type = other DNA

SEQ ID NO: 101201 - DNA, 693 bp, synthetic construct
  misc_feature 1..693: note = Description of Artificial Sequence: Synthetic coding sequence
  source 1..693: mol_type = other DNA
atgatggagaccgagagactggtgctgcccccccccgaccccctggacctgcccctgagagccgtggagctgggctgcaccggccactgggagctgctgaacctgcccggcgcccccgagagcagcctgccccacggcctgcccccctgcgcccccgacctgcagcaggaggccgagcagctgttcctgagcagccccgcctggctgcccctgcacggcgtggagcacagcgccagaaagtggcagagaaagaccgacccctggagcctgctggccgtgctgggcgcccccgtgcccagcgacctgcaggcccagagacaccccaccaccggccagatcctgggctacaaggaggtgctgctggagaacaccaacctgagcgccaccaccagcctgagcctgagaagaccccccggccccgccagccagagcctgtggggcaaccccacccagtaccccttctggcccggcggcatggacgagcccaccatcaccgacctgaacaccagagaggaggccgaggaggagatcgacttcgagaaggacctgctgaccatcccccccggcttcaagaagggcatggacttcgcccccaagggcagcgtgcacagctgcatccaccccagaggccccagagccagcatcagcggcgccgtgggccacccctgcggcagacacctgccctgctggtag

SEQ ID NO: 101202 - DNA, 3267 bp, synthetic construct
  misc_feature 1..3267: note = Description of Artificial Sequence: Synthetic coding sequence
  source 1..3267: mol_type = other DNA
atggacgagcccaccatcaccgacctgaacaccagagaggaggccgaggaggagatcgacttcgagaaggacctgctgaccatcccccccggcttcaagaagggcatggacttcgcccccaaggactgccccacccccgcccccggcctgctgagcctgagctgcctgctggagcccctggacctgggcggcggcgacgaggacgagaacgaggccgtgggccagcccggcggccccagaggcgacaccgtgagcgccagcccctgcagcgcccccctggccagagccagcagcctggaggacctggtgctgaaggaggccagcaccgccgtgagcacccccgaggcccccgagccccccagccaggagcagtgggccatccccgtggacgccaccagccccgtgggcgacttctacagactgatcccccagcccgccttccagtgggccttcgagcccgacgtgttccagaagcaggccatcctgcacctggagagacacgacagcgtgttcgtggccgcccacaccagcgccggcaagaccgtggtggccgagtacgccatcgccctggcccagaagcacatgaccagaaccatctacaccagccccatcaaggccctgagcaaccagaagttcagagacttcagaaacaccttcggcgacgtgggcctgctgaccggcgacgtgcagctgcaccccgaggccagctgcctgatcatgaccaccgagatcctgagaagcatgctgtacagcggcagcgacgtgatcagagacctggagtgggtgatcttcgacgaggtgcactacatcaacgacgtggagagaggcgtggtgtgggaggaggtgctgatcatgctgcccgaccacgtgagcatcatcctgctgagcgccaccgtgcccaacgccctggagttcgccgactggatcggcagactgaagagaagacagatctacgtgatcagcaccgtgaccagacccgtgcccctggagcactacctgttcaccggcaacagcagcaagacccagggcgagctgttcctgctgctggacagcagaggcgccttccacaccaagggctactacgccgccgtggaggccaagaaggagagaatgagcaagcacgcccagaccttcggcgccaagcagcccacccaccagggcggccccgcccaggacagaggcgtgtacctgagcctgctggccagcctgagaaccagagcccagctgcccgtggtggtgttcaccttcagcagaggcagatgcgacgagcaggccagcggcctgaccagcctggacctgaccaccagcagcgagaagagcgagatccacctgttcctgcagagatgcctggccagactgagaggcagcgacagacagctgccccaggtgctgcacatgagcgagctgctgaacagaggcctgggcgtgcaccacagcggcatcctgcccatcctgaaggagatcgtggagatgctgttcagcagaggcctggtgaaggtgctgttcgccaccgagaccttcgccatgggcgtgaacatgcccgccagaaccgtggtgttcgacagcatgagaaagcacgacggcagcaccttcagagacctgctgcccggcgagtacgtgcagatggccggcagagccggcagaagaggcctggaccccaccggcaccgtgatcctgctgtgcaagggcagagtgcccgagatggccgacctgcacagaatgatgatgggcaagcccagccagctgcagagccagttcagactgacctacaccatgatcctgaacctgctgagagtggacgccctgagagtggaggacatgatgaagagaagcttcagcgagttccccagcagaaaggacagcaaggcccacgagcaggccctggccgagctgaccaagagactgggcgccctggaggagcccgacatgaccggccagctggtggacctgcccgagtactacagctggggcgaggagctgaccgagacccagcacatgatccagagaagaatcatggagagcgtgaacggcctgaagagcctgagcgccggcagagtggtggtggtgaagaaccaggagcaccacaacgccctgggcgtgatcctgcaggtgagcagcaacagcaccagcagagtgttcaccaccctggtgctgtgcgacaagcccctgagccaggacccccaggacagaggccccgccaccgccgaggtgccctaccccgacgacctggtgggcttcaagctgttcctgcccgagggcccctgcgaccacaccgtggtgaagctgcagcccggcgacatggccgccatcaccaccaaggtgctgagagtgaacggcgagaagatcctggaggacttcagcaagagacagcagcccaagttcaagaaggacccccccctggccgccgtgaccaccgccgtgcaggagctgctgagactggcccaggcccaccccgccggcccccccaccctggaccccgtgaacgacctgcagctgaaggacatgagcgtggtggagggcggcctgagagccagaaagctggaggagctgatccagggcgcccagtgcgtgcacagccccagattccccgcccagtacctgaagctgagagagagaatgcagatccagaaggagatggagagactgagattcctgctgagcgaccagagcctgctgctgctgcccgagtaccaccagagagtggaggtgctgagaaccctgggctacgtggacgaggccggcaccgtgaagctggccggcagagtggcctgcgccatgagcagccacgagctgctgctgaccgagctgatgttcgacaacgccctgagcaccctgagacccgaggagatcgccgccctgctgagcggcctggtgtgccagagccccggcgacgccggcgaccagctgcccaacaccctgaagcagggcatcgagagagtgagagccgtggccaagagaatcggcgaggtgcaggtggcctgcggcctgaaccagaccgtggaggagttcgtgggcgagctgaacttcggcctggtggaggtggtgtacgagtgggccagaggcatgcccttcagcgagctggccggcctgagcggcacccccgagggcctggtggtgagatgcatccagagactggccgagatgtgcagaagcctgagaggcgccgccagactggtgggcgagcccgtgctgggcgccaagatggagaccgccgccaccctgctgagaagagacatcgtgttcgccgccagcctgtacacccagtag

SEQ ID NO: 101203 - DNA, 3162 bp, synthetic construct
  misc_feature 1..3162: note = Description of Artificial Sequence: Synthetic coding sequence
  source 1..3162: mol_type = other DNA
atggacttcgcccccaaggactgccccacccccgcccccggcctgctgagcctgagctgcctgctggagcccctggacctgggcggcggcgacgaggacgagaacgaggccgtgggccagcccggcggccccagaggcgacaccgtgagcgccagcccctgcagcgcccccctggccagagccagcagcctggaggacctggtgctgaaggaggccagcaccgccgtgagcacccccgaggcccccgagccccccagccaggagcagtgggccatccccgtggacgccaccagccccgtgggcgacttctacagactgatcccccagcccgccttccagtgggccttcgagcccgacgtgttccagaagcaggccatcctgcacctggagagacacgacagcgtgttcgtggccgcccacaccagcgccggcaagaccgtggtggccgagtacgccatcgccctggcccagaagcacatgaccagaaccatctacaccagccccatcaaggccctgagcaaccagaagttcagagacttcagaaacaccttcggcgacgtgggcctgctgaccggcgacgtgcagctgcaccccgaggccagctgcctgatcatgaccaccgagatcctgagaagcatgctgtacagcggcagcgacgtgatcagagacctggagtgggtgatcttcgacgaggtgcactacatcaacgacgtggagagaggcgtggtgtgggaggaggtgctgatcatgctgcccgaccacgtgagcatcatcctgctgagcgccaccgtgcccaacgccctggagttcgccgactggatcggcagactgaagagaagacagatctacgtgatcagcaccgtgaccagacccgtgcccctggagcactacctgttcaccggcaacagcagcaagacccagggcgagctgttcctgctgctggacagcagaggcgccttccacaccaagggctactacgccgccgtggaggccaagaaggagagaatgagcaagcacgcccagaccttcggcgccaagcagcccacccaccagggcggccccgcccaggacagaggcgtgtacctgagcctgctggccagcctgagaaccagagcccagctgcccgtggtggtgttcaccttcagcagaggcagatgcgacgagcaggccagcggcctgaccagcctggacctgaccaccagcagcgagaagagcgagatccacctgttcctgcagagatgcctggccagactgagaggcagcgacagacagctgccccaggtgctgcacatgagcgagctgctgaacagaggcctgggcgtgcaccacagcggcatcctgcccatcctgaaggagatcgtggagatgctgttcagcagaggcctggtgaaggtgctgttcgccaccgagaccttcgccatgggcgtgaacatgcccgccagaaccgtggtgttcgacagcatgagaaagcacgacggcagcaccttcagagacctgctgcccggcgagtacgtgcagatggccggcagagccggcagaagaggcctggaccccaccggcaccgtgatcctgctgtgcaagggcagagtgcccgagatggccgacctgcacagaatgatgatgggcaagcccagccagctgcagagccagttcagactgacctacaccatgatcctgaacctgctgagagtggacgccctgagagtggaggacatgatgaagagaagcttcagcgagttccccagcagaaaggacagcaaggcccacgagcaggccctggccgagctgaccaagagactgggcgccctggaggagcccgacatgaccggccagctggtggacctgcccgagtactacagctggggcgaggagctgaccgagacccagcacatgatccagagaagaatcatggagagcgtgaacggcctgaagagcctgagcgccggcagagtggtggtggtgaagaaccaggagcaccacaacgccctgggcgtgatcctgcaggtgagcagcaacagcaccagcagagtgttcaccaccctggtgctgtgcgacaagcccctgagccaggacccccaggacagaggccccgccaccgccgaggtgccctaccccgacgacctggtgggcttcaagctgttcctgcccgagggcccctgcgaccacaccgtggtgaagctgcagcccggcgacatggccgccatcaccaccaaggtgctgagagtgaacggcgagaagatcctggaggacttcagcaagagacagcagcccaagttcaagaaggacccccccctggccgccgtgaccaccgccgtgcaggagctgctgagactggcccaggcccaccccgccggcccccccaccctggaccccgtgaacgacctgcagctgaaggacatgagcgtggtggagggcggcctgagagccagaaagctggaggagctgatccagggcgcccagtgcgtgcacagccccagattccccgcccagtacctgaagctgagagagagaatgcagatccagaaggagatggagagactgagattcctgctgagcgaccagagcctgctgctgctgcccgagtaccaccagagagtggaggtgctgagaaccctgggctacgtggacgaggccggcaccgtgaagctggccggcagagtggcctgcgccatgagcagccacgagctgctgctgaccgagctgatgttcgacaacgccctgagcaccctgagacccgaggagatcgccgccctgctgagcggcctggtgtgccagagccccggcgacgccggcgaccagctgcccaacaccctgaagcagggcatcgagagagtgagagccgtggccaagagaatcggcgaggtgcaggtggcctgcggcctgaaccagaccgtggaggagttcgtgggcgagctgaacttcggcctggtggaggtggtgtacgagtgggccagaggcatgcccttcagcgagctggccggcctgagcggcacccccgagggcctggtggtgagatgcatccagagactggccgagatgtgcagaagcctgagaggcgccgccagactggtgggcgagcccgtgctgggcgccaagatggagaccgccgccaccctgctgagaagagacatcgtgttcgccgccagcctgtacacccagtag

SEQ ID NO: 101204 - DNA, 2643 bp, synthetic construct
  misc_feature 1..2643: note = Description of Artificial Sequence: Synthetic coding sequence
  source 1..2643: mol_type = other DNA
atgatggagaccgagagactggtgctgcccccccccgaccccctggacctgcccctgagagccgtggagctgggctgcaccggccactgggagctgctgaacctgcccggcgcccccgagagcagcctgccccacggcctgcccccctgcgcccccgacctgcagcaggaggccgagcagctgttcctgagcagccccgcctggctgcccctgcacggcgtggagcacagcgccagaaagtggcagagaaagaccgacccctggagcctgctggccgtgctgggcgcccccgtgcccagcgacctgcaggcccagagacaccccaccaccggccagatcctgggctacaaggaggtgctgctggagcactacctgttcaccggcaacagcagcaagacccagggcgagctgttcctgctgctggacagcagaggcgccttccacaccaagggctactacgccgccgtggaggccaagaaggagagaatgagcaagcacgcccagaccttcggcgccaagcagcccacccaccagggcggccccgcccaggacagaggcgtgtacctgagcctgctggccagcctgagaaccagagcccagctgcccgtggtggtgttcaccttcagcagaggcagatgcgacgagcaggccagcggcctgaccagcctggacctgaccaccagcagcgagaagagcgagatccacctgttcctgcagagatgcctggccagactgagaggcagcgacagacagctgccccaggtgctgcacatgagcgagctgctgaacagaggcctgggcgtgcaccacagcggcatcctgcccatcctgaaggagatcgtggagatgctgttcagcagaggcctggtgaaggtgctgttcgccaccgagaccttcgccatgggcgtgaacatgcccgccagaaccgtggtgttcgacagcatgagaaagcacgacggcagcaccttcagagacctgctgcccggcgagtacgtgcagatggccggcagagccggcagaagaggcctggaccccaccggcaccgtgatcctgctgtgcaagggcagagtgcccgagatggccgacctgcacagaatgatgatgggcaagcccagccagctgcagagccagttcagactgacctacaccatgatcctgaacctgctgagagtggacgccctgagagtggaggacatgatgaagagaagcttcagcgagttccccagcagaaaggacagcaaggcccacgagcaggccctggccgagctgaccaagagactgggcgccctggaggagcccgacatgaccggccagctggtggacctgcccgagtactacagctggggcgaggagctgaccgagacccagcacatgatccagagaagaatcatggagagcgtgaacggcctgaagagcctgagcgccggcagagtggtggtggtgaagaaccaggagcaccacaacgccctgggcgtgatcctgcaggtgagcagcaacagcaccagcagagtgttcaccaccctggtgctgtgcgacaagcccctgagccaggacccccaggacagaggccccgccaccgccgaggtgccctaccccgacgacctggtgggcttcaagctgttcctgcccgagggcccctgcgaccacaccgtggtgaagctgcagcccggcgacatggccgccatcaccaccaaggtgctgagagtgaacggcgagaagatcctggaggacttcagcaagagacagcagcccaagttcaagaaggacccccccctggccgccgtgaccaccgccgtgcaggagctgctgagactggcccaggcccaccccgccggcccccccaccctggaccccgtgaacgacctgcagctgaaggacatgagcgtggtggagggcggcctgagagccagaaagctggaggagctgatccagggcgcccagtgcgtgcacagccccagattccccgcccagtacctgaagctgagagagagaatgcagatccagaaggagatggagagactgagattcctgctgagcgaccagagcctgctgctgctgcccgagtaccaccagagagtggaggtgctgagaaccctgggctacgtggacgaggccggcaccgtgaagctggccggcagagtggcctgcgccatgagcagccacgagctgctgctgaccgagctgatgttcgacaacgccctgagcaccctgagacccgaggagatcgccgccctgctgagcggcctggtgtgccagagccccggcgacgccggcgaccagctgcccaacaccctgaagcagggcatcgagagagtgagagccgtggccaagagaatcggcgaggtgcaggtggcctgcggcctgaaccagaccgtggaggagttcgtgggcgagctgaacttcggcctggtggaggtggtgtacgagtgggccagaggcatgcccttcagcgagctggccggcctgagcggcacccccgagggcctggtggtgagatgcatccagagactggccgagatgtgcagaagcctgagaggcgccgccagactggtgggcgagcccgtgctgggcgccaagatggagaccgccgccaccctgctgagaagagacatcgtgttcgccgccagcctgtacacccagtag

SEQ ID NO: 101205 - DNA, 3267 bp, synthetic construct; identical to SEQ ID NO: 101202
  misc_feature 1..3267: note = Description of Artificial Sequence: Synthetic coding sequence
  source 1..3267: mol_type = other DNA

SEQ ID NO: 101206 - DNA, 2643 bp, synthetic construct; identical to SEQ ID NO: 101204
  misc_feature 1..2643: note = Description of Artificial Sequence: Synthetic coding sequence
  source 1..2643: mol_type = other DNA

SEQ ID NO: 101207 - DNA, 2643 bp, synthetic construct; identical to SEQ ID NO: 101204
  misc_feature 1..2643: note = Description of Artificial Sequence: Synthetic coding sequence
  source 1..2643: mol_type = other DNA

SEQ ID NO: 101208 - DNA, 693 bp, synthetic construct; identical to SEQ ID NO: 101201
  misc_feature 1..693: note = Description of Artificial Sequence: Synthetic coding sequence
  source 1..693: mol_type = other DNA

SEQ ID NO: 101209 - DNA, 2643 bp, synthetic construct; identical to SEQ ID NO: 101204
  misc_feature 1..2643: note = Description of Artificial Sequence: Synthetic coding sequence
  source 1..2643: mol_type = other DNA

SEQ ID NO: 101210 - DNA, 3267 bp, synthetic construct; identical to SEQ ID NO: 101202
  misc_feature 1..3267: note = Description of Artificial Sequence: Synthetic coding sequence
  source 1..3267: mol_type = other DNA

SEQ ID NO: 101211 - DNA, 3267 bp, synthetic construct; identical to SEQ ID NO: 101202
  misc_feature 1..3267: note = Description of Artificial Sequence: Synthetic coding sequence
  source 1..3267: mol_type = other DNA

SEQ ID NO: 101212 - DNA, 693 bp, synthetic construct; identical to SEQ ID NO: 101201
  misc_feature 1..693: note = Description of Artificial Sequence: Synthetic coding sequence
  source 1..693: mol_type = other DNA

SEQ ID NO: 101213 - DNA, 3267 bp, synthetic construct; identical to SEQ ID NO: 101197
  misc_feature 1..3267: note = Description of Artificial Sequence: Synthetic coding sequence
  source 1..3267: mol_type = other DNA

SEQ ID NO: 101214 - DNA, 693 bp, synthetic construct; identical to SEQ ID NO: 101201
  misc_feature 1..693: note = Description of Artificial Sequence: Synthetic coding sequence
  source 1..693: mol_type = other DNA

SEQ ID NO: 101215 - DNA, 2643 bp, synthetic construct; identical to SEQ ID NO: 101204
  misc_feature 1..2643: note = Description of Artificial Sequence: Synthetic coding sequence
  source 1..2643: mol_type = other DNA

SEQ ID NO: 101216 - DNA, 693 bp, synthetic construct; identical to SEQ ID NO: 101201
  misc_feature 1..693: note = Description of Artificial Sequence: Synthetic coding sequence
  source 1..693: mol_type = other DNA

SEQ ID NO: 101217 - DNA, 3162 bp, synthetic construct; identical to SEQ ID NO: 101203
  misc_feature 1..3162: note = Description of Artificial Sequence: Synthetic coding sequence
  source 1..3162: mol_type = other DNA

SEQ ID NO: 101218 - DNA, 3162 bp, synthetic construct; identical to SEQ ID NO: 101203
  misc_feature 1..3162: note = Description of Artificial Sequence: Synthetic coding sequence
  source 1..3162: mol_type = other DNA

SEQ ID NO: 101219 - DNA, 3162 bp, synthetic construct; identical to SEQ ID NO: 101203
  misc_feature 1..3162: note = Description of Artificial Sequence: Synthetic coding sequence
  source 1..3162: mol_type = other DNA

SEQ ID NO: 101220 - DNA, 465 bp, synthetic construct
  misc_feature 1..465: note = Description of Artificial Sequence: Synthetic coding sequence
  source 1..465: mol_type = other DNA
atggccaccaaggccgtgtgcgtgctgaagggcgacggccccgtgcagggcatcatcaacttcgagcagaaggagagcaacggccccgtgaaggtgtggggcagcatcaagggcctgaccgagggcctgcacggcttccacgtgcacgagttcggcgacaacaccgccggctgcaccagcgccggcccccacttcaaccccctgagcagaaagcacggcggccccaaggacgaggagagacacgtgggcgacctgggcaacgtgaccgccgacaaggacggcgtggccgacgtgagcatcgaggacagcgtgatcagcctgagcggcgaccactgcatcatcggcagaaccctggtggtgcacgagaaggccgacgacctgggcaagggcggcaacgaggagagcaccaagaccggcaacgccggcagcagactggcctgcggcgtgatcggcatcgcccagtag

SEQ ID NO: 101221 - DNA, 108 bp, synthetic construct
  misc_feature 1..108: note = Description of Artificial Sequence: Synthetic coding sequence
  source 1..108: mol_type = other DNA
atggccaccaaggccgtgtgcgtgctgaagggcgacggccccgtgcagggcatcatcaacttcgagcagaaggagagcaacggccccgagggcgtgggcaagcactag

SEQ ID NO: 101222 - DNA, 1074 bp, synthetic construct
  misc_feature 1..1074: note = Description of Artificial Sequence: Synthetic coding sequence
  source 1..1074: mol_type = other DNA
atggacagcgtggagaagaccaccaacagaagcgagcagaagagcagaaagttcctgaagagcctgatcagaaagcagccccaggagctgctgctggtgatcggcaccggcgtgagcgccgccgtggcccccggcatccccgccctgtgcagctggagaagctgcatcgaggccgtgatcgaggccgccgagcagctggaggtgctgcaccccggcgacgtggccgagttcagaagaaaggtgaccaaggacagagacctgctggtggtggcccacgacctgatcagaaagatgagccccagaaccggcgacgccaagcccagcttcttccaggactgcctgatggaggtgttcgacgacctggagcagcacatcagaagccccgtggtgctgcagagcatcctgagcctgatggacagaggcgccatggtgctgaccaccaactacgacaacctgctggaggccttcggcagaagacagaacaagcccatggagagcctggacctgaaggacaagaccaaggtgctggagtgggccagaggccacatgaagtacggcgtgctgcacatccacggcctgtacaccgacccctgcggcgtggtgctggaccccagcggctacaaggacgtgacccaggacgccgaggtgatggaggtgctgcagaacctgtacagaaccaagagcttcctgttcgtgggctgcggcgagaccctgagagaccagatcttccaggccctgttcctgtacagcgtgcccaacaaggtggacctggagcactacatgctggtgctgaaggagaacgaggaccacttcttcaagcaccaggccgacatgctgctgcacggcatcaaggtggtgagctacggcgactgcttcgaccacttccccggctacgtgcaggacctggccacccagatctgcaagcagcagagccccgacgccgacagagtggacagcaccaccctgctgggcaacgcctgccaggactgcgccaagagaaagctggaggagaacggcatcgaggtgagcaagaagagaacccagagcgacaccgacgacgccggcggcagctag

SEQ ID NO: 101223 - DNA, 636 bp, synthetic construct
  misc_feature 1..636: note = Description of Artificial Sequence: Synthetic coding sequence
  source 1..636: mol_type = other DNA
atggaccccagaaaggtgaacgagctgagagccttcgtgaagatgtgcaagcaggaccccagcgtgctgcacaccgaggagatgagattcctgagagagtgggtggagagcatgggcggcaaggtgccccccgccacccagaaggccaagagcgaggagaacaccaaggaggagaagcccgacagcaagaaggtggaggaggacctgaaggccgacgagcccagcagcgaggagagcgacctggagatcgacaaggagggcgtgatcgagcccgacaccgacgccccccaggagatgggcgacgagaacgccgagatcaccgaggagatgatggaccaggccaacgacaagaaggtggccgccatcgaggccctgaacgacggcgagctgcagaaggccatcgacctgttcaccgacgccatcaagctgaaccccagactggccatcctgtacgccaagagagccagcgtgttcgtgaagctgcagaagcccaacgccgccatcagagactgcgacagagccatcgagatcaaccccgacagcgcccagccctacaagtggagaggcaaggcccacagactgctgggccactgggaggaggccgcccacgacctggccctggcctggacccagtag

SEQ ID NO: 101224 - DNA, 489 bp, synthetic construct
  misc_feature 1..489: note = Description of Artificial Sequence: Synthetic coding sequence
  source 1..489: mol_type = other DNA
atgggcggcaaggtgccccccgccacccagaaggccaagagcgaggagaacaccaaggaggagaagcccgacagcaagaaggtggaggaggacctgaaggccgacgagcccagcagcgaggagagcgacctggagatcgacaaggagggcgtgatcgagcccgacaccgacgccccccaggagatgggcgacgagaacgccgagatcaccgaggagatgatggaccaggccaacgacaagaaggtggccgccatcgaggccctgaacgacggcgagctgcagaaggccatcgacctgttcaccgacgccatcaagctgaaccccagactggccatcctgtacgccaagagagccagcgtgttcgtgaagctgcagaagcccaacgccgccatcagagactgcgacagagccatcgagatcaaccccgacagcgcccagccctacaagtggagaggcaaggcccacagactgctgggccactgggagtag

SEQ ID NO: 101225 - DNA, 366 bp, synthetic construct
  misc_feature 1..366: note = Description of Artificial Sequence: Synthetic coding sequence
  source 1..366: mol_type = other DNA
atggaccccagaaaggtgaacgagctgagagccttcgtgaagatgtgcaagcaggaccccagcgtgctgcacaccgaggagatgagattcctgagagagtgggtggagagcatgggcggcaaggtgccccccgccacccagaaggccaagagcgaggagaacaccaaggaggagaagcccgacagcaagaaggtggaggaggacctgaaggccgacgagcccagcagcgaggagagcgacctggagatcgacaaggagggcgtgatcgagcccgacaccgacgccccccaggagatgggcgacgagaacgccgagatcaccgaggagatgatggaccaggccaacgacaagagcggctgctactag

SEQ ID NO: 101226 - DNA, 2568 bp, synthetic construct
  misc_feature 1..2568: note = Description of Artificial Sequence: Synthetic coding sequence
  source 1..2568: mol_type = other DNA
atgggcagcgacagagccagaaagggcggcggcggccccaaggacttcggcgccggcctgaagtacaacagcagacacgagaaggtgaacggcctggaggagggcgtggagttcctgcccgtgaacaacgtgaagaaggtggagaagcacggccccggcagatgggtggtgctggccgccgtgctgatcggcctgctgctggtgctgctgggcatcggcttcctggtgtggcacctgcagtacagagacgtgagagtgcagaaggtgttcaacggctacatgagaatcaccaacgagaacttcgtggacgcctacgagaacagcaacagcaccgagttcgtgagcctggccagcaaggtgaaggacgccctgaagctgctgtacagcggcgtgcccttcctgggcccctaccacaaggagagcgccgtgaccgccttcagcgagggcagcgtgatcgcctactactggagcgagttcagcatcccccagcacctggtggaggaggccgagagagtgatggccgaggagagagtggtgatgctgccccccagagccagaagcctgaagagcttcgtggtgaccagcgtggtggccttccccaccgacagcaagaccgtgcagagaacccaggacaacagctgcagcttcggcctgcacgccagaggcgtggagctgatgagattcaccacccccggcttccccgacagcccctaccccgcccacgccagatgccagtgggccctgagaggcgacgccgacagcgtgctgagcctgaccttcagaagcttcgacctggccagctgcgacgagagaggcagcgacctggtgaccgtgtacaacaccctgagccccatggagccccacgccctggtgcagctgtgcggcacctacccccccagctacaacctgaccttccacagcagccagaacgtgctgctgatcaccctgatcaccaacaccgagagaagacaccccggcttcgaggccaccttcttccagctgcccagaatgagcagctgcggcggcagactgagaaaggcccagggcaccttcaacagcccctactaccccggccactacccccccaacatcgactgcacctggaacatcgaggtgcccaacaaccagcacgtgaaggtgagattcaagttcttctacctgctggagcccggcgtgcccgccggcacctgccccaaggactacgtggagatcaacggcgagaagtactgcggcgagagaagccagttcgtggtgaccagcaacagcaacaagatcaccgtgagattccacagcgaccagagctacaccgacaccggcttcctggccgagtacctgagctacgacagcagcgacccctgccccggccagttcacctgcagaaccggcagatgcatcagaaaggagctgagatgcgacggctgggccgactgcaccgaccacagcgacgagctgaactgcagctgcgacgccggccaccagttcacctgcaagaacaagttctgcaagcccctgttctgggtgtgcgacagcgtgaacgactgcggcgacaacagcgacgagcagggctgcagctgccccgcccagaccttcagatgcagcaacggcaagtgcctgagcaagagccagcagtgcaacggcaaggacgactgcggcgacggcagcgacgaggccagctgccccaaggtgaacgtggtgacctgcaccaagcacacctacagatgcctgaacggcctgtgcctgagcaagggcaaccccgagtgcgacggcaaggaggactgcagcgacggcagcgacgagaaggactgcgactgcggcctgagaagcttcaccagacaggccagagtggtgggcggcaccgacgccgacgagggcgagtggccctggcaggtgagcctgcacgccctgggccagggccacatctgcggcgccagcctgatcagccccaactggctggtgagcgccgcccactgctacatcgacgacagaggcttcagatacagcgaccccacccagtggaccgccttcctgggcctgcacgaccagagccagagaagcgcccccggcgtgcaggagagaagactgaagagaatcatcagccaccccttcttcaacgacttcaccttcgactacgacatcgccctgctggagctggagaagcccgccgagtacagcagcatggtgagacccatctgcctgcccgacgccagccacgtgttccccgccggcaaggccatctgggtgaccggctggggccacacccagtacggcggcaccggcgccctgatcctgcagaagggcgagatcagagtgatcaaccagaccacctgcgagaacctgctgccccagcagatcacccccagaatgatgtgcgtgggcttcctgagcggcggcgtggacagctgccagggcgacagcggcggccccctgagcagcgtggaggccgacggcagaatcttccaggccggcgtggtgagctggggcgacggctgcgcccagagaaacaagcccggcgtgtacaccagactgcccctgttcagagactggatcaaggagaacaccggcgtgtag

SEQ ID NO: 101227 - DNA, 3414 bp, synthetic construct
  misc_feature 1..3414: note = Description of Artificial Sequence: Synthetic coding sequence
  source 1..3414: mol_type = other DNA
atgaccatgaccgccaacaagaacagcagcatcacccacggcgccggcggcaccaaggcccccagaggcaccctgagcagaagccagagcgtgagccccccccccgtgctgagcccccccagaagccccatctaccccctgagcgacagcgagaccagcgcctgcagataccccagccacagcagcagcagagtgctgctgaaggacagacacccccccgcccccagcccccagaacccccaggaccccagccccgacaccagcccccccacctgccccttcaagaccgccagcttcggctacctggacagaagccccagcgcctgcaagagagacgcccagaaggagagcgtgcagggcgccgcccaggacgtggccggcgtggccgcctgcctgcccctggcccagagcacccccttccccggccccgccgccggccccagaggcgtgctgctgaccagaaccggcaccagagcccacagcctgggcatcagagagaagatcagcgcctgggagggcagaagagaggccagccccagaatgagcatgtgcggcgagaagagagagggcagcggcagcgagtgggccgccagcgagggctgccccagcctgggctgccccagcgtggtgcccagcccctgcagcagcgagaagaccttcgacttcaagggcctgagaagaatgagcagaaccttcagcgagtgcagctaccccgagaccgaggaggagggcgaggccctgcccgtgagagacagcttctacagactggagaagagactgggcagaagcgagcccagcgccttcctgagaggccacggcagcagaaaggagagcagcgccgtgctgagcagaatccagaagatcgagcaggtgctgaaggagcagcccggcagaggcctgccccagctgcccagcagctgctacagcgtggacagaggcaagagaaagaccggcaccctgggcagcctggaggagcccgccggcggcgccagcgtgagcgccggcagcagagccgtgggcgtggccggcgtggccggcgaggccggccccccccccgagagagagggcagcggcagcaccaagcccggcacccccggcaacagccccagcagccagagactgcccagcaagagcagcctggaccccgccgtgaaccccgtgcccaagcccaagagaaccttcgagtacgaggccgacaagaaccccaagagcaagcccagcaacggcctgccccccagccccacccccgccgcccccccccccctgcccagcacccccgccccccccgtgaccagaagacccaagaaggacatgagaggccacagaaagagccagagcagaaagagcttcgagttcgaggacgccagcagcctgcagagcctgtaccccagcagccccaccgagaacggcaccgagaaccagcccaagttcggcagcaagagcaccctggaggagaacgcctacgaggacatcgtgggcgacctgcccaaggagaacccctacgaggacgtggacctgaagagcagaagagccggcagaaagagccagcagctgagcgagaacagcctggacagcctgcacagaatgtggagcccccaggacagaaagtacaacagcccccccacccagctgagcctgaagcccaacagccagagcctgagaagcggcaactggagcgagagaaagagccacagactgcccagactgcccaagagacacagccacgacgacatgctgctgctggcccagctgagcctgcccagcagccccagcagcctgaacgaggacagcctgagcaccaccagcgagctgctgagcagcagaagagccagaagaatccccaagctggtgcagagaatcaacagcatctacaacgccaagagaggcaagaagagactgaagaagctgagcatgagcagcatcgagaccgccagcctgagagacgagaacagcgagagcgagagcgacagcgacgacagattcaaggcccacacccagagactggtgcacatccagagcatgctgaagagagcccccagctacagaaccctggagctggagctgctggagtggcaggagagagagctgttcgagtacttcgtggtggtgagcctgaagaagaagcccagcagaaacacctacctgcccgaggtgagctaccagttccccaagctggacagacccaccaagcagatgagagaggccgaggagagactgaaggccatcccccagttctgcttccccgacgccaaggactggctgcccgtgagcgagtacagcagcgagaccttcagcttcatgctgaccggcgaggacggcagcagaagattcggctactgcagaagactgctgcccagcggcaagggccccagactgcccgaggtgtactgcgtgatcagcagactgggctgcttcggcctgttcagcaaggtgctggacgaggtggagagaagaagaggcatcagcgccgccctggtgtaccccttcatgagaagcctgatggagagccccttccccgcccccggcaagaccatcaaggtgaagaccttcctgcccggcgccggcaacgaggtgctggagctgagaagacccatggacagcagactggagcacgtggacttcgagtgcctgttcacctgcctgagcgtgagacagctgatcagaatcttcgccagcctgctgctggagagaagagtgatcttcgtggccgacaagctgagcaccctgagcagctgcagccacgccgtggtggccctgctgtaccccttcagctggcagcacaccttcatccccgtgctgcccgccagcatgatcgacatcgtgtgctgccccacccccttcctggtgggcctgctgagcagcagcctgcccaagctgaaggagctgcccgtggaggaggccctgatggtgaacctgggcagcgacagattcatcagacagatggacgacgaggacaccctgctgcccagaaagctgcaggccgccctggagcaggccctggagagaaagaacgagctgatcagccaggacagcgacagcgacagcgacgacgagtgcaacaccctgaacggcctggtgagcgaggtgttcatcagattcttcgtggagaccgtgggccactacagcctgttcctgacccagagcgagaagggcgagagagccttccagagagaggccttcagaaagagcgtggccagcaagagcatcagaagattcctggaggtgttcatggagagccagatgttcgccggcttcatccaggacagagagctgagaaagtgcagagccaagggcctgttcgagcagagagtggagcagtacctggaggagctgcccgacaccgagcagagcggcatgaacaagttcctgagaggcctgggcaacaagatgaagttcctgcacaagaagaactag

SEQ ID NO: 101228 - DNA, 3414 bp, synthetic construct; identical to SEQ ID NO: 101227
  misc_feature 1..3414: note = Description of Artificial Sequence: Synthetic coding sequence
  source 1..3414: mol_type = other DNA

SEQ ID NO: 101229 - DNA, 1263 bp, synthetic construct
  misc_feature 1..1263: note = Description of Artificial Sequence: Synthetic coding sequence
  source 1..1263: mol_type = other DNA
atgaccagcagaaagaacggcggcggcgcccacagctggcaggagaccccctgggagcagagaagagccctgggcctgcagagagccgagatgaccatgaccgccaacaagaacagcagcatcacccacggcgccggcggcaccaaggcccccagaggcaccctgagcagaaagagcttcgagttcgaggacgccagcagcctgcagagcctgtaccccagcagccccaccgagaacggcaccgagaaccagcccaagttcggcagcaagagcaccctggaggagaacgcctacgaggacatcgtgggcgacctgcccaaggagaacccctacgaggacgtggacctgaagagcagaagagccggcagaaagagccagcagctgagcgagaacagcctggacagcctgcacagaatgtggagcccccaggacagaaagtacaacagcccccccacccagctgagcctgaagcccaacagccagagcctgagaagcggcaactggagcgagagaaagagccacagactgcccagactgcccaagagacacagccacgacgacatgctgctgctggcccagctgagcctgcccagcagccccagcagcctgaacgaggacagcctgagcaccaccagcgagctgctgagcagcagaagagccagaagaatccccaagctggtgcagagaatcaacagcatctacaacgccaagagaggcaagaagagactgaagaagctgagcatgagcagcatcgagaccgccagcctgagagacgagaacagcgagagcgagagcgacagcgacgacagattcaaggcccacacccagagactggtgcacatccagagcatgctgaagagagcccccagctacagaaccctggagctggagctgctggagtggcaggagagagagctgctgagcaccctgtggtggtgccccagcagaagaagccacagagagacccccaccagccccaagagccccaccagcttccccagaaacgtgctgagccccgccctgcacgtggccgccggcagcttcagcttcctgagactgtgcagcagcagaaccagcttcagaagaagcgtgcagacccccgcctggagccccagccccgcccagctggccctgctggacagacccaccaagcagatgagagaggccgaggagagactgaaggccatcccccagttctgcttccccgacgccaaggactggctgcccgtgagcgagtacatgagacccttcctgagctgctag

SEQ ID NO: 101230 - DNA, 174 bp, synthetic construct
  misc_feature 1..174: note = Description of Artificial Sequence: Synthetic coding sequence
  source 1..174: mol_type = other DNA
atgaccatgaccgccaacaagaacagcagcatcacccacggcgccggcggcaccaaggcccccagaggcaccctgagcagaagccagagcgtgagccccccccccgtgctgagcccccccagaagccccatctaccccctgagcgacagcgagaccagcgcctgcagatactag

SEQ ID NO: 101231 - DNA, 123 bp, synthetic construct
  misc_feature 1..123: note = Description of Artificial Sequence: Synthetic coding sequence
  source 1..123: mol_type = other DNA
atgaccatgaccgccaacaagaacagcagcatcacccacggcgccggcggcaccaaggcccccagaggcaccctgagcagaagccagagcgtgagccccccccccgtgctgagccccccctag

SEQ ID NO: 101232 - DNA, 144 bp, synthetic construct
  misc_feature 1..144: note = Description of Artificial Sequence: Synthetic coding sequence
  source 1..144: mol_type = other DNA
atgtggagcccccaggacagaaagtacaacagcccccccacccagctgagcctgaagcccaacagccagagcctgagaagcggcaactggagcgagagaaagagccacagactgcccagactgcccaagagacacagccactag

SEQ ID NO: 101233 - DNA, 219 bp, synthetic construct
  misc_feature 1..219: note = Description of Artificial Sequence: Synthetic coding sequence
  source 1..219: mol_type = other DNA
atgaccatgaccgccaacaagaacagcagcatcacccacggcgccggcggcaccaaggcccccagaggcaccctgagcagaaagagcttcgagttcgaggacgccagcagcctgcagagcctgtaccccagcagccccaccgagaacggcaccgagaaccagcccaagttcggcagcaagagcaccctggaggagaacgcctacgaggacatcgtgtag

SEQ ID NO: 101234 - DNA, 375 bp, synthetic construct
  misc_feature 1..375: note = Description of Artificial Sequence: Synthetic coding sequence
  source 1..375: mol_type = other DNA
atgaccatgaccgccaacaagaacagcagcatcacccacggcgccggcggcaccaaggcccccagaggcaccctgagcagaagccagagcgtgagccccccccccgtgctgagcccccccagaagccccatctaccccctgagcgacagcgagaccagcgcctgcagataccccagccacagcagcagcagagtgctgctgaaggacagacacccccccgcccccagcccccagaacccccaggaccccagccccgacaccagcccccccacctgccccttcaagaccgccagcttcggctacctggacagaagccccagcgcctgcaagagagacgcccagaaggagagcgtgcagggcgccgcccaggactag

SEQ ID NO: 101235 - DNA, 429 bp, synthetic construct
  misc_feature 1..429: note = Description of Artificial Sequence: Synthetic coding sequence
  source 1..429: mol_type = other DNA
atgaccatgaccgccaacaagaacagcagcatcacccacggcgccggcggcaccaaggcccccagaggcaccctgagcagaagccagagcgtgagccccccccccgtgctgagcccccccagaagccccatctaccccctgagcgacagcgagaccagcgcctgcagataccccagccacagcagcagcagagtgctgctgaaggacagacacccccccgcccccagcccccagaacccccaggaccccagccccgacaccagcccccccacctgccccttcaagaccgccagcttcggctacctggacagaagccccagcgcctgcaagagagacgcccagaaggagagcgtgcagggcgccgcccaggacgtggccggcgtggccgcctgcctgcccctggcccagagcacccccttccccggctag

SEQ ID NO: 101236 - DNA, 2154 bp, synthetic construct
  misc_feature 1..2154: note = Description of Artificial Sequence: Synthetic coding sequence
  source 1..2154: mol_type = other DNA
atgaccatgaccgccaacaagaacagcagcatcacccacggcgccggcggcaccaaggcccccagaggcaccctgagcagaaagagcttcgagttcgaggacgccagcagcctgcagagcctgtaccccagcagccccaccgagaacggcaccgagaaccagcccaagttcggcagcaagagcaccctggaggagaacgcctacgaggacatcgtgggcgacctgcccaaggagaacccctacgaggacgtggacctgaagagcagaagagccggcagaaagagccagcagctgagcgagaacagcctggacagcctgcacagaatgtggagcccccaggacagaaagtacaacagcccccccacccagctgagcctgaagcccaacagccagagcctgagaagcggcaactggagcgagagaaagagccacagactgcccagactgcccaagagacacagccacgacgacatgctgctgctggcccagctgagcctgcccagcagccccagcagcctgaacgaggacagcctgagcaccaccagcgagctgctgagcagcagaagagccagaagaatccccaagctggtgcagagaatcaacagcatctacaacgccaagagaggcaagaagagactgaagaagctgagcatgagcagcatcgagaccgccagcctgagagacgagaacagcgagagcgagagcgacagcgacgacagattcaaggcccacacccagagactggtgcacatccagagcatgctgaagagagcccccagctacagaaccctggagctggagctgctggagtggcaggagagagagctgttcgagtacttcgtggtggtgagcctgaagaagaagcccagcagaaacacctacctgcccgaggtgagctaccagttccccaagctggacagacccaccaagcagatgagagaggccgaggagagactgaaggccatcccccagttctgcttccccgacgccaaggactggctgcccgtgagcgagtacagcagcgagaccttcagcttcatgctgaccggcgaggacggcagcagaagattcggctactgcagaagactgctgcccagcggcaagggccccagactgcccgaggtgtactgcgtgatcagcagactgggctgcttcggcctgttcagcaaggtgctggacgaggtggagagaagaagaggcatcagcgccgccctggtgtaccccttcatgagaagcctgatggagagccccttccccgcccccggcaagaccatcaaggtgaagaccttcctgcccggcgccggcaacgaggtgctggagctgagaagacccatggacagcagactggagcacgtggacttcgagtgcctgttcacctgcctgagcgtgagacagctgatcagaatcttcgccagcctgctgctggagagaagagtgatcttcgtggccgacaagctgagcaccctgagcagctgcagccacgccgtggtggccctgctgtaccccttcagctggcagcacaccttcatccccgtgctgcccgccagcatgatcgacatcgtgtgctgccccacccccttcctggtgggcctgctgagcagcagcctgcccaagctgaaggagctgcccgtggaggaggccctgatggtgaacctgggcagcgacagattcatcagacagatggacgacgaggacaccctgctgcccagaaagctgcaggccgccctggagcaggccctggagagaaagaacgagctgatcagccaggacagcgacagcgacagcgacgacgagtgcaacaccctgaacggcctggtgagcgaggtgttcatcagattcttcgtggagaccgtgggccactacagcctgttcctgacccagagcgagaagggcgagagagccttccagagagaggccttcagaaagagcgtggccagcaagagcatcagaagattcctggaggtgttcatggagagccagatgttcgccggcttcatccaggacagagagctgagaaagtgcagagccaagggcctgttcgagcagagagtggagcagtacctggaggagctgcccgacaccgagcagagcggcatgaacaagttcctgagaggcctgggcaacaagatgaagttcctgcacaagaagaactag

SEQ ID NO: 101237 - DNA, 159 bp, synthetic construct
  misc_feature 1..159: note = Description of Artificial Sequence: Synthetic coding sequence
  source 1..159: mol_type = other DNA
atgaccatgaccgccaacaagaacagcagcatcacccacggcgccggcggcaccaaggcccccagaggcaccctgagcagaagccagagcgtgagccccccccccgtgctgagcccccccagaagccccatctaccccctgagcgacagcgagacctag

SEQ ID NO: 101238 - DNA, 336 bp, synthetic construct
  misc_feature 1..336: note = Description of Artificial Sequence: Synthetic coding sequence
  source 1..336: mol_type = other DNA
atgaccatgaccgccaacaagaacagcagcatcacccacggcgccggcggcaccaaggcccccagaggcaccctgagcagaagccagagcgtgagccccccccccgtgctgagcccccccagaagccccatctaccccctgagcgacagcgagaccagcgcctgcagataccccagccacagcagcagcagagtgctgctgaaggacagacacccccccgcccccagcccccagaacccccaggaccccagccccgacaccagcccccccacctgccccttcaagaccgccagcttcggctacctggacagaagccccagcgcctgcaagagatag

SEQ ID NO: 101239 - DNA, 162 bp, synthetic construct
  misc_feature 1..162: note = Description of Artificial Sequence: Synthetic coding sequence
  source 1..162: mol_type = other DNA
atgaccatgaccgccaacaagaacagcagcatcacccacggcgccggcggcaccaaggcccccagaggcaccctgagcagaagccagagcgtgagccccccccccgtgctgagcccccccagaagccccatctaccccctgagcgacagcgagaccagctag

SEQ ID NO: 101240 - DNA, 252 bp, synthetic construct
  misc_feature 1..252: note = Description of Artificial Sequence: Synthetic coding sequence
  source 1..252: mol_type = other DNA
atgaccatgaccgccaacaagaacagcagcatcacccacggcgccggcggcaccaaggcccccagaggcaccctgagcagaagccagagcgtgagccccccccccgtgctgagcccccccagaagccccatctaccccctgagcgacagcgagaccagcgcctgcagataccccagccacagcagcagcagagtgctgctgaaggacagacacccccccgcccccagcccccagaacccccaggacccctag

SEQ ID NO: 101241 - DNA, 288 bp, synthetic construct
  misc_feature 1..288: note = Description of Artificial Sequence: Synthetic coding sequence
  source 1..288: mol_type = other DNA
atgaccatgaccgccaacaagaacagcagcatcacccacggcgccggcggcaccaaggcccccagaggcaccctgagcagaagccagagcgtgagccccccccccgtgctgagcccccccagaagccccatctaccccctgagcgacagcgagaccagcgcctgcagataccccagccacagcagcagcagagtgctgctgaaggacagacacccccccgcccccagcccccagaacccccaggaccccagccccgacaccagcccccccacctgccccttcaagtag

SEQ ID NO: 101242 - DNA, 465 bp, synthetic construct
  misc_feature 1..465: note = Description of Artificial Sequence: Synthetic coding sequence
  source 1..465: mol_type = other DNA
atgaccatgaccgccaacaagaacagcagcatcacccacggcgccggcggcaccaaggcccccagaggcaccctgagcagaagccagagcgtgagccccccccccgtgctgagcccccccagaagccccatctaccccctgagcgacagcgagaccagcgcctgcagataccccagccacagcagcagcagagtgctgctgaaggacagacacccccccgcccccagcccccagaacccccaggaccccagccccgacaccagcccccccacctgccccttcaagaccgccagcttcggctacctggacagaagccccagcgcctgcaagagagacgcccagaaggagagcgtgcagggcgccgcccaggacgtggccggcgtggccgcctgcctgcccctggcccagagcacccccttccccggccccgccgccggccccagaggcgtgctgctgaccagatag

SEQ ID NO: 101243 - DNA, 540 bp, synthetic construct
  misc_feature 1..540: note = Description of Artificial Sequence: Synthetic coding sequence
  source 1..540: mol_type = other DNA
atgtggagcccccaggacagaaagtacaacagcccccccacccagctgagcctgaagcccaacagccagagcctgagaagcggcaactggagcgagagaaagagccacagactgcccagactgcccaagagacacagccacgacgacatgctgctgctggcccagctgagcctgcccagcagccccagcagcctgaacgaggacagcctgagcaccaccagcgagctgctgagcagcagaagagccagaagaatccccaagctggtgcagagaatcaacagcatctacaacgccaagagaggcaagaagagactgaagaagctgagcatgagcagcatcgagaccgccagcctgagagacgagaacagcgagagcgagagcgacagcgacgacagattcaaggcccacacccagagactggtgcacatccagagcatgctgaagagagcccccagctacagaaccctggagctggagctgctggagtggcaggagagagagctgttcgagtacttcgtggtggtgagcctgaagaagtag

SEQ ID NO: 101244 - DNA, 2154 bp, synthetic construct; identical to SEQ ID NO: 101236
  misc_feature 1..2154: note = Description of Artificial Sequence: Synthetic coding sequence
  source 1..2154: mol_type = other DNA

SEQ ID NO: 101245 - DNA, 411 bp, synthetic construct
  misc_feature 1..411: note = Description of Artificial Sequence: Synthetic coding sequence
  source 1..411: mol_type = other DNA
atgaccatgaccgccaacaagaacagcagcatcacccacggcgccggcggcaccaaggcccccagaggcaccctgagcagaaagagcttcgagttcgaggacgccagcagcctgcagagcctgtaccccagcagccccaccgagaacggcaccgagaaccagcccaagttcggcagcaagagcaccctggaggagaacgcctacgaggacatcgtgggcgacctgcccaaggagaacccctacgaggacgtggacctgaagagcagaagagccggcagaaagagccagcagctgagcgagaacagcctggacagcctgcacagaatgtggagcccccaggacagaaagtacaacagcccccccacccagctgagcctgaagcccaacagccagagcctgagaagcggctag

SEQ ID NO: 101246 - DNA, 225 bp, synthetic construct
  misc_feature 1..225: note = Description of Artificial Sequence: Synthetic coding sequence
  source 1..225: mol_type = other DNA
atgaccatgaccgccaacaagaacagcagcatcacccacggcgccggcggcaccaaggcccccagaggcaccctgagcagaagccagagcgtgagccccccccccgtgctgagcccccccagaagccccatctaccccctgagcgacagcgagaccagcgcctgcagataccccagccacagcagcagcagagtgctgctgaaggacagacacccccccgcctag

SEQ ID NO: 101247 - DNA, 420 bp, synthetic construct
  misc_feature 1..420: note = Description of Artificial Sequence: Synthetic coding sequence
  source 1..420: mol_type = other DNA
atgaccatgaccgccaacaagaacagcagcatcacccacggcgccggcggcaccaaggcccccagaggcaccctgagcagaagccagagcgtgagccccccccccgtgctgagcccccccagaagccccatctaccccctgagcgacagcgagaccagcgcctgcagataccccagccacagcagcagcagagtgctgctgaaggacagacacccccccgcccccagcccccagaacccccaggaccccagccccgacaccagcccccccacctgccccttcaagaccgccagcttcggctacctggacagaagccccagcgcctgcaagagagacgcccagaaggagagcgtgcagggcgccgcccaggacgtggccggcgtggccgcctgcctgcccctggcccagagcaccccctag

SEQ ID NO: 101248 - DNA, 1830 bp, synthetic construct
  misc_feature 1..1830: note = Description of Artificial Sequence: Synthetic coding sequence
  source 1..1830: mol_type = other DNA
atgtggagcccccaggacagaaagtacaacagcccccccacccagctgagcctgaagcccaacagccagagcctgagaagcggcaactggagcgagagaaagagccacagactgcccagactgcccaagagacacagccacgacgacatgctgctgctggcccagctgagcctgcccagcagccccagcagcctgaacgaggacagcctgagcaccaccagcgagctgctgagcagcagaagagccagaagaatccccaagctggtgcagagaatcaacagcatctacaacgccaagagaggcaagaagagactgaagaagctgagcatgagcagcatcgagaccgccagcctgagagacgagaacagcgagagcgagagcgacagcgacgacagattcaaggcccacacccagagactggtgcacatccagagcatgctgaagagagcccccagctacagaaccctggagctggagctgctggagtggcaggagagagagctgttcgagtacttcgtggtggtgagcctgaagaagaagcccagcagaaacacctacctgcccgaggtgagctaccagttccccaagctggacagacccaccaagcagatgagagaggccgaggagagactgaaggccatcccccagttctgcttccccgacgccaaggactggctgcccgtgagcgagtacagcagcgagaccttcagcttcatgctgaccggcgaggacggcagcagaagattcggctactgcagaagactgctgcccagcggcaagggccccagactgcccgaggtgtactgcgtgatcagcagactgggctgcttcggcctgttcagcaaggtgctggacgaggtggagagaagaagaggcatcagcgccgccctggtgtaccccttcatgagaagcctgatggagagccccttccccgcccccggcaagaccatcaaggtgaagaccttcctgcccggcgccggcaacgaggtgctggagctgagaagacccatggacagcagactggagcacgtggacttcgagtgcctgttcacctgcctgagcgtgagacagctgatcagaatcttcgccagcctgctgctggagagaagagtgatcttcgtggccgacaagctgagcaccctgagcagctgcagccacgccgtggtggccctgctgtaccccttcagctggcagcacaccttcatccccgtgctgcccgccagcatgatcgacatcgtgtgctgccccacccccttcctggtgggcctgctgagcagcagcctgcccaagctgaaggagctgcccgtggaggaggccctgatggtgaacctgggcagcgacagattcatcagacagatggacgacgaggacaccctgctgcccagaaagctgcaggccgccctggagcaggccctggagagaaagaacgagctgatcagccaggacagcgacagcgacagcgacgacgagtgcaacaccctgaacggcctggtgagcgaggtgttcatcagattcttcgtggagaccgtgggccactacagcctgttcctgacccagagcgagaagggcgagagagccttccagagagaggccttcagaaagagcgtggccagcaagagcatcagaagattcctggaggtgttcatggagagccagatgttcgccggcttcatccaggacagagagctgagaaagtgcagagccaagggcctgttcgagcagagagtggagcagtacctggaggagctgcccgacaccgagcagagcggcatgaacaagttcctgagaggcctgggcaacaagatgaagttcctgcacaagaagaactag

SEQ ID NO: 101249 - DNA, 234 bp, synthetic construct
  misc_feature 1..234: note = Description of Artificial Sequence: Synthetic coding sequence
  source 1..234: mol_type = other DNA
atgaccatgaccgccaacaagaacagcagcatcacccacggcgccggcggcaccaaggcccccagaggcaccctgagcagaaagagcttcgagttcgaggacgccagcagcctgcagagcctgtaccccagcagccccaccgagaacggcaccgagaaccagcccaagttcggcagcaagagcaccctggaggagaacgcctacgaggacatcgtgggcgacctgcccaagtag

SEQ ID NO: 101250 - DNA, 81 bp, synthetic construct
  misc_feature 1..81: note = Description of Artificial Sequence: Synthetic coding sequence
  source 1..81: mol_type = other DNA
atgaccatgaccgccaacaagaacagcagcatcacccacggcgccggcggcaccaaggcccccagaggcaccctgagctag

SEQ ID NO: 101251 - DNA, 1035 bp, synthetic construct
  misc_feature 1..1035: note = Description of Artificial Sequence: Synthetic coding sequence
  source 1..1035: mol_type = other DNA
atgtggagcccccaggacagaaagtacaacagcccccccacccagctgagcctgaagcccaacagccagagcctgagaagcggcaactggagcgagagaaagagccacagactgcccagactgcccaagagacacagccacgacgacatgctgctgctggcccagctgagcctgcccagcagccccagcagcctgaacgaggacagcctgagcaccaccagcgagctgctgagcagcagaagagccagaagaatccccaagctggtgcagagaatcaacagcatctacaacgccaagagaggcaagaagagactgaagaagctgagcatgagcagcatcgagaccgccagcctgagagacgagaacagcgagagcgagagcgacagcgacgacagattcaaggcccacacccagagactggtgcacatccagagcatgctgaagagagcccccagctacagaaccctggagctggagctgctggagtggcaggagagagagctgttcgagtacttcgtggtggtgagcctgaagaagaagcccagcagaaacacctacctgcccgaggtgagctaccagttccccaagctggacagacccaccaagcagatgagagaggccgaggagagactgaaggccatcccccagttctgcttccccgacgccaaggactggctgcccgtgagcgagtacagcagcgagaccttcagcttcatgctgaccggcgaggacggcagcagaagattcggctactgcagaagactgctgcccagcggcaagggccccagactgcccgaggtgtactgcgtgatcagcagactgggctgcttcggcctgttcagcaaggtgctggacgaggtggagagaagaagaggcatcagcgccgccctggtgtaccccttcatgagaagcctgatggagagccccttccccgcccccggcaagaccatcaaggtgaagaccttcctgcccggcgccggcaacgaggtgctggagctgagaagacccatggacagcagactggagcacgtgtag

SEQ ID NO: 101252 - DNA, 231 bp, synthetic construct
  misc_feature 1..231: note = Description of Artificial Sequence: Synthetic coding sequence
  source 1..231: mol_type = other DNA
atgaccatgaccgccaacaagaacagcagcatcacccacggcgccggcggcaccaaggcccccagaggcaccctgagcagaaagagcttcgagttcgaggacgccagcagcctgcagagcctgtaccccagcagccccaccgagaacggcaccgagaaccagcccaagttcggcagcaagagcaccctggaggagaacgcctacgaggacatcgtgggcgacctgccctag

SEQ ID NO: 101253 - DNA, 225 bp, synthetic construct; identical to SEQ ID NO: 101246
  misc_feature 1..225: note = Description of Artificial Sequence: Synthetic coding sequence
  source 1..225: mol_type = other DNA

SEQ ID NO: 101254 - DNA, 435 bp, synthetic construct
  misc_feature 1..435: note = Description of Artificial Sequence: Synthetic coding sequence
  source 1..435: mol_type = other DNA
atgaccatgaccgccaacaagaacagcagcatcacccacggcgccggcggcaccaaggcccccagaggcaccctgagcagaagccagagcgtgagccccccccccgtgctgagcccccccagaagccccatctaccccctgagcgacagcgagaccagcgcctgcagataccccagccacagcagcagcagagtgctgctgaaggacagacacccccccgcccccagcccccagaacccccaggaccccagccccgacaccagcccccccacctgccccttcaagaccgccagcttcggctacctggacagaagccccagcgcctgcaagagagacgcccagaaggagagcgtgcagggcgccgcccaggacgtggccggcgtggccgcctgcctgcccctggcccagagcacccccttccccggccccgcctag

SEQ ID NO: 101255 - DNA, 3414 bp, synthetic construct; identical to SEQ ID NO: 101227
  misc_feature 1..3414: note = Description of Artificial Sequence: Synthetic coding sequence
  source 1..3414: mol_type = other DNA

SEQ ID NO: 101256 - DNA, 369 bp, synthetic construct
  misc_feature 1..369: note = Description of Artificial Sequence: Synthetic coding sequence
  source 1..369: mol_type = other DNA
atgaccatgaccgccaacaagaacagcagcatcacccacggcgccggcggcaccaaggcccccagaggcaccctgagcagaagccagagcgtgagccccccccccgtgctgagcccccccagaagccccatctaccccctgagcgacagcgagaccagcgcctgcagataccccagccacagcagcagcagagtgctgctgaaggacagacacccccccgcccccagcccccagaacccccaggaccccagccccgacaccagcccccccacctgccccttcaagaccgccagcttcggctacctggacagaagccccagcgcctgcaagagagacgcccagaaggagagcgtgcagggcgccgcctag

SEQ ID NO: 101257 - DNA, 93 bp, synthetic construct
  misc_feature 1..93: note = Description of Artificial Sequence: Synthetic coding sequence
  source 1..93: mol_type = other DNA
atgaccatgaccgccaacaagaacagcagcatcacccacggcgccggcggcaccaaggcccccagaggcaccctgagcagaagccagagctag

SEQ ID NO: 101258 - DNA, 1758 bp, synthetic construct
  misc_feature 1..1758: note = Description of Artificial Sequence: Synthetic coding sequence
  source 1..1758: mol_type = other DNA
atggccgaggccgccaccggcttcctggagcagctgaagagctgcatcgtgtggagctggacctacctgtggaccgtgtggttcttcatcgtgctgttcctggtgtacatcctgagagtgcccctgaagatcaacgacaacctgagcaccgtgagcatgttcctgaacaccctgacccccaagttctacgtggccctgaccggcaccagcagcctgatcagcggcctgatcctgatcttcgagtggtggtacttcagaaagtacggcaccagcttcatcgagcaggtgagcgtgagccacctgagacccctgctgggcggcgtggacaacaacagcagcaacaacagcaacagcagcaacggcgacagcgacagcaacagacagagcgtgagcgagtgcaaggtgtggagaaaccccctgaacctgttcagaggcgccgagtacaacagatacacctgggtgaccggcagagagcccctgacctactacgacatgaacctgagcgcccaggaccaccagaccttcttcacctgcgacagcgaccacctgagacccgccgacgccatcatgcagaaggcctggagagagagaaacccccaggccagaatcagcgccgcccacgaggccctggagatcaacgagatcagaagcagagtggaggtgcccctgatcgccagcagcaccatctgggagatcaagctgctgcccaagtgcgccaccgcctacatcctgctggccgaggaggaggccaccaccatcgccgaggccgagaagctgttcaagcaggccctgaaggccggcgacggctgctacagaagaagccagcagctgcagcaccacggcagccagtacgaggcccagcacagaagagacaccaacgtgctggtgtacatcaagagaagactggccatgtgcgccagaagactgggcagaaccagagaggccgtgaagatgatgagagacctgatgaaggagttccccctgctgagcatgttcaacatccacgagaacctgctggaggccctgctggagctgcaggcctacgccgacgtgcaggccgtgctggccaagtacgacgacatcagcctgcccaagagcgccaccatctgctacaccgccgccctgctgaaggccagagccgtgagcgacaagttcagccccgaggccgccagcagaagaggcctgagcaccgccgagatgaacgccgtggaggccatccacagagccgtggagttcaacccccacgtgcccaagtacctgctggagatgaagagcctgatcctgccccccgagcacatcctgaagagaggcgacagcgaggccatcgcctacgccttcttccacctggcccactggaagagagtggagggcgccctgaacctgctgcactgcacctgggagggcaccttcagaatgatcccctaccccctggagaagggccacctgttctacccctaccccatctgcaccgagaccgccgacagagagctgctgcccagcttccacgaggtgagcgtgtaccccaagaaggagctgcccttcttcatcctgttcaccgccggcctgtgcagcttcaccgccatgctggccctgctgacccaccagttccccgagctgatgggcgtgttcgccaaggccatgatcgacatcttctgcagcgccgagttcagagactggaactgcaagagcatcttcatgagagtggaggacgagctggagatcccccccgccccccagagccagcacttccagaactag

SEQ ID NO: 101259 - DNA, 1500 bp, synthetic construct
  misc_feature 1..1500: note = Description of Artificial Sequence: Synthetic coding sequence
  source 1..1500: mol_type = other DNA
atgagcatgttcctgaacaccctgacccccaagttctacgtggccctgaccggcaccagcagcctgatcagcggcctgatcctgatcttcgagtggtggtacttcagaaagtacggcaccagcttcatcgagcaggtgagcgtgagccacctgagacccctgctgggcggcgtggacaacaacagcagcaacaacagcaacagcagcaacggcgacagcgacagcaacagacagagcgtgagcgagtgcaaggtgtggagaaaccccctgaacctgttcagaggcgccgagtacaacagatacacctgggtgaccggcagagagcccctgacctactacgacatgaacctgagcgcccaggaccaccagaccttcttcacctgcgacagcgaccacctgagacccgccgacgccatcatgcagaaggcctggagagagagaaacccccaggccagaatcagcgccgcccacgaggccctggagatcaacgagtgcgccaccgcctacatcctgctggccgaggaggaggccaccaccatcgccgaggccgagaagctgttcaagcaggccctgaaggccggcgacggctgctacagaagaagccagcagctgcagcaccacggcagccagtacgaggcccagcacagaagagacaccaacgtgctggtgtacatcaagagaagactggccatgtgcgccagaagactgggcagaaccagagaggccgtgaagatgatgagagacctgatgaaggagttccccctgctgagcatgttcaacatccacgagaacctgctggaggccctgctggagctgcaggcctacgccgacgtgcaggccgtgctggccaagtacgacgacatcagcctgcccaagagcgccaccatctgctacaccgccgccctgctgaaggccagagccgtgagcgacaagttcagccccgaggccgccagcagaagaggcctgagcaccgccgagatgaacgccgtggaggccatccacagagccgtggagttcaacccccacgtgcccaagtacctgctggagatgaagagcctgatcctgccccccgagcacatcctgaagagaggcgacagcgaggccatcgcctacgccttcttccacctggcccactggaagagagtggagggcgccctgaacctgctgcacagcttcagaatgatcccctaccccctggagaagggccacctgttctacccctaccccatctgcaccgagaccgccgacagagagctgctgcccagcttccacgaggtgagcgtgtaccccaagaaggagctgcccttcttcatcctgttcaccgccggcctgtgcagcttcaccgccatgctggccctgctgacccaccagttccccgagctgatgggcgtgttcgccaaggccttcctgagcaccctgttcgcccccctgaacttcgtgatggagaaggtggagagcatcctgcccagcagcctgtggcaccagctgaccagaatctag

SEQ ID NO: 101260 - DNA, 1536 bp, synthetic construct
  misc_feature 1..1536: note = Description of Artificial Sequence: Synthetic coding sequence
  source 1..1536: mol_type = other DNA
atgttcggcaccgagagcagcctgagcatgttcctgaacaccctgacccccaagttctacgtggccctgaccggcaccagcagcctgatcagcggcctgatcctgatcttcgagtggtggtacttcagaaagtacggcaccagcttcatcgagcaggtgagcgtgagccacctgagacccctgctgggcggcgtggacaacaacagcagcaacaacagcaacagcagcaacggcgacagcgacagcaacagacagagcgtgagcgagtgcaaggtgtggagaaaccccctgaacctgttcagaggcgccgagtacaacagatacacctgggtgaccggcagagagcccctgacctactacgacatgaacctgagcgcccaggaccaccagaccttcttcacctgcgacagcgaccacctgagacccgccgacgccatcatgcagaaggcctggagagagagaaacccccaggccagaatcagcgccgcccacgaggccctggagatcaacgagtgcgccaccgcctacatcctgctggccgaggaggaggccaccaccatcgccgaggccgagaagctgttcaagcaggccctgaaggccggcgacggctgctacagaagaagccagcagctgcagcaccacggcagccagtacgaggcccagcacagaagagacaccaacgtgctggtgtacatcaagagaagactggccatgtgcgccagaagactgggcagaaccagagaggccgtgaagatgatgagagacctgatgaaggagttccccctgctgagcatgttcaacatccacgagaacctgctggaggccctgctggagctgcaggcctacgccgacgtgcaggccgtgctggccaagtacgacgacatcagcctgcccaagagcgccaccatctgctacaccgccgccctgctgaaggccagagccgtgagcgacaagttcagccccgaggccgccagcagaagaggcctgagcaccgccgagatgaacgccgtggaggccatccacagagccgtggagttcaacccccacgtgcccaagtacctgctggagatgaagagcctgatcctgccccccgagcacatcctgaagagaggcgacagcgaggccatcgcctacgccttcttccacctggcccactggaagagagtggagggcgccctgaacctgctgcactgcacctgggagggcaccttcagaatgatcccctaccccctggagaagggccacctgttctacccctaccccatctgcaccgagaccgccgacagagagctgctgcccagcttccacgaggtgagcgtgtaccccaagaaggagctgcccttcttcatcctgttcaccgccggcctgtgcagcttcaccgccatgctggccctgctgacccaccagttccccgagctgatgggcgtgttcgccaaggccttcctgagcaccctgttcgcccccctgaacttcgtgatggagaaggtggagagcatcctgcccagcagcctgtggcaccagctgaccagaatctag

SEQ ID NO: 101261 - DNA, 1605 bp, synthetic construct
  misc_feature 1..1605: note = Description of Artificial Sequence: Synthetic coding sequence
  source 1..1605: mol_type = other DNA
atgttcggcaccgagagcagcctgagcatgttcctgaacaccctgacccccaagttctacgtggccctgaccggcaccagcagcctgatcagcggcctgatcctgatcttcgagtggtggtacttcagaaagtacggcaccagcttcatcgagcaggtgagcgtgagccacctgagacccctgctgggcggcgtggacaacaacagcagcaacaacagcaacagcagcaacggcgacagcgacagcaacagacagagcgtgagcgagtgcaaggtgtggagaaaccccctgaacctgttcagaggcgccgagtacaacagatacacctgggtgaccggcagagagcccctgacctactacgacatgaacctgagcgcccaggaccaccagaccttcttcacctgcgacagcgaccacctgagacccgccgacgccatcatgcagaaggcctggagagagagaaacccccaggccagaatcagcgccgcccacgaggccctggagatcaacgagatcagaagcagagtggaggtgcccctgatcgccagcagcaccatctgggagatcaagctgctgcccaagtgcgccaccgcctacatcctgctggccgaggaggaggccaccaccatcgccgaggccgagaagctgttcaagcaggccctgaaggccggcgacggctgctacagaagaagccagcagctgcagcaccacggcagccagtacgaggcccagcacagaagagacaccaacgtgctggtgtacatcaagagaagactggccatgtgcgccagaagactgggcagaaccagagaggccgtgaagatgatgagagacctgatgaaggagttccccctgctgagcatgttcaacatccacgagaacctgctggaggccctgctggagctgcaggcctacgccgacgtgcaggccgtgctggccaagtacgacgacatcagcctgcccaagagcgccaccatctgctacaccgccgccctgctgaaggccagagccgtgagcgacaagttcagccccgaggccgccagcagaagaggcctgagcaccgccgagatgaacgccgtggaggccatccacagagccgtggagttcaacccccacgtgcccaagtacctgctggagatgaagagcctgatcctgccccccgagcacatcctgaagagaggcgacagcgaggccatcgcctacgccttcttccacctggcccactggaagagagtggagggcgccctgaacctgctgcactgcacctgggagggcaccttcagaatgatcccctaccccctggagaagggccacctgttctacccctaccccatctgcaccgagaccgccgacagagagctgctgcccagcttccacgaggtgagcgtgtaccccaagaaggagctgcccttcttcatcctgttcaccgccggcctgtgcagcttcaccgccatgctggccctgctgacccaccagttccccgagctgatgggcgtgttcgccaaggccttcctgagcaccctgttcgcccccctgaacttcgtgatggagaaggtggagagcatcctgcccagcagcctgtggcaccagctgaccagaatctag

SEQ ID NO: 101262 - DNA, 1665 bp, synthetic construct
  misc_feature 1..1665: note = Description of Artificial Sequence: Synthetic coding sequence
  source 1..1665: mol_type = other DNA
atggccgaggccgccaccggcttcctggagcagctgaagagctgcatcgtgtggagctggacctacctgtggaccgtgtggttcttcatcgtgctgttcctggtgtacatcctgagagtgcccctgaagatcaacgacaacctgagcaccgtgagcatgttcctgaacaccctgacccccaagttctacgtggccctgaccggcaccagcagcctgatcagcggcctgatcctgatcttcgagtggtggtacttcagaaagtacggcaccagcttcatcgagcaggtgagcgtgagccacctgagacccctgctgggcggcgtggacaacaacagcagcaacaacagcaacagcagcaacggcgacagcgacagcaacagacagagcgtgagcgagtgcaaggtgtggagaaaccccctgaacctgttcagaggcgccgagtacaacagatacacctgggtgaccggcagagagcccctgacctactacgacatgaacctgagcgcccaggaccaccagaccttcttcacctgcgacagcgaccacctgagacccgccgacgccatcatgcagaaggcctggagagagagaaacccccaggccagaatcagcgccgcccacgaggccctggagatcaacgagtgcgccaccgcctacatcctgctggccgaggaggaggccaccaccatcgccgaggccgagaagctgttcaagcaggccctgaaggccggcgacggctgctacagaagaagccagcagctgcagcaccacggcagccagtacgaggcccagcacagaagagacaccaacgtgctggtgtacatcaagagaagactggccatgtgcgccagaagactgggcagaaccagagaggccgtgaagatgatgagagacctgatgaaggagttccccctgctgagcatgttcaacatccacgagaacctgctggaggccctgctggagctgcaggcctacgccgacgtgcaggccgtgctggccaagtacgacgacatcagcctgcccaagagcgccaccatctgctacaccgccgccctgctgaaggccagagccgtgagcgacaagttcagccccgaggccgccagcagaagaggcctgagcaccgccgagatgaacgccgtggaggccatccacagagccgtggagttcaacccccacgtgcccaagtacctgctggagatgaagagcctgatcctgccccccgagcacatcctgaagagaggcgacagcgaggccatcgcctacgccttcttccacctggcccactggaagagagtggagggcgccctgaacctgctgcactgcacctgggagggcaccttcagaatgatcccctaccccctggagaagggccacctgttctacccctaccccatctgcaccgagaccgccgacagagagctgctgcccagcttccacgaggtgagcgtgtaccccaagaaggagctgcccttcttcatcctgttcaccgccggcctgtgcagcttcaccgccatgctggccctgctgacccaccagttccccgagctgatgggcgtgttcgccaaggccttcctgagcaccctgttcgcccccctgaacttcgtgatggagaaggtggagagcatcctgcccagcagcctgtggcaccagctgaccagaatctag

SEQ ID NO: 101263 - DNA, 189 bp, synthetic construct
  misc_feature 1..189: note = Description of Artificial Sequence: Synthetic coding sequence
  source 1..189: mol_type = other DNA
atgagcatgttcctgaacaccctgacccccaagttctacgtggccctgaccggcaccagcagcctgatcagcggcctgatcctgatcttcgagtggtggtacttcagaaagtacggcaccagcttcatcgagcaggtgagcgtgagccacctgagacccctgctgggcggcgtggacaacaacagctag

SEQ ID NO: 101264 - DNA, 264 bp, synthetic construct
  misc_feature 1..264: note = Description of Artificial Sequence: Synthetic coding sequence
  source 1..264: mol_type = other DNA
atgagcatgttcctgaacaccctgacccccaagttctacgtggccctgaccggcaccagcagcctgatcagcggcctgatcctgatcttcgagtggtggtacttcagaaagtacggcaccagcttcatcgagcaggtgagcgtgagccacctgagacccctgctgggcggcgtggacaacaacagcagcaacaacagcaacagcagcaacggcgacagcgacagcaacagacagagcgtgagcgagtgcaaggtgtggagatag

SEQ ID NO: 101265 - DNA, 1323 bp, synthetic construct
  misc_feature 1..1323: note = Description of Artificial Sequence: Synthetic coding sequence
  source 1..1323: mol_type = other DNA
atggccgagaacaacgagaacatcagcaagaacgtggacgtgagacccaagaccagcagaagcagaagcgccgacagaaaggacggctacgtgtggagcggcaagaagctgagctggagcaagaagagcgagagctacagcgacgccgagaccgtgaacggcatcgagaagaccgaggtgagcctgagaaaccaggagagaaagcacagctgcagcagcatcgagctggacctggaccacagctgcggccacagattcctgggcagaagcctgaagcagaagctgcaggacgccgtgggccagtgcttccccatcaagaactgcagcagcagacacagcagcggcctgcccagcaagagaaagatccacatcagcgagctgatgctggacaagtgccccttcccccccagaagcgacctggccttcagatggcacttcatcaagagacacaccgcccccatcaacagcaagagcgacgagtgggtgagcaccgacctgagccagaccgagctgagagacggccagctgaagagaagaaacatggaggagaacatcaactgcttcagccacaccaacgtgcagccctgcgtgatcaccaccgacaacgccctgtgcagagagggccccatgaccggcagcgtgatgaacctggtgagcaacaacagcatcgaggacagcgacatggacagcgacgacgagatcctgaccctgtgcaccagcagcagaaagagaaacaagcccaagtgggacctggacgacgagatcctgcagctggagaccccccccaagtaccacacccagatcgactacgtgcactgcctggtgcccgacctgctgcagatcaacaacaacccctgctactggggcgtgatggacaagtacgccgccgaggccctgctggagggcaagcccgagggcaccttcctgctgagagacagcgcccaggaggactacctgttcagcgtgagcttcagaagatacagcagaagcctgcacgccagaatcgagcagtggaaccacaacttcagcttcgacgcccacgacccctgcgtgttccacagccccgacatcaccggcctgctggagcactacaaggaccccagcgcctgcatgttcttcgagcccctgctgagcacccccctgatcagaaccttccccttcagcctgcagcacatctgcagaaccgtgatctgcaactgcaccacctacgacggcatcgacgccctgcccatccccagcagcatgaagctgtacctgaaggagtaccactacaagagcaaggtgagagtgctgagaatcgacgcccccgagcagcagtgctag

SEQ ID NO: 101266 - DNA, 1323 bp, synthetic construct; identical to SEQ ID NO: 101265
  misc_feature 1..1323: note = Description of Artificial Sequence: Synthetic coding sequence
  source 1..1323: mol_type = other DNA

SEQ ID NO: 101267 - DNA, 1323 bp, synthetic construct; identical to SEQ ID NO: 101265
  misc_feature 1..1323: note = Description of Artificial Sequence: Synthetic coding sequence
  source 1..1323: mol_type = other DNA

SEQ ID NO: 101268 - DNA, 1611 bp, synthetic construct
  misc_feature 1..1611: note = Description of Artificial Sequence: Synthetic coding sequence
  source 1..1611: mol_type = other DNA
atggacaaggtgggcaagatgtggaacaacttcaagtacagatgccagaacctgttcggccacgagggcggcagcagaagcgagaacgtggacatgaacagcaacagatgcctgagcgtgaaggagaagaacatcagcatcggcgacagcaccccccagcagcagagcagccccctgagagagaacatcgccctgcagctgggcctgagccccagcaagaacagcagcagaagaaaccagaactgcgccaccgagatcccccagatcgtggagatcagcatcgagaaggacaacgacagctgcgtgacccccggcaccagactggccagaagagacagctacagcagacacgccccctggggcggcaagaagaagcacagctgcagcaccaagacccagagcagcctggacgccgacaagaagttcggcagaaccagaagcggcctgcagagaagagagagaagatacggcgtgagcagcgtgcacgacatggacagcgtgagcagcagaaccgtgggcagcagaagcctgagacagagactgcaggacaccgtgggcctgtgcttccccatgagaacctacagcaagcagagcaagcccctgttcagcaacaagagaaagatccacctgagcgagctgatgctggagaagtgccccttccccgccggcagcgacctggcccagaagtggcacctgatcaagcagcacaccgcccccgtgagcccccacagcaccttcttcgacaccttcgaccccagcctggtgagcaccgaggacgaggaggacagactgagagagagaagaagactgagcatcgaggagggcgtggaccccccccccaacgcccagatccacaccttcgaggccaccgcccaggtgaaccccctgtacaagctgggccccaagctggcccccggcatgaccgagatcagcggcgacagcagcgccatcccccaggccaactgcgacagcgaggaggacaccaccaccctgtgcctgcagagcagaagacagaagcagagacagatcagcggcgacagccacacccacgtgagcagacagggcgcctggaaggtgcacacccagatcgactacatccactgcctggtgcccgacctgctgcagatcaccggcaacccctgctactggggcgtgatggacagatacgaggccgaggccctgctggagggcaagcccgagggcaccttcctgctgagagacagcgcccaggaggactacctgttcagcgtgagcttcagaagatacaacagaagcctgcacgccagaatcgagcagtggaaccacaacttcagcttcgacgcccacgacccctgcgtgttccacagcagcaccgtgaccggcctgctggagcactacaaggaccccagcagctgcatgttcttcgagcccctgctgaccatcagcctgaacagaaccttccccttcagcctgcagtacatctgcagagccgtgatctgcagatgcaccacctacgacggcatcgacggcctgcccctgcccagcatgctgcaggacttcctgaaggagtaccactacaagcagaaggtgagagtgagatggctggagagagagcccgtgaaggccaagtag

SEQ ID NO: 101269 - DNA, 1611 bp, synthetic construct; identical to SEQ ID NO: 101268
  misc_feature 1..1611: note = Description of Artificial Sequence: Synthetic coding sequence
  source 1..1611: mol_type = other DNA

SEQ ID NO: 101270 - DNA, 3264 bp, synthetic construct
  misc_feature 1..3264: note = Description of Artificial Sequence: Synthetic coding sequence
  source 1..3264: mol_type = other DNA
atgagcgacagcgaggacagcaacttcagcgaggaggaggacagcgagagaagcagcgacggcgaggaggccgaggtggacgaggagagaagaagcgccgccggcagcgagaaggaggaggagcccgaggacgaggaggaggaggaggaggaggaggagtacgacgaggaggaggaggaggaggacgacgacagaccccccaagaagcccagacacggcggcttcatcctggacgaggccgacgtggacgacgagtacgaggacgaggaccagtgggaggacggcgccgaggacatcctggagaaggaggagatcgaggccagcaacatcgacaacgtggtgctggacgaggacagaagcggcgccagaagactgcagaacctgtggagagaccagagagaggaggagctgggcgagtactacatgaagaagtacgccaagagcagcgtgggcgagaccgtgtacggcggcagcgacgagctgagcgacgacatcacccagcagcagctgctgcccggcgtgaaggaccccaacctgtggaccgtgaagtgcaagatcggcgaggagagagccaccgccatcagcctgatgagaaagttcatcgcctaccagttcaccgacacccccctgcagatcaagagcgtggtggcccccgagcacgtgaagggctacatctacgtggaggcctacaagcagacccacgtgaagcaggccatcgagggcgtgggcaacctgagactgggctactggaaccagcagatggtgcccatcaaggagatgaccgacgtgctgaaggtggtgaaggaggtggccaacctgaagcccaagagctgggtgagactgaagagaggcatctacaaggacgacatcgcccaggtggactacgtggagcccagccagaacaccatcagcctgaagatgatccccagaatcgactacgacagaatcaaggccagaatgagcctgaaggactggttcgccaagagaaagaagttcaagagacccccccagagactgttcgacgccgagaagatcagaagcctgggcggcgacgtggccagcgacggcgacttcctgatcttcgagggcaacagatacagcagaaagggcttcctgttcaagagcttcgccatgagcgccgtgatcaccgagggcgtgaagcccaccctgagcgagctggagaagttcgaggaccagcccgagggcatcgacctggaggtggtgaccgagagcaccggcaaggagagagagcacaacttccagcccggcgacaacgtggaggtgtgcgagggcgagctgatcaacctgcagggcaagatcctgagcgtggacggcaacaagatcaccatcatgcccaagcacgaggacctgaaggacatgctggagttccccgcccaggagctgagaaagtacttcaagatgggcgaccacgtgaaggtgatcgccggcagattcgagggcgacaccggcctgatcgtgagagtggaggagaacttcgtgatcctgttcagcgacctgaccatgcacgagctgaaggtgctgcccagagacctgcagctgtgcagcgagaccgccagcggcgtggacgtgggcggccagcacgagtggggcgagctggtgcagctggacccccagaccgtgggcgtgatcgtgagactggagagagagaccttccaggtgctgaacatgtacggcaaggtggtgaccgtgagacaccaggccgtgaccagaaagaaggacaacagattcgccgtggccctggacagcgagcagaacaacatccacgtgaaggacatcgtgaaggtgatcgacggcccccacagcggcagagagggcgagatcagacacctgttcagaagcttcgccttcctgcactgcaagaagctggtggagaacggcggcatgttcgtgtgcaagaccagacacctggtgctggccggcggcagcaagcccagagacgtgaccaacttcaccgtgggcggcttcgcccccatgagccccagaatcagcagccccatgcaccccagcgccggcggccagagaggcggcttcggcagccccggcggcggcagcggcggcatgagcagaggcagaggcagaagagacaacgagctgatcggccagaccgtgagaatcagccagggcccctacaagggctacatcggcgtggtgaaggacgccaccgagagcaccgccagagtggagctgcacagcacctgccagaccatcagcgtggacagacagagactgaccaccgtgggcagcagaagacccggcggcatgaccagcacctacggcagaacccccatgtacggcagccagacccccatgtacggcagcggcagcagaacccccatgtacggcagccagacccccctgcaggacggcagcagaaccccccactacggcagccagacccccctgcacgacggcagcagaacccccgcccagagcggcgcctgggaccccaacaaccccaacacccccagcagagccgaggaggagtacgagtacgccttcgacgacgagcccacccccagcccccaggcctacggcggcacccccaacccccagacccccggctaccccgaccccagcagcccccaggtgaacccccagtacaacccccagacccccggcacccccgccatgtacaacaccgaccagttcagcccctacgccgcccccagcccccagggcagctaccagcccagccccagcccccagagctaccaccaggtggcccccagccccgccggctaccagaacacccacagccccgccagctaccaccccacccccagccccatggcctaccaggccagccccagccccagccccgtgggctacagccccatgacccccggcgcccccagccccggcggctacaacccccacacccccggcagcggcatcgagcagaacagcagcgactgggtgaccaccgacatccaggtgaaggtgagagacacctacctggacacccaggtggtgggccagaccggcgtgatcagaagcgtgaccggcggcatgtgcagcgtgtacctgaaggacagcgagaaggtggtgagcatcagcagcgagcacctggagcccatcacccccaccaagaacaacaaggtgaaggtgatcctgggcgaggacagagaggccaccggcgtgctgctgagcatcgacggcgaggacggcatcgtgagaatggacctggacgagcagctgaagatcctgaacctgagattcctgggcaagctgctggaggcctag

SEQ ID NO: 101271 - DNA, 3198 bp, synthetic construct
  misc_feature 1..3198: note = Description of Artificial Sequence: Synthetic coding sequence
  source 1..3198: mol_type = other DNA
atgagcgacagcgaggacagcaacttcagcgaggaggaggacagcgagagaagcagcgacggcgaggaggccgaggtggacgaggagagaagaagcgccgccggcagcgagaaggaggacgacgacagaccccccaagaagcccagacacggcggcttcatcctggacgaggccgacgtggacgacgagtacgaggacgaggaccagtgggaggacggcgccgaggacatcctggagaaggaggagatcgaggccagcaacatcgacaacgtggtgctggacgaggacagaagcggcgccagaagactgcagaacctgtggagagaccagagagaggaggagctgggcgagtactacatgaagaagtacgccaagagcagcgtgggcgagaccgtgtacggcggcagcgacgagctgagcgacgacatcacccagcagcagctgctgcccggcgtgaaggaccccaacctgtggaccgtgaagtgcaagatcggcgaggagagagccaccgccatcagcctgatgagaaagttcatcgcctaccagttcaccgacacccccctgcagatcaagagcgtggtggcccccgagcacgtgaagggctacatctacgtggaggcctacaagcagacccacgtgaagcaggccatcgagggcgtgggcaacctgagactgggctactggaaccagcagatggtgcccatcaaggagatgaccgacgtgctgaaggtggtgaaggaggtggccaacctgaagcccaagagctgggtgagactgaagagaggcatctacaaggacgacatcgcccaggtggactacgtggagcccagccagaacaccatcagcctgaagatgatccccagaatcgactacgacagaatcaaggccagaatgagcctgaaggactggttcgccaagagaaagaagttcaagagacccccccagagactgttcgacgccgagaagatcagaagcctgggcggcgacgtggccagcgacggcgacttcctgatcttcgagggcaacagatacagcagaaagggcttcctgttcaagagcttcgccatgagcgccgtgatcaccgagggcgtgaagcccaccctgagcgagctggagaagttcgaggaccagcccgagggcatcgacctggaggtggtgaccgagagcaccggcaaggagagagagcacaacttccagcccggcgacaacgtggaggtgtgcgagggcgagctgatcaacctgcagggcaagatcctgagcgtggacggcaacaagatcaccatcatgcccaagcacgaggacctgaaggacatgctggagttccccgcccaggagctgagaaagtacttcaagatgggcgaccacgtgaaggtgatcgccggcagattcgagggcgacaccggcctgatcgtgagagtggaggagaacttcgtgatcctgttcagcgacctgaccatgcacgagctgaaggtgctgcccagagacctgcagctgtgcagcgagaccgccagcggcgtggacgtgggcggccagcacgagtggggcgagctggtgcagctggacccccagaccgtgggcgtgatcgtgagactggagagagagaccttccaggtgctgaacatgtacggcaaggtggtgaccgtgagacaccaggccgtgaccagaaagaaggacaacagattcgccgtggccctggacagcgagcagaacaacatccacgtgaaggacatcgtgaaggtgatcgacggcccccacagcggcagagagggcgagatcagacacctgttcagaagcttcgccttcctgcactgcaagaagctggtggagaacggcggcatgttcgtgtgcaagaccagacacctggtgctggccggcggcagcaagcccagagacgtgaccaacttcaccgtgggcggcttcgcccccatgagccccagaatcagcagccccatgcaccccagcgccggcggccagagaggcggcttcggcagccccggcggcggcagcggcggcatgagcagaggcagaggcagaagagacaacgagctgatcggccagaccgtgagaatcagccagggcccctacaagggctacatcggcgtggtgaaggacgccaccgagagcaccgccagagtggagctgcacagcacctgccagaccatcagcgtggacagacagagactgaccaccgtgggcagcagaagacccggcggcatgaccagcacctacggcagaacccccatgtacggcagccagacccccatgtacggcagcggcagcagaacccccatgtacggcagccagacccccctgcaggacggcagcagaaccccccactacggcagccagacccccctgcacgacggcagcagaacccccgcccagagcggcgcctgggaccccaacaaccccaacacccccagcagagccgaggaggagtacgagtacgccttcgacgacgagcccacccccagcccccaggcctacggcggcacccccaacccccagacccccggctaccccgaccccagcagcccccaggtgaacccccagtacaacccccagacccccggcacccccgccatgtacaacaccgaccagttcagcccctacgccgcccccagcccccagggcagctaccagcccagccccagcccccagagctaccaccaggtggcccccagccccgccggctaccagaacacccacagccccgccagctaccaccccacccccagccccatggcctaccaggccagccccagccccagccccgtgggctacagccccatgacccccggcgcccccagccccggcggctacaacccccacacccccggcagcggcatcgagcagaacagcagcgactgggtgaccaccgacatccaggtgaaggtgagagacacctacctggacacccaggtggtgggccagaccggcgtgatcagaagcgtgaccggcggcatgtgcagcgtgtacctgaaggacagcgagaaggtggtgagcatcagcagcgagcacctggagcccatcacccccaccaagaacaacaaggtgaaggtgatcctgggcgaggacagagaggccaccggcgtgctgctgagcatcgacggcgaggacggcatcgtgagaatggacctggacgagcagctgaagatcctgaacctgagattcctgggcaagctgctggaggcctag

SEQ ID NO: 101272 - DNA, 3252 bp, synthetic construct
  misc_feature 1..3252: note = Description of Artificial Sequence: Synthetic coding sequence
  source 1..3252: mol_type = other DNA
atgagcgacagcgaggacagcaacttcagcgaggaggaggacagcgagagaagcagcgacggcgaggaggccgaggtggacgaggagagaagaagcgccgccggcagcgagaaggaggaggagcccgaggacgaggaggaggaggaggaggaggaggagtacgacgaggaggaggaggaggaggacgacgacagaccccccaagaagcccagacacggcggcttcatcctggacgaggccgacgtggacgacgagtacgaggacgaggaccagtgggaggacggcgccgaggacatcctggagaaggccagcaacatcgacaacgtggtgctggacgaggacagaagcggcgccagaagactgcagaacctgtggagagaccagagagaggaggagctgggcgagtactacatgaagaagtacgccaagagcagcgtgggcgagaccgtgtacggcggcagcgacgagctgagcgacgacatcacccagcagcagctgctgcccggcgtgaaggaccccaacctgtggaccgtgaagtgcaagatcggcgaggagagagccaccgccatcagcctgatgagaaagttcatcgcctaccagttcaccgacacccccctgcagatcaagagcgtggtggcccccgagcacgtgaagggctacatctacgtggaggcctacaagcagacccacgtgaagcaggccatcgagggcgtgggcaacctgagactgggctactggaaccagcagatggtgcccatcaaggagatgaccgacgtgctgaaggtggtgaaggaggtggccaacctgaagcccaagagctgggtgagactgaagagaggcatctacaaggacgacatcgcccaggtggactacgtggagcccagccagaacaccatcagcctgaagatgatccccagaatcgactacgacagaatcaaggccagaatgagcctgaaggactggttcgccaagagaaagaagttcaagagacccccccagagactgttcgacgccgagaagatcagaagcctgggcggcgacgtggccagcgacggcgacttcctgatcttcgagggcaacagatacagcagaaagggcttcctgttcaagagcttcgccatgagcgccgtgatcaccgagggcgtgaagcccaccctgagcgagctggagaagttcgaggaccagcccgagggcatcgacctggaggtggtgaccgagagcaccggcaaggagagagagcacaacttccagcccggcgacaacgtggaggtgtgcgagggcgagctgatcaacctgcagggcaagatcctgagcgtggacggcaacaagatcaccatcatgcccaagcacgaggacctgaaggacatgctggagttccccgcccaggagctgagaaagtacttcaagatgggcgaccacgtgaaggtgatcgccggcagattcgagggcgacaccggcctgatcgtgagagtggaggagaacttcgtgatcctgttcagcgacctgaccatgcacgagctgaaggtgctgcccagagacctgcagctgtgcagcgagaccgccagcggcgtggacgtgggcggccagcacgagtggggcgagctggtgcagctggacccccagaccgtgggcgtgatcgtgagactggagagagagaccttccaggtgctgaacatgtacggcaaggtggtgaccgtgagacaccaggccgtgaccagaaagaaggacaacagattcgccgtggccctggacagcgagcagaacaacatccacgtgaaggacatcgtgaaggtgatcgacggcccccacagcggcagagagggcgagatcagacacctgttcagaagcttcgccttcctgcactgcaagaagctggtggagaacggcggcatgttcgtgtgcaagaccagacacctggtgctggccggcggcagcaagcccagagacgtgaccaacttcaccgtgggcggcttcgcccccatgagccccagaatcagcagccccatgcaccccagcgccggcggccagagaggcggcttcggcagccccggcggcggcagcggcggcatgagcagaggcagaggcagaagagacaacgagctgatcggccagaccgtgagaatcagccagggcccctacaagggctacatcggcgtggtgaaggacgccaccgagagcaccgccagagtggagctgcacagcacctgccagaccatcagcgtggacagacagagactgaccaccgtgggcagcagaagacccggcggcatgaccagcacctacggcagaacccccatgtacggcagccagacccccatgtacggcagcggcagcagaacccccatgtacggcagccagacccccctgcaggacggcagcagaaccccccactacggcagccagacccccctgcacgacggcagcagaacccccgcccagagcggcgcctgggaccccaacaaccccaacacccccagcagagccgaggaggagtacgagtacgccttcgacgacgagcccacccccagcccccaggcctacggcggcacccccaacccccagacccccggctaccccgaccccagcagcccccaggtgaacccccagtacaacccccagacccccggcacccccgccatgtacaacaccgaccagttcagcccctacgccgcccccagcccccagggcagctaccagcccagccccagcccccagagctaccaccaggtggcccccagccccgccggctaccagaacacccacagccccgccagctaccaccccacccccagccccatggcctaccaggccagccccagccccagccccgtgggctacagccccatgacccccggcgcccccagccccggcggctacaacccccacacccccggcagcggcatcgagcagaacagcagcgactgggtgaccaccgacatccaggtgaaggtgagagacacctacctggacacccaggtggtgggccagaccggcgtgatcagaagcgtgaccggcggcatgtgcagcgtgtacctgaaggacagcgagaaggtggtgagcatcagcagcgagcacctggagcccatcacccccaccaagaacaacaaggtgaaggtgatcctgggcgaggacagagaggccaccggcgtgctgctgagcatcgacggcgaggacggcatcgtgagaatggacctggacgagcagctgaagatcctgaacctgagattcctgggcaagctgctggaggcctag

SEQ ID NO: 101273 - DNA, 3264 bp, synthetic construct; identical to SEQ ID NO: 101270
  misc_feature 1..3264: note = Description of Artificial Sequence: Synthetic coding sequence
  source 1..3264: mol_type = other DNA

SEQ ID NO: 101274 - DNA, 3264 bp, synthetic construct; identical to SEQ ID NO: 101270
  misc_feature 1..3264: note = Description of Artificial Sequence: Synthetic coding sequence
  source 1..3264: mol_type = other DNA

SEQ ID NO: 101275 - DNA, 3264 bp, synthetic construct; identical to SEQ ID NO: 101270
  misc_feature 1..3264: note = Description of Artificial Sequence: Synthetic coding sequence
  source 1..3264: mol_type = other DNA

SEQ ID NO: 101276 - DNA, 5181 bp, synthetic construct
  misc_feature 1..5181: note = Description of Artificial Sequence: Synthetic coding sequence
  source 1..5181: mol_type = other DNA
atgagcgacttcgtggagagcgaggccgaggagagcgaggaggagtacaacgacgagggcgaggtggtgcccagagtgaccaagaagttcgtggaggaggaggacgacgacgaggaggaggaggaggagaacctggacgaccaggacgagcagggcaacctgaagggcttcatcaacgacgacgacgacgaggacgagggcgaggaggacgagggcagcgacagcggcgacagcgaggacgacgtgggccacaagaagagaaagagaaccagcttcgacgacagactggaggacgacgacttcgacctgatcgaggagaacctgggcgtgaaggtgaagagaggccagaagtacagaagagtgaagaagatgagcgacgacgaggacgacgacgaggaggagtacggcaaggaggagcacgagaaggaggccatcgccgaggagatcttccaggacggcgagggcgaggagggccaggaggccatggaggcccccatggccccccccgaggaggaggaggaggacgacgaggagagcgacatcgacgacttcatcgtggacgacgacggccagcccctgaagaagcccaagtggagaaagaagctgcccggctacaccgacgccgccctgcaggaggcccaggagatcttcggcgtggacttcgactacgacgagttcgagaagtacaacgagtacgacgaggagctggaggaggagtacgagtacgaggacgacgaggccgagggcgagatcagagtgagacccaagaagaccaccaagaagagagtgagcagaagaagcatcttcgagatgtacgagcccagcgagctggagagcagccacctgaccgaccaggacaacgagatcagagccaccgacctgcccgagagattccagctgagaagcatccccgtgaagggcgccgaggacgacgagctggaggaggaggccgactggatctacagaaacgccttcgccacccccaccatcagcctgcaggagagctgcgactacctggacagaggccagcccgccagcagcttcagcagaaagggccccagcaccatccagaagatcaaggaggccctgggcttcatgagaaaccagcacttcgaggtgcccttcatcgccttctacagaaaggagtacgtggagcccgagctgcacatcaacgacctgtggagagtgtggcagtgggacgagaagtggacccagctgagaatcagaaaggagaacctgaccagactgttcgagaagatgcaggcctaccagtacgagcagatcagcgccgaccccgacaagcccctggccgacggcatcagagccctggacaccaccgacatggagagactgaaggacgtgcagagcatggacgagctgaaggacgtgtacaaccacttcctgctgtactacggcagagacatccccaagatgcagaacgccgccaaggccagcagaaagaagctgaagagagtgagagaggagggcgacgaggagggcgagggcgacgaggccgaggacgaggagcagagaggccccgagctgaagcaggccagcagaagagacatgtacaccatctgccagagcgccggcctggacggcctggccaagaagttcggcctgacccccgagcagttcggcgagaacctgagagacagctaccagagacacgagaccgagcagttccccgccgagcccctggagctggccaaggactacgtgtgcagccagttccccacccccgaggccgtgctggagggcgccagatacatggtggccctgcagatcgccagagagcccctggtgagacaggtgctgagacagaccttccaggagagagccaagctgaacatcacccccaccaagaagggcagaaaggacgtggacgaggcccactacgcctacagcttcaagtacctgaagaacaagcccgtgaaggagctgagagacgaccagttcctgaagatctgcctggccgaggacgagggcctgctgaccaccgacatcagcatcgacctgaagggcgtggagggctacggcaacgaccagacctacttcgaggagatcaagcagttctactacagagacgagttcagccaccaggtgcaggagtggaacagacagagaaccatggccatcgagagagccctgcagcagttcctgtacgtgcagatggccaaggagctgaagaacaagctgctggccgaggccaaggagtacgtgatcaaggcctgcagcagaaagctgtacaactggctgagagtggccccctacagacccgaccagcaggtggaggaggacgacgacttcatggacgagaaccagggcaagggcatcagagtgctgggcatcgccttcagcagcgccagagaccaccccgtgttctgcgccctggtgaacggcgagggcgaggtgaccgacttcctgagactgccccacttcaccaagagaagaaccgcctggagagaggaggagagagagaagaaggcccaggacatcgagaccctgaagaagttcctgctgaacaagaagccccacgtggtgaccgtggccggcgagaacagagacgcccagatgctgatcgaggacgtgaagagaatcgtgcacgagctggaccagggccagcagctgagcagcatcggcgtggagctggtggacaacgagctggccatcctgtacatgaacagcaagaagagcgaggccgagttcagagactacccccccgtgctgagacaggccgtgagcctggccagaagaatccaggaccccctgatcgagttcgcccaggtgtgcagcagcgacgaggacatcctgtgcctgaagttccaccccctgcaggagcacgtggtgaaggaggagctgctgaacgccctgtactgcgagttcatcaacagagtgaacgaggtgggcgtggacgtgaacagagccatcgcccacccctacagccaggccctgatccagtacgtgtgcggcctgggccccagaaagggcacccacctgctgaagatcctgaagcagaacaacaccagactggagagcagaacccagctggtgaccatgtgccacatgggccccaaggtgttcatgaactgcgccggcttcctgaagatcgacaccgccagcctgggcgacagcaccgacagctacatcgaggtgctggacggcagcagagtgcaccccgagacctacgagtgggccagaaagatggccgtggacgccctggagtacgacgagagcgccgaggacgccaaccccgccggcgccctggaggagatcctggagaaccccgagagactgaaggacctggacctggacgccttcgccgaggagctggagagacagggctacggcgacaagcacatcaccctgtacgacatcagagccgagctgagctgcagatacaaggacctgagaaccgcctacagaagccccaacaccgaggagatcttcaacatgctgaccaaggagacccccgagaccttctacatcggcaagctgatcatctgcaacgtgaccggcatcgcccacagaagaccccagggcgagagctacgaccaggccatcagaaacgacgagaccggcctgtggcagtgccccttctgccagcaggacaacttccccgagctgagcgaggtgtggaaccacttcgacagcggcagctgccccggccaggccatcggcgtgaagaccagactggacaacggcgtgaccggcttcatccccaccaagttcctgagcgacaaggtggtgaagagacccgaggagagagtgaaggtgggcatgaccgtgcactgcagaatcatgaagatcgacatcgagaagttcagcgccgacctgacctgcagaaccagcgacctgatggacagaaacaacgagtggaagctgcccaaggacacctactacgacttcgacgccgaggccgccgaccacaagcaggaggaggacatgaagagaaagcagcagagaaccacctacatcaagagagtgatcgcccaccccagcttccacaacatcaacttcaagcaggccgagaagatgatggagaccatggaccagggcgacgtgatcatcagacccagcagcaagggcgagaaccacctgaccgtgacctggaaggtgagcgacggcatctaccagcacgtggacgtgagagaggagggcaaggagaacgccttcagcctgggcgccaccctgtggatcaacagcgaggagttcgaggacctggacgagatcgtggccagatacgtgcagcccatggccagcttcgccagagacctgctgaaccacaagtactaccaggactgcagcggcggcgacagaaagaagctggaggagctgctgatcaagaccaagaaggagaagcccaccttcatcccctacttcatctgcgcctgcaaggagctgcccggcaagttcctgctgggctaccagcccagaggcaagcccagaatcgagtacgtgaccgtgacccccgagggcttcagatacagaggccagatcttccccaccgtgaacggcctgttcagatggttcaaggaccactaccaggaccccgtgcccggcatcacccccagcagcagcagcagaaccagaacccccgccagcatcaacgccacccccgccaacatcaacctggccgacctgaccagagccgtgaacgccctgccccagaacatgaccagccagatgttcagcgccatcgccgccgtgaccggccagggccagaaccccaacgccacccccgcccagtgggccagcagccagtacggctacggcggcagcggcggcggcagcagcgcctaccacgtgttccccacccccgcccagcagcccgtggccacccccctgatgacccccagctacagctacaccacccccagccagcccatcaccaccccccagtaccaccagctgcaggccagcaccaccccccagagcgcccaggcccagccccagcccagcagcagcagcagacagagacagcagcagcccaagagcaacagccacgccgccatcgactggggcaagatggccgagcagtggctgcaggagaaggaggccgagagaagaaagcagaagcagagactgacccccagacccagccccagccccatgatcgagagcacccccatgagcatcgccggcgacgccacccccctgctggacgagatggacagatag

SEQ ID NO: 101277 - DNA, 2181 bp, synthetic construct
  misc_feature 1..2181: note = Description of Artificial Sequence: Synthetic coding sequence
  source 1..2181: mol_type = other DNA
atgagcgacttcgtggagagcgaggccgaggagagcgaggaggagtacaacgacgagggcgaggtggtgcccagagtgaccaagaagttcgtggaggaggaggacgacgacgaggaggaggaggaggagaacctggacgaccaggacgagcagggcaacctgaagggcttcatcaacgacgacgacgacgaggacgagggcgaggaggacgagggcagcgacagcggcgacagcgaggacgacgtgggccacaagaagagaaagagaaccagcttcgacgacagactggaggacgacgacttcgacctgatcgaggagaacctgggcgtgaaggtgaagagaggccagaagtacagaagagtgaagaagatgagcgacgacgaggacgacgacgaggaggagtacggcaaggaggagcacgagaaggaggccatcgccgaggagatcttccaggacggcgagggcgaggagggccaggaggccatggaggcccccatggccccccccgaggaggaggaggaggacgacgaggagagcgacatcgacgacttcatcgtggacgacgacggccagcccctgaagaagcccaagtggagaaagaagctgcccggctacaccgacgccgccctgcaggaggcccaggagatcttcggcgtggacttcgactacgacgagttcgagaagtacaacgagtacgacgaggagctggaggaggagtacgagtacgaggacgacgaggccgagggcgagatcagagtgagacccaagaagaccaccaagaagagagtgagcagaagaagcatcttcgagatgtacgagcccagcgagctggagagcagccacctgaccgaccaggacaacgagatcagagccaccgacctgcccgagagattccagctgagaagcatccccgtgaagggcgccgaggacgacgagctggaggaggaggccgactggatctacagaaacgccttcgccacccccaccatcagcctgcaggagagctgcgactacctggacagaggccagcccgccagcagcttcagcagaaagggccccagcaccatccagaagatcaaggaggccctgggcttcatgagaaaccagcacttcgaggtgcccttcatcgccttctacagaaaggagtacgtggagcccgagctgcacatcaacgacctgtggagagtgtggcagtgggacgagaagtggacccagctgagaatcagaaaggagaacctgaccagactgttcgagaagatgcaggcctaccagtacgagcagatcagcgccgaccccgacaagcccctggccgacggcatcagagccctggacaccaccgacatggagagactgaaggacgtgcagagcatggacgagctgaaggacgtgtacaaccacttcctgctgtactacggcagagacatccccaagatgcagaacgccgccaaggccagcagaaagaagctgaagagagtgagagaggagggcgacgaggagggcgagggcgacgaggccgaggacgaggagcagagaggccccgagctgaagcaggccagcagaagagacatgtacaccatctgccagagcgccggcctggacggcctggccaagaagttcggcctgacccccgagcagttcggcgagaacctgagagacagctaccagagacacgagaccgagcagttccccgccgagcccctggagctggccaaggactacgtgtgcagccagttccccacccccgaggccgtgctggagggcgccagatacatggtggccctgcagatcgccagagagcccctggtgagacaggtgctgagacagaccttccaggagagagccaagctgatgacccccagctacagctacaccacccccagccagcccatcaccaccccccagtaccaccagctgcaggccagcaccaccccccagagcgcccaggcccagccccagcccagcagcagcagcagacagagacagcagcagcccaagagcaacagccacgccgccatcgactggggcaagatggccgagcagtggctgcaggagaaggaggccgagagaagaaagcagaagcagagactgacccccagacccagccccagccccatgatcgagagcacccccatgagcatcgccggcgacgccacccccctgctggacgagatggacagatag

SEQ ID NO: 101278 - DNA, 2361 bp, synthetic construct
  misc_feature 1..2361: note = Description of Artificial Sequence: Synthetic coding sequence
  source 1..2361: mol_type = other DNA
atgagcttcagcagagccctgctgtgggccagactgcccgccggcagacaggccggccacagagccgccatctgcagcgccctgagaccccacttcggccccttccccggcgtgctgggccaggtgagcgtgctggccaccgccagcagcagcgccagcggcggcagcaagatccccaacaccagcctgttcgtgcccctgaccgtgaagccccagggccccagcgccgacggcgacgtgggcgccgagctgaccagacccctggacaagaacgaggtgaagaaggtgctggacaagttctacaagagaaaggagatccagaagctgggcgccgactacggcctggacgccagactgttccaccaggccttcatcagcttcagaaactacatcatgcagagccacagcctggacgtggacatccacatcgtgctgaacgacatctgcttcggcgccgcccacgccgacgacctgttccccttcttcctgagacacgccaagcagatcttccccgtgctggactgcaaggacgacctgagaaagatcagcgacctgagaatcccccccaactggtaccccgacgccagagccatgcagagaaagatcatcttccacagcggccccaccaacagcggcaagacctaccacgccatccagaagtacttcagcgccaagagcggcgtgtactgcggccccctgaagctgctggcccacgagatcttcgagaagagcaacgccgccggcgtgccctgcgacctggtgaccggcgaggagagagtgaccgtgcagcccaacggcaagcaggccagccacgtgagctgcaccgtggagatgtgcagcgtgaccaccccctacgaggtggccgtgatcgacgagatccagatgatcagagaccccgccagaggctgggcctggaccagagccctgctgggcctgtgcgccgaggaggtgcacctgtgcggcgagcccgccgccatcgacctggtgatggagctgatgtacaccaccggcgaggaggtggaggtgagagactacaagagactgacccccatcagcgtgctggaccacgccctggagagcctggacaacctgagacccggcgactgcatcgtgtgcttcagcaagaacgacatctacagcgtgagcagacagatcgagatcagaggcctggagagcgccgtgatctacggcagcctgccccccggcaccaagctggcccaggccaagaagttcaacgaccccaacgacccctgcaagatcctggtggccaccgacgccatcggcatgggcctgaacctgagcatcagaagaatcatcttctacagcctgatcaagcccagcatcaacgagaagggcgagagagagctggagcccatcaccaccagccaggccctgcagatcgccggcagagccggcagattcagcagcagattcaaggagggcgaggtgaccaccatgaaccacgaggacctgagcctgctgaaggagatcctgaagagacccgtggaccccatcagagccgccggcctgcaccccaccgccgagcagatcgagatgttcgcctaccacctgcccgacgccaccctgagcaacctgatcgacatcttcgtggacttcagccaggtggacggccagtacttcgtgtgcaacatggacgacttcaagttcagcgccgagctgatccagcacatccccctgagcctgagagtgagatacgtgttctgcaccgcccccatcaacaagaagcagcccttcgtgtgcagcagcctgctgcagttcgccagacagtacagcagaaacgagcccctgaccttcgcctggctgagaagatacatcaagtggcccctgctgccccccaagaacatcaaggacctgatggacctggaggccgtgcacgacgtgctggacctgtacctgtggctgagctacagattcatggacatgttccccgacgccagcctgatcagagacctgcagaaggagctggacggcatcatccaggacggcgtgcacaacatcaccaagctgatcaagatgagcgagacccacaagctgctgaacctggagggcttccccagcggcagccagagcagactgagcggcaccctgaagagccaggccagaagaaccagaggcaccaaggccctgggcagcaaggccaccgagccccccagccccgacgccggcgagctgagcctggccagcagactggtgcagcagggcctgctgacccccgacatgctgaagcagctggagaaggagtggatgacccagcagaccgagcacaacaaggagaagaccgagagcggcacccaccccaagggcaccagaagaaagaagaaggagcccgacagcgactag

SEQ ID NO: 101279 - DNA, 792 bp, synthetic construct
  misc_feature 1..792: note = Description of Artificial Sequence: Synthetic coding sequence
  source 1..792: mol_type = other DNA
atgagcttcagcagagccctgctgtgggccagactgcccgccggcagacaggccggccacagagccgccatctgcagcgccctgagaccccacttcggccccttccccggcgtgctgggccaggtgagcgtgctggccaccgccagcagcagcgccagcggcggcagcaagatccccaacaccagcctgttcgtgcccctgaccgtgaagccccagggccccagcgccgacggcgacgtgggcgccgagctgaccagacccctggacaagaacgaggtggccgtgatcgacgagatccagatgatcagagaccccgccagaggctgggcctggaccagagccctgctgggcctgtgcgccgaggaggtgcacctgtgcggcgagcccgccgccatcgacctggtgatggagctgatgtacaccaccggcgaggaggtggaggtgagagactacaagagactgacccccatcagcgtgctggaccacgccctggagagcctggacaacctgagacccggcgactgcatcgtgtgcttcagcaagaacgacatctacagcgtgagcagacagatcgagatcagaggcctggagagcgccgtgatctacggcagcctgccccccggcaccaagctggcccaggccaagaagttcaacgaccccaacgacccctgcaagatcctggtggccaccgacgccatcggcatgggcctgaacctgagcatcagaagaatcatcttctacagcctgatcaagcccagcatcaacgagaagggcgagagagagctggagtag

SEQ ID NO: 101280 - DNA, 1233 bp, synthetic construct
  misc_feature 1..1233: note = Description of Artificial Sequence: Synthetic coding sequence
  source 1..1233: mol_type = other DNA
atggccgccgtgggcgccgaggccagaggcgcctggtgcgtgccctgcctggtgagcctggacaccctgcaggagctgtgcagaaaggagaagctgacctgcaagagcatcggcatcaccaagagaaacctgaacaactacgaggtggagtacctgtgcgactacaaggtggtgaaggacatggagtactacctggtgaagtggaagggctggcccgacagcaccaacacctgggagcccctgcagaacctgaagtgccccctgctgctgcagcagttcagcaacgacaagcacaactacctgagccaggtgaagaagggcaaggccatcacccccaaggacaacaacaagaccctgaagcccgccatcgccgagtacatcgtgaagaaggccaagcagagaatcgccctgcagagatggcaggacgagctgaacagaagaaagaaccacaagggcatgatcttcgtggagaacaccgtggacctggagggcccccccagcgacttctactacatcaacgagtacaagcccgcccccggcatcagcctggtgaacgaggccaccttcggctgcagctgcaccgactgcttcttccagaagtgctgccccgccgaggccggcgtgctgctggcctacaacaagaaccagcagatcaagatcccccccggcacccccatctacgagtgcaacagcagatgccagtgcggccccgactgccccaacagaatcgtgcagaagggcacccagtacagcctgtgcatcttcagaaccagcaacggcagaggctggggcgtgaagaccctggtgaagatcaagagaatgagcttcgtgatggagtacgtgggcgaggtgatcaccagcgaggaggccgagagaagaggccagttctacgacaacaagggcatcacctacctgttcgacctggactacgagagcgacgagttcaccgtggacgccgccagatacggcaacgtgagccacttcgtgaaccacagctgcgaccccaacctgcaggtgttcaacgtgttcatcgacaacctggacaccagactgcccagaatcgccctgttcagcaccagaaccatcaacgccggcgaggagctgaccttcgactaccagatgaagggcagcggcgacatcagcagcgacagcatcgaccacagccccgccaagaagagagtgagaaccgtgtgcaagtgcggcgccgtgacctgcagaggctacctgaactag

SEQ ID NO: 101281 - DNA, 693 bp, synthetic construct
  misc_feature 1..693: note = Description of Artificial Sequence: Synthetic coding sequence
  source 1..693: mol_type = other DNA
atggccgccgtgggcgccgaggccagaggcgcctggtgcgtgccctgcctggtgagcctggacaccctgcaggagctgtgcagaaaggagaagctgacctgcaagagcatcggcatcaccaagagaaacctgaacaactacgaggtggagtacctgtgcgactacaaggtggtgaaggacatggagtactacctggtgaagtggaagggctggcccgacagcaccaacacctgggagcccctgcagaacctgaagtgccccctgctgctgcagcagttcagcaacgacaagcacaactacctgagccaggtgatcaccagcgaggaggccgagagaagaggccagttctacgacaacaagggcatcacctacctgttcgacctggactacgagagcgacgagttcaccgtggacgccgccagatacggcaacgtgagccacttcgtgaaccacagctgcgaccccaacctgcaggtgttcaacgtgttcatcgacaacctggacaccagactgcccagaatcgccctgttcagcaccagaaccatcaacgccggcgaggagctgaccttcgactaccagatgaagggcagcggcgacatcagcagcgacagcatcgaccacagccccgccaagaagagagtgagaaccgtgtgcaagtgcggcgccgtgacctgcagaggctacctgaactag

SEQ ID NO: 101282 - DNA, 459 bp, synthetic construct
  misc_feature 1..459: note = Description of Artificial Sequence: Synthetic coding sequence
  source 1..459: mol_type = other DNA
atggagtactacctggtgaagtggaagggctggcccgacagcaccaacacctgggagcccctgcagaacctgaagtgccccctgctgctgcagcagttcagcaacgacaagcacaactacctgagccaggtgatcaccagcgaggaggccgagagaagaggccagttctacgacaacaagggcatcacctacctgttcgacctggactacgagagcgacgagttcaccgtggacgccgccagatacggcaacgtgagccacttcgtgaaccacagctgcgaccccaacctgcaggtgttcaacgtgttcatcgacaacctggacaccagactgcccagaatcgccctgttcagcaccagaaccatcaacgccggcgaggagctgaccttcgactaccagatgaagggcagcggcgacatcagcagcgacagcatcgaccacagccccgccaagaagtag

SEQ ID NO: 101283 - DNA, 1053 bp, synthetic construct
  misc_feature 1..1053: note = Description of Artificial Sequence: Synthetic coding sequence
  source 1..1053: mol_type = other DNA
atggagtactacctggtgaagtggaagggctggcccgacagcaccaacacctgggagcccctgcagaacctgaagtgccccctgctgctgcagcagttcagcaacgacaagcacaactacctgagccaggtgaagaagggcaaggccatcacccccaaggacaacaacaagaccctgaagcccgccatcgccgagtacatcgtgaagaaggccaagcagagaatcgccctgcagagatggcaggacgagctgaacagaagaaagaaccacaagggcatgatcttcgtggagaacaccgtggacctggagggcccccccagcgacttctactacatcaacgagtacaagcccgcccccggcatcagcctggtgaacgaggccaccttcggctgcagctgcaccgactgcttcttccagaagtgctgccccgccgaggccggcgtgctgctggcctacaacaagaaccagcagatcaagatcccccccggcacccccatctacgagtgcaacagcagatgccagtgcggccccgactgccccaacagaatcgtgcagaagggcacccagtacagcctgtgcatcttcagaaccagcaacggcagaggctggggcgtgaagaccctggtgaagatcaagagaatgagcttcgtgatggagtacgtgggcgaggtgatcaccagcgaggaggccgagagaagaggccagttctacgacaacaagggcatcacctacctgttcgacctggactacgagagcgacgagttcaccgtggacgccgccagatacggcaacgtgagccacttcgtgaaccacagctgcgaccccaacctgcaggtgttcaacgtgttcatcgacaacctggacaccagactgcccagaatcgccctgttcagcaccagaaccatcaacgccggcgaggagctgaccttcgactaccagatgaagggcagcggcgacatcagcagcgacagcatcgaccacagccccgccaagaagagagtgagaaccgtgtgcaagtgcggcgccgtgacctgcagaggctacctgaactag

SEQ ID NO: 101284 - DNA, 2658 bp, synthetic construct
  misc_feature 1..2658: note = Description of Artificial Sequence: Synthetic coding sequence
  source 1..2658: mol_type = other DNA
atgaagtggctgggcgagagcaagatcatggtggtgaacggcagaagaaacggcggcaagctgagcaacgaccaccagcagaaccagagcaagctgcagcacaccggcaaggacaccctgaaggccggcaagaacgccgtggagagaagaagcaacagatgcaacggcaacagcggcttcgagggccagagcagatacgtgcccagcagcggcatgagcgccaaggagctgtgcgagaacgacgacctggccaccagcctggtgctggacccctacctgggcttccagacccacaagatgaacaccagcgccttccccagcagaagcagcagacacttcagcaagagcgacagcttcagccacaacaaccccgtgagattcagacccatcaagggcagacaggaggagctgaaggaggtgatcgagagattcaagaaggacgagcacctggagaaggccttcaagtgcctgaccagcggcgagtgggccagacactacttcctgaacaagaacaagatgcaggagaagctgttcaaggagcacgtgttcatctacctgagaatgttcgccaccgacagcggcttcgagatcctgccctgcaacagatacagcagcgagcagaacggcgccaagatcgtggccaccaaggagtggaagagaaacgacaagatcgagctgctggtgggctgcatcgccgagctgagcgagatcgaggagaacatgctgctgagacacggcgagaacgacttcagcgtgatgtacagcaccagaaagaactgcgcccagctgtggctgggccccgccgccttcatcaaccacgactgcagacccaactgcaagttcgtgagcaccggcagagacaccgcctgcgtgaaggccctgagagacatcgagcccggcgaggagatcagctgctactacggcgacggcttcttcggcgagaacaacgagttctgcgagtgctacacctgcgagagaagaggcaccggcgccttcaagagcagagtgggcctgcccgcccccgcccccgtgatcaacagcaagtacggcctgagagagaccgacaagagactgaacagactgaagaagctgggcgacagcagcaagaacagcgacagccagagcgtgagcagcaacaccgacgccgacaccacccaggagaagaacaacgccaccagcaacagaaagagcagcgtgggcgtgaagaagaacagcaagagcagaaccctgaccagacagagcatgagcagaatccccgccagcagcaacagcaccagcagcaagctgacccacatcaacaacagcagagtgcccaagaagctgaagaagcccgccaagcccctgctgagcaagatcaagctgagaaaccactgcaagagactggagcagaagaacgccagcagaaagctggagatgggcaacctggtgctgaaggagcccaaggtggtgctgtacaagaacctgcccatcaagaaggacaaggagcccgagggccccgcccaggccgccgtggccagcggctgcctgaccagacacgccgccagagagcacagacagaaccccgtgagaggcgcccacagccagggcgagagcagcccctgcacctacatcaccagaagaagcgtgagaaccagaaccaacctgaaggaggccagcgacatcaagctggagcccaacaccctgaacggctacaagagcagcgtgaccgagccctgccccgacagcggcgagcagctgcagcccgcccccgtgctgcaggaggaggagctggcccacgagaccgcccagaagggcgaggccaagtgccacaagagcgacaccggcatgagcaagaagaagagcagacagggcaagctggtgaagcagttcgccaagatcgaggagagcacccccgtgcacgacagccccggcaaggacgacgccgtgcccgacctgatgggcccccacagcgaccagggcgagcacagcggcaccgtgggcgtgcccgtgagctacaccgactgcgcccccagccccgtgggctgcagcgtggtgaccagcgacagcttcaagaccaaggacagcttcagaaccgccaagagcaagaagaagagaagaatcaccagatacgacgcccagctgatcctggagaacaacagcggcatccccaagctgaccctgagaagaagacacgacagcagcagcaagaccaacgaccaggagaacgacggcatgaacagcagcaagatcagcatcaagctgagcaaggaccacgacaacgacaacaacctgtacgtggccaagctgaacaacggcttcaacagcggcagcggcagcagcagcaccaagctgaagatccagctgaagagagacgaggagaacagaggcagctacaccgagggcctgcacgagaacggcgtgtgctgcagcgaccccctgagcctgctggagagcagaatggaggtggacgactacagccagtacgaggaggagagcaccgacgacagcagcagcagcgagggcgacgaggaggaggacgactacgacgacgacttcgaggacgacttcatccccctgccccccgccaagagactgagactgatcgtgggcaaggacagcatcgacatcgacatcagcagcagaagaagagaggaccagagcctgagactgaacgcctag

SEQ ID NO: 101285 - DNA, 1182 bp, synthetic construct
  misc_feature 1..1182: note = Description of Artificial Sequence: Synthetic coding sequence
  source 1..1182: mol_type = other DNA
atgaagtggctgggcgagagcaagatcatggtggtgaacggcagaagaaacggcggcaagctgagcaacgaccaccagcagaaccagagcaagctgcagcacaccggcaaggacaccctgaaggccggcaagaacgccgtggagagaagaagcaacagatgcaacggcaacagcggcttcgagggccagagcagatacgtgcccagcagcggcatgagcgccaaggagctgtgcgagaacgacgacctggccaccagcctggtgctggacccctacctgggcttccagacccacaagatgaacaccagcgccttccccagcagaagcagcagacacttcagcaagagcgacagcttcagccacaacaaccccgtgagattcagacccatcaagggcagacaggaggagctgaaggaggtgatcgagagattcaagaaggacgagcacctggagaaggccttcaagtgcctgaccagcggcgagtgggccagacactacttcctgaacaagaacaagatgcaggagaagctgttcaaggagcacgtgttcatctacctgagaatgttcgccaccgacagcggcttcgagatcctgccctgcaacagatacagcagcgagcagaacggcgccaagatcgtggccaccaaggagtggaagagaaacgacaagatcgagctgctggtgggctgcatcgccgagctgagcgagatcgaggagaacatgctgctgagacacggcgagaacgacttcagcgtgatgtacagcaccagaaagaactgcgcccagctgtggctgggccccgccgccttcatcaaccacgactgcagacccaactgcaagttcgtgagcaccggcagagacaccgcctgcgtgaaggccctgagagacatcgagcccggcgaggagatcagctgctactacggcgacggcttcttcggcgagaacaacgagttctgcgagtgctacacctgcgagagaagaggcaccggcgccttcaagagcagagtgggcctgcccgcccccgcccccgtgatcaacagcaagtacggcctgagagagaccgacaagagactgaacagactgaagaagctgggcgacagcagcaagaacagcgacagccagagcgtgagcagcaacaccgacgccgacaccacccaggagaagaacaacgccagcaagtag

SEQ ID NO: 101286 - DNA, 1182 bp, synthetic construct; identical to SEQ ID NO: 101285
  misc_feature 1..1182: note = Description of Artificial Sequence: Synthetic coding sequence
  source 1..1182: mol_type = other DNA

SEQ ID NO: 101287 - DNA, 357 bp, synthetic construct
  misc_feature 1..357: note = Description of Artificial Sequence: Synthetic coding sequence
  source 1..357: mol_type = other DNA
atgaagtggctgggcgagagcaagatcatggtggtgaacggcagaagaaacggcggcaagctgagcaacgaccaccagcagaaccagagcaagctgcagcacaccggcaaggacaccctgaaggccggcaagaacgccgtggagagaagaagcaacagatgcaacggcaacagcggcttcgagggccagagcagatacgtgcccagcagcggcatgagcgccaaggagctgtgcgagaacgacgacctggccaccagcctggtgctggacccctacctgggcttccagacccacaagatgaacaccagcgccttccccagcagaagcagcagacacttcagcaagagcgacagctag

SEQ ID NO: 101288 - DNA, 1389 bp, synthetic construct
  misc_feature 1..1389: note = Description of Artificial Sequence: Synthetic coding sequence
  source 1..1389: mol_type = other DNA
atgggccccgacagagtgaccgccagagagctgtgcgagaacgacgacctggccaccagcctggtgctggacccctacctgggcttcagaacccacaagatgaacgtgagccccgtgccccccctgagaagacagcagcacctgagaagcgccctggagaccttcctgagacagagagacctggaggccgcctacagagccctgaccctgggcggctggaccgccagatacttccagagcagaggccccagacaggaggccgccctgaagacccacgtgtacagatacctgagagccttcctgcccgagagcggcttcaccatcctgccctgcaccagatacagcatggagaccaacggcgccaagatcgtgagcaccagagcctggaagaagaacgagaagctggagctgctggtgggctgcatcgccgagctgagagaggccgacgagggcctgctgagagccggcgagaacgacttcagcatcatgtacagcaccagaaagagaagcgcccagctgtggctgggccccgccgccttcatcaaccacgactgcaagcccaactgcaagttcgtgcccgccgacggcaacgccgcctgcgtgaaggtgctgagagacatcgagcccggcgacgaggtgacctgcttctacggcgagggcttcttcggcgagaagaacgagcactgcgagtgccacacctgcgagagaaagggcgagggcgccttcagaaccagacccagagagcccgccctgccccccagacccctggacaagtaccagctgagagagaccaagagaagactgcagcagggcctggacagcggcagcagacagggcctgctgggccccagagcctgcgtgcaccccagccccctgagaagagaccccttctgcgccgcctgccagcccctgagactgcccgcctgcagcgccagacccgacaccagccccctgtggctgcagtggctgccccagccccagcccagagtgagacccagaaagagaagaagacccagacccagaagagcccccgtgctgagcacccaccacgccgccagagtgagcctgcacagatggggcggctgcggcccccactgcagactgagaggcgaggccctggtggccctgggccagcccccccacgccagatgggccccccagcaggactggcactgggccagaagatacggcctgccctacgtggtgagagtggacctgagaagactggcccccgccccccccgccacccccgcccccgccggcacccccggccccatcctgatccccaagcaggccctggccttcgcccccttcagcccccccaagagactgagactggtggtgagccacggcagcatcgacctggacgtgggcggcgaggagctgtag

SEQ ID NO: 101289 - DNA, 390 bp, synthetic construct
  misc_feature 1..390: note = Description of Artificial Sequence: Synthetic coding sequence
  source 1..390: mol_type = other DNA
atgcccagaagaggcagatggctgagctgcagccccgaggccgagggcatcagaagagtgggcagcagagccgccctgagagtgcaccccctggagcacagacccagatggggcacccccggcggcatgaccaagggcagcagattcctggcccccgagagcgagctgagctggggccccggcgacgccacccccggcctgtggttcttcatcagcgacggcgtgggcgaggacctgtggaacagcgccggctggagcagcgtgcccgagggcttcggccagagaatgagaggccccggcctgaccccccacaccgacgccggcggcgacggcaacaagagaagacacagcgagagactgtgcagagccagcgtgctgcagcccccctag

SEQ ID NO: 101290 - DNA, 744 bp, synthetic construct
  misc_feature 1..744: note = Description of Artificial Sequence: Synthetic coding sequence
  source 1..744: mol_type = other DNA
atgcacctggccagactggtgggcagctgcagcctgctgctgctgctgggcgccctgagcggctgggccgccagcgacgaccccatcgagaaggtgatcgagggcatcaacagaggcctgagcaacgccgagagagaggtgggcaaggccctggacggcatcaacagcggcatcacccacgccggcagagaggtggagaaggtgttcaacggcctgagcaacatgggcagccacaccggcaaggagctggacaagggcgtgcagggcctgaaccacggcatggacaaggtggcccacgagatcaaccacggcatcggccaggccggcaaggaggccgagaagctgggccacggcgtgaacaacgccgccggccaggccggcaaggaggccgacaaggccgtgcagggcttccacaccggcgtgcaccaggccggcaaggaggccgagaagctgggccagggcgtgaaccacgccgccgaccaggccggcaaggaggtggagaagctgggccagggcgcccaccacgccgccggccaggccggcaaggagctgcagaacgcccacaacggcgtgaaccaggccagcaaggaggccaaccagctgctgaacggcaaccaccagagcggcagcagcagccaccagggcggcgccaccaccacccccctggccagcggcgccagcgtgaacacccccttcatcaacctgcccgccctgtggagaagcgtggccaacatcatgccctag

SEQ ID NO: 101291 - DNA, 1773 bp, synthetic construct
  misc_feature 1..1773: note = Description of Artificial Sequence: Synthetic coding sequence
  source 1..1773: mol_type = other DNA
atgcacctggccagactggtgggcagctgcagcctgctgctgctgctgggcgccctgagcggctgggccgccagcgacgaccccatcgagaaggtgatcgagggcatcaacagaggcctgagcaacgccgagagagaggtgggcaaggccctggacggcatcaacagcggcatcacccacgccggcagagaggtggagaaggtgttcaacggcctgagcaacatgggcagccacaccggcaaggagctggacaagggcgtgcagggcctgaaccacggcatggacaaggtggcccacgagatcaaccacggcatcggccaggccggcaaggaggccgagaagctgggccacggcgtgaacaacgccgccggccaggtgggcaaggaggccgacaagctgatccaccacggcgtgcaccacggcgccaaccaggccggcagcgaggccggcaagttcggccagggcgtggacaacgccgccggccaggccggcaacgaggccggcagattcggccagggcgtgcaccacgccgccggccaggccggcaacgaggccggcagattcggccagggcgtgcaccacgccgccggccaggccggcaacgaggccggcagattcggccagggcgcccaccacggcctgagcgagggctggaaggagaccgagaagttcggccagggcatccaccacgccgccggccaggtgggcaaggaggccgagaagttcggccagggcgcccaccacgccgccggccaggccggcaacgaggccggcagattcggccagggcgtgcaccacggcctgagcgagggctggaaggagaccgagaagttcggccagggcgtgcaccacaccgccggccaggtgggcaaggaggccgagaagttcggccagggcgcccaccacgccgccggccaggccggcaacgaggccggcagattcggccagggcgcccaccacgccgccggccaggccggcaacgaggccggcagattcggccagggcgtgcaccacggcctgagcgagggctggaaggagaccgagaagttcggccagggcgtgcaccacgccgccagccagttcggcaaggagaccgagaagctgggccacggcgtgcaccacggcgtgaacgaggcctggaaggaggccgagaagttcggccagggcgtgcaccacgccgccagccaggtgggcaaggaggaggacagagtggtgcagggcctgcaccacggcgtgagccaggccggcagagaggccggccagttcggccacgacatccaccacaccgccggccaggccggcaaggagggcgacatcgccgtgcacggcgtgcagcccggcgtgcacgaggccggcaaggaggccggccagttcggccagggcgtgcaccacaccctggagcaggccggcaaggaggccgacaaggccgtgcagggcttccacaccggcgtgcaccaggccggcaaggaggccgagaagctgggccagggcgtgaaccacgccgccgaccaggccggcaaggaggtggagaagctgggccagggcgcccaccacgccgccggccaggccggcaaggagctgcagaacgcccacaacggcgtgaaccaggccagcaaggaggccaaccagctgctgaacggcaaccaccagagcggcagcagcagccaccagggcggcgccaccaccacccccctggccagcggcgccagcgtgaacacccccttcatcaacctgcccgccctgtggagaagcgtggccaacatcatgccctag

SEQ ID NO: 101292 - DNA, 288 bp, synthetic construct
  misc_feature 1..288: note = Description of Artificial Sequence: Synthetic coding sequence
  source 1..288: mol_type = other DNA
atgggcagccacaccggcaaggagctggacaagggcgtgcagggcctgaaccacggcatggacaaggtggcccacgagatcaaccacggcatcggccaggccggcaaggaggccgagaagctgggccacggcgtgaacaacgccgccggccagggcaaccaccagagcggcagcagcagccaccagggcggcgccaccaccacccccctggccagcggcgccagcgtgaacacccccttcatcaacctgcccgccctgtggagaagcgtggccaacatcatgccctag

SEQ ID NO: 101293 - DNA, 738 bp, synthetic construct
  misc_feature 1..738: note = Description of Artificial Sequence: Synthetic coding sequence
  source 1..738: mol_type = other DNA
atgtggctgtgccccctggccctgaacctgatcctgatggccgccagcggcgccgtgtgcgaggtgaaggacgtgtgcgtgggcagccccggcatccccggcacccccggcagccacggcctgcccggcagagacggcagagacggcctgaagggcgaccccggcccccccggccccatgggcccccccggcgagatgccctgcccccccggcaacgacggcctgcccggcgcccccggcatccccggcgagtgcggcgagaagggcgagcccggcgagagaggcccccccggcctgcccgcccacctggacgaggagctgcaggccaccctgcacgacttcagacaccagatcctgcagaccagaggcgccctgagcctgcagggcagcatcatgaccgtgggcgagaaggtgttcagcagcaacggccagagcatcaccttcgacgccatccaggaggcctgcgccagagccggcggcagaatcgccgtgcccagaaaccccgaggagaacgaggccatcgccagcttcgtgaagaagtacaacacctacgcctacgtgggcctgaccgagggccccagccccggcgacttcagatacagcgacggcacccccgtgaactacaccaactggtacagaggcgagcccgccggcagaggcaaggagcagtgcgtggagatgtacaccgacggccagtggaacgacagaaactgcctgtacagcagactgaccatctag

SEQ ID NO: 101294 - DNA, 570 bp, synthetic construct
  misc_feature 1..570: note = Description of Artificial Sequence: Synthetic coding sequence
  source 1..570: mol_type = other DNA
atgggcccccccggcgagatgccctgcccccccggcaacgacggcctgcccggcgcccccggcatccccggcgagtgcggcgagaagggcgagcccggcgagagaggcccccccggcctgcccgcccacctggacgaggagctgcaggccaccctgcacgacttcagacaccagatcctgcagaccagaggcgccctgagcctgcagggcagcatcatgaccgtgggcgagaaggtgttcagcagcaacggccagagcatcaccttcgacgccatccaggaggcctgcgccagagccggcggcagaatcgccgtgcccagaaaccccgaggagaacgaggccatcgccagcttcgtgaagaagtacaacacctacgcctacgtgggcctgaccgagggccccagccccggcgacttcagatacagcgacggcacccccgtgaactacaccaactggtacagaggcgagcccgccggcagaggcaaggagcagtgcgtggagatgtacaccgacggccagtggaacgacagaaactgcctgtacagcagactgaccatctgcgagttctag

SEQ ID NO: 101295 - DNA, 747 bp, synthetic construct
  misc_feature 1..747: note = Description of Artificial Sequence: Synthetic coding sequence
  source 1..747: mol_type = other DNA
atgtggctgtgccccctggccctgaacctgatcctgatggccgccagcggcgccgtgtgcgaggtgaaggacgtgtgcgtgggcagccccggcatccccggcacccccggcagccacggcctgcccggcagagacggcagagacggcctgaagggcgaccccggcccccccggccccatgggcccccccggcgagatgccctgcccccccggcaacgacggcctgcccggcgcccccggcatccccggcgagtgcggcgagaagggcgagcccggcgagagaggcccccccggcctgcccgcccacctggacgaggagctgcaggccaccctgcacgacttcagacaccagatcctgcagaccagaggcgccctgagcctgcagggcagcatcatgaccgtgggcgagaaggtgttcagcagcaacggccagagcatcaccttcgacgccatccaggaggcctgcgccagagccggcggcagaatcgccgtgcccagaaaccccgaggagaacgaggccatcgccagcttcgtgaagaagtacaacacctacgcctacgtgggcctgaccgagggccccagccccggcgacttcagatacagcgacggcacccccgtgaactacaccaactggtacagaggcgagcccgccggcagaggcaaggagcagtgcgtggagatgtacaccgacggccagtggaacgacagaaactgcctgtacagcagactgaccatctgcgagttctag

SEQ ID NO: 101296 - DNA, 747 bp, synthetic construct; identical to SEQ ID NO: 101295
  misc_feature 1..747: note = Description of Artificial Sequence: Synthetic coding sequence
  source 1..747: mol_type = other DNA

SEQ ID NO: 101297 - DNA, 792 bp, synthetic construct
  misc_feature 1..792: note = Description of Artificial Sequence: Synthetic coding sequence
  source 1..792: mol_type = other DNA
atgagaccctgccaggtgcccggcgccgccaccggccccagagccatgtggctgtgccccctggccctgaacctgatcctgatggccgccagcggcgccgtgtgcgaggtgaaggacgtgtgcgtgggcagccccggcatccccggcacccccggcagccacggcctgcccggcagagacggcagagacggcctgaagggcgaccccggcccccccggccccatgggcccccccggcgagatgccctgcccccccggcaacgacggcctgcccggcgcccccggcatccccggcgagtgcggcgagaagggcgagcccggcgagagaggcccccccggcctgcccgcccacctggacgaggagctgcaggccaccctgcacgacttcagacaccagatcctgcagaccagaggcgccctgagcctgcagggcagcatcatgaccgtgggcgagaaggtgttcagcagcaacggccagagcatcaccttcgacgccatccaggaggcctgcgccagagccggcggcagaatcgccgtgcccagaaaccccgaggagaacgaggccatcgccagcttcgtgaagaagtacaacacctacgcctacgtgggcctgaccgagggccccagccccggcgacttcagatacagcgacggcacccccgtgaactacaccaactggtacagaggcgagcccgccggcagaggcaaggagcagtgcgtggagatgtacaccgacggccagtggaacgacagaaactgcctgtacagcagactgaccatctgcgagttctag

SEQ ID NO: 101298 - DNA, 747 bp, synthetic construct; identical to SEQ ID NO: 101295
  misc_feature 1..747: note = Description of Artificial Sequence: Synthetic coding sequence
  source 1..747: mol_type = other DNA

SEQ ID NO: 101299 - DNA, 477 bp, synthetic construct
  misc_feature 1..477: note = Description of Artificial Sequence: Synthetic coding sequence
  source 1..477: mol_type = other DNA
atgtggctgtgccccctggccctgaacctgatcctgatggccgccagcggcgccgtgtgcgaggtgaaggacgtgtgcgtgggcagccccggcatccccggcacccccggcagccacggcctgcccggcagagacggcagagacggcctgaagggcgaccccggcccccccggccccatgggcccccccggcgagatgccctgcccccccggcaacgacggcctgcccggcgcccccggcatccccggcgagtgcggcgagaagggcgagcccggcgagagaggcccccccggcctgcccgcccacctggacgaggagctgcaggccaccctgcacgacttcagacaccagatcctgcagaccagaggcgccctgagcctgcagggcagcatcatgaccgtgggcgagaaggtgttcagcagcaacggccagagcatcaccttcgacgccatccaggaggcctgcgccagagcctag

SEQ ID NO: 101300 - DNA, 477 bp, synthetic construct; identical to SEQ ID NO: 101299
  misc_feature 1..477: note = Description of Artificial Sequence: Synthetic coding sequence
  source 1..477: mol_type = other DNA

SEQ ID NO: 101301 - DNA, 747 bp, synthetic construct
  misc_feature 1..747: note = Description of Artificial Sequence: Synthetic coding sequence
  source 1..747: mol_type = other DNA
atgtggctgtgccccctggccctgaccctgatcctgatggccgccagcggcgccgcctgcgaggtgaaggacgtgtgcgtgggcagccccggcatccccggcacccccggcagccacggcctgcccggcagagacggcagagacggcgtgaagggcgaccccggcccccccggccccatgggcccccccggcgagaccccctgcccccccggcaacaacggcctgcccggcgcccccggcgtgcccggcgagagaggcgagaagggcgaggccggcgagagaggcccccccggcctgcccgcccacctggacgaggagctgcaggccaccctgcacgacttcagacaccagatcctgcagaccagaggcgccctgagcctgcagggcagcatcatgaccgtgggcgagaaggtgttcagcagcaacggccagagcatcaccttcgacgccatccaggaggcctgcgccagagccggcggcagaatcgccgtgcccagaaaccccgaggagaacgaggccatcgccagcttcgtgaagaagtacaacacctacgcctacgtgggcctgaccgagggccccagccccggcgacttcagatacagcgacggcacccccgtgaactacaccaactggtacagaggcgagcccgccggcagaggcaaggagcagtgcgtggagatgtacaccgacggccagtggaacgacagaaactgcctgtacagcagactgaccatctgcgagttctag

SEQ ID NO: 101302 - DNA, 747 bp, synthetic construct; identical to SEQ ID NO: 101301
  misc_feature 1..747: note = Description of Artificial Sequence: Synthetic coding sequence
  source 1..747: mol_type = other DNA

SEQ ID NO: 101303 - DNA, 477 bp, synthetic construct
  misc_feature 1..477: note = Description of Artificial Sequence: Synthetic coding sequence
  source 1..477: mol_type = other DNA
atgtggctgtgccccctggccctgaccctgatcctgatggccgccagcggcgccgcctgcgaggtgaaggacgtgtgcgtgggcagccccggcatccccggcacccccggcagccacggcctgcccggcagagacggcagagacggcgtgaagggcgaccccggcccccccggccccatgggcccccccggcgagaccccctgcccccccggcaacaacggcctgcccggcgcccccggcgtgcccggcgagagaggcgagaagggcgaggccggcgagagaggcccccccggcctgcccgcccacctggacgaggagctgcaggccaccctgcacgacttcagacaccagatcctgcagaccagaggcgccctgagcctgcagggcagcatcatgaccgtgggcgagaaggtgttcagcagcaacggccagagcatcaccttcgacgccatccaggaggcctgcgccagagcctag

SEQ ID NO: 101304 - DNA, 645 bp, synthetic construct
  misc_feature 1..645: note = Description of Artificial Sequence: Synthetic coding sequence
  source 1..645: mol_type = other DNA
atgagaccctgccaggtgcccggcgccgccaccggccccagagccatgtggctgtgccccctggccctgaccctgatcctgatggccgccagcggcgccgcctgcgaggtgaaggacgtgtgcgtgggcagccccggcatccccggcaagagaggcgagaagggcgaggccggcgagagaggcccccccggcctgcccgcccacctggacgaggagctgcaggccaccctgcacgacttcagacaccagatcctgcagaccagaggcgccctgagcctgcagggcagcatcatgaccgtgggcgagaaggtgttcagcagcaacggccagagcatcaccttcgacgccatccaggaggcctgcgccagagccggcggcagaatcgccgtgcccagaaaccccgaggagaacgaggccatcgccagcttcgtgaagaagtacaacacctacgcctacgtgggcctgaccgagggccccagccccggcgacttcagatacagcgacggcacccccgtgaactacaccaactggtacagaggcgagcccgccggcagaggcaaggagcagtgcgtggagatgtacaccgacggccagtggaacgacagaaactgcctgtacagcagactgaccatctgcgagttctag

SEQ ID NO: 101305 - DNA, 1146 bp, synthetic construct
  misc_feature 1..1146: note = Description of Artificial Sequence: Synthetic coding sequence
  source 1..1146: mol_type = other DNA
atggccgagagccacctgctgcagtggctgctgctgctgctgcccaccctgtgcggccccggcaccgccgcctggaccaccagcagcctggcctgcgcccagggccccgagttctggtgccagagcctggagcaggccctgcagtgcagagccctgggccactgcctgcaggaggtgtggggccacgtgggcgccgacgacctgtgccaggagtgcgaggacatcgtgcacatcctgaacaagatggccaaggaggccatcttccaggacaccatgagaaagttcctggagcaggagtgcaacgtgctgcccctgaagctgctgatgccccagtgcaaccaggtgctggacgactacttccccctggtgatcgactacttccagaaccagaccgacagcaacggcatctgcatgcacctgggcctgtgcaagagcagacagcccgagcccgagcaggagcccggcatgagcgaccccctgcccaagcccctgagagaccccctgcccgaccccctgctggacaagctggtgctgcccgtgctgcccggcgccctgcaggccagacccggcccccacacccaggacctgagcgagcagcagttccccatccccctgccctactgctggctgtgcagagccctgatcaagagaatccaggccatgatccccaagggcgccctggccgtggccgtggcccaggtgtgcagagtggtgcccctggtggccggcggcatctgccagtgcctggccgagagatacagcgtgatcctgctggacaccctgctgggcagaatgctgccccagctggtgtgcagactggtgctgagatgcagcatggacgacagcgccggccccagaagccccaccggcgagtggctgcccagagacagcgagtgccacctgtgcatgagcgtgaccacccaggccggcaacagcagcgagcaggccatcccccaggccatgctgcaggcctgcgtgggcagctggctggacagagagaagtgcaagcagttcgtggagcagcacaccccccagctgctgaccctggtgcccagaggctgggacgcccacaccacctgccaggccctgggcgtgtgcggcaccatgagcagccccctgcagtgcatccacagccccgacctgtag

SEQ ID NO: 101306 - DNA, 1128 bp, synthetic construct
  misc_feature 1..1128: note = Description of Artificial Sequence: Synthetic coding sequence
  source 1..1128: mol_type = other DNA
atgctgctgttcctgctgagcgccctggtgctgctgacccagcccctgggctacctggaggccgagatgaagacctacagccacagaaccatgcccagcgcctgcaccctggtgatgtgcagcagcgtggagagcggcctgcccggcagagacggcagagacggcagagagggccccagaggcgagaagggcgaccccggcctgcccggcgccgccggccaggccggcatgcccggccaggccggccccgtgggccccaagggcgacaacggcagcgtgggcgagcccggccccaagggcgacaccggccccagcggcccccccggcccccccggcgtgcccggccccgccggcagagagggccccctgggcaagcagggcaacatcggcccccagggcaagcccggccccaagggcgaggccggccccaagggcgaggtgggcgcccccggcatgcagggcagcgccggcgccagaggcctggccggccccaagggcgagagaggcgtgcccggcgagagaggcgtgcccggcaacaccggcgccgccggcagcgccggcgccatgggcccccagggcagccccggcgccagaggcccccccggcctgaagggcgacaagggcatccccggcgacaagggcgccaagggcgagagcggcctgcccgacgtggccagcctgagacagcaggtggaggccctgcagggccaggtgcagcacctgcaggccgccttcagccagtacaagaaggtggagctgttccccaacggccagagcgtgggcgagaagatcttcaagaccgccggcttcgtgaagcccttcaccgaggcccagctgctgtgcacccaggccggcggccagctggccagccccagaagcgccgccgagaacgccgccctgcagcagctggtggtggccaagaacgaggccgccttcctgagcatgaccgacagcaagaccgagggcaagttcacctaccccaccggcgagagcctggtgtacagcaactgggcccccggcgagcccaacgacgacggcggcagcgaggactgcgtggagatcttcaccaacggcaagtggaacgacagagcctgcggcgagaagagactggtggtgtgcgagttctag

SEQ ID NO: 101307 - DNA, 657 bp, synthetic construct
  misc_feature 1..657: note = Description of Artificial Sequence: Synthetic coding sequence
  source 1..657: mol_type = other DNA
atgttcctgagcaccagcaagcacggcagacaggaggccatgctgctgttcctgctgagcgccctggtgctgctgacccagcccctgggctacctggaggccgagatgaagacctacagccacagaaccatgcccagcgcctgcaccctggtgatgtgcagcagcgtggagagcggcctgcccggcagagacggcagagacggcagagagggccccagaggcgagaagggcgaccccggcctgcccggcgccgccggccaggccggcatgcccggccaggccggccccgtgggccccaagggcgacaacggcagcgtgggcgagcccggccccaagggcgacaccggccccagcggcccccccggcccccccggcgtgcccggccccgccggcagagagggccccctgggcaagcagggcaacatcggcccccagggcaagcccggccccaagggcgaggccggccccaagggcgaggtgggcgcccccggcatgcagggcagcgccggcgccagaggcctggccggccccaagggcgagagaggcgtgcccggcgagagaggcgtgcccggcaacaccggcgccgccggcagcgccggcgccatgggcccccagggcagccccggcgccagaggcccccccggcctgaagggctag

SEQ ID NO: 101308 - DNA, 903 bp, synthetic construct
  misc_feature 1..903: note = Description of Artificial Sequence: Synthetic coding sequence
  source 1..903: mol_type = other DNA
atggccgccgtggccgccctgcagctgggcctgagagccgccggcctgggcagagcccccgccagcgccgcctggagaagcgtgctgagagtgagccccagacccggcgtggcctggagacccagcagatgcggcagcagcgccgccgaggccagcgccaccaaggccgaggacgacagcttcctgcagtgggtgctgctgctgatccccgtgaccgccttcggcctgggcacctggcaggtgcagagaagaaagtggaagctgaacctgatcgccgagctggagagcagagtgctggccgagcccgtgcccctgcccgccgaccccatggagctgaagaacctggagtacagacccgtgaaggtgagaggctgcttcgaccacagcaaggagctgtacatgatgcccagaaccatggtggaccccgtgagagaggccagagagggcggcctgatcagcagcagcacccagagcggcgcctacgtggtgacccccttccactgcaccgacctgggcgtgaccatcctggtgaacagaggcttcgtgcccagaaagaaggtgaaccccgagaccagacagaagggccagatcgagggcgaggtggacctgatcggcatggtgagactgaccgagaccagacagcccttcgtgcccgagaacaaccccgagagaaaccactggcactacagagacctggaggccatggccagaatcaccggcgccgagcccatcttcatcgacgccaacttccagagcaccgtgcccggcggccccatcggcggccagaccagagtgaccctgagaaacgagcacctgcagtacatcgtgacctggtacggcctgagcgccgccaccagctacctgtggttcaagaagttcctgagaggcacccccggcgtgtag

SEQ ID NO: 101309 - DNA, 813 bp, synthetic construct
  misc_feature 1..813: note = Description of Artificial Sequence: Synthetic coding sequence
  source 1..813: mol_type = other DNA
gcccccgccagcgccgcctggagaagcgtgctgagagtgagccccagacccggcgtggcctggagacccagcagatgcggcagcagcgccgccgaggccagcgccaccaaggccgaggacgacagcttcctgcagtgggtgctgctgctgatccccgtgaccgccttcggcctgggcacctggcaggtgcagagaagaaagtggaagctgaacctgatcgccgagctggagagcagagtgctggccgagcccgtgcccctgcccgccgaccccatggagctgaagaacctggagtacagacccgtgaaggtgagaggctgcttcgaccacagcaaggagctgtacatgatgcccagaaccatggtggaccccgtgagagaggccagagagggcggcctgatcagcagcagcacccagagcggcgcctacgtggtgacccccttccactgcaccgacctgggcaagaaggtgaaccccgagaccagacagaagggccagatcgagggcgaggtggacctgatcggcatggtgagactgaccgagaccagacagcccttcgtgcccgagaacaaccccgagagaaaccactggcactacagagacctggaggccatggccagaatcaccggcgccgagcccatcttcatcgacgccaacttccagagcaccgtgcccggcggccccatcggcggccagaccagagtgaccctgagaaacgagcacctgcagtacatcgtgacctggtacggcctgagcgccgccaccagctacctgtggttcaagaagttcctgagaggcacccccggcgtgtag

SEQ ID NO: 101310 - DNA, 771 bp, synthetic construct
  misc_feature 1..771: note = Description of Artificial Sequence: Synthetic coding sequence
  source 1..771: mol_type = other DNA
atgagcgagctgcccggcgacgtgagagccttcctgagagagcaccccagcctgagactgcagaccgacgccagaaaggtgagatgcatcctgaccggccacgagctgccctgcagactgcccgagctgcaggtgtacaccagaggcaagaagtaccagagactggtgagagccagccccgccttcgactacgccgagttcgagccccacatcgtgcccagcaccaagaacccccaccagctgttctgcaagctgaccctgagacacatcaacaagtgccccgagcacgtgctgagacacacccagggcagaagataccagagagccctgtgcaagtacgaggagtgccagaagcagggcgtggagtacgtgcccgcctgcctggtgcacagaagaagaagaagagaggaccagatggacggcgacggccccagacccagagaggccttctgggagcccaccagcagcgacgagggcggcgccgccagcgacgacagcatgaccgacctgtacccccccgagctgttcaccagaaaggacctgggcagcaccgaggacggcgacggcaccgacgacttcctgaccgacaaggaggacgagaaggccaagccccccagagagaaggccaccgacgagagcagaagagagaccaccgtgtacagaggcctggtgcagaagagaggcaagaagcagctgggcagcctgaagaagaagttcaagagccaccacagaaagcccaagagcttcagcagctgcaagcagcccggctag

SEQ ID NO: 101311 - DNA, 810 bp, synthetic construct
  misc_feature 1..810: note = Description of Artificial Sequence: Synthetic coding sequence
  source 1..810: mol_type = other DNA
atgggccagaacgacctgatgggcaccgccgaggacttcgccgaccagttcctgagagtgaccaagcagtacctgccccacgtggccagactgtgcctgatcagcaccttcctggaggacggcatcagaatgtggttccagtggagcgagcagagagactacatcgacaccacctggaactgcggctacctgctggccagcagcttcgtgttcctgaacctgctgggccagctgaccggctgcgtgctggtgctgagcagaaacttcgtgcagtacgcctgcttcggcctgttcggcatcatcgccctgcagaccatcgcctacagcatcctgtgggacctgaagttcctgatgagaaacctggccctgggcggcggcctgctgctgctgctggccgagagcagaagcgagggcaagagcatgttcgccggcgtgcccaccatgagagagagcagccccaagcagtacatgcagctgggcggcagagtgctgctggtgctgatgttcatgaccctgctgcacttcgacgccagcttcttcagcatcgtgcagaacatcgtgggcaccgccctgatgatcctggtggccatcggcttcaagaccaagctggccgccctgaccctggtggtgtggctgttcgccatcaacgtgtacttcaacgccttctggaccatccccgtgtacaagcccatgcacgacttcctgaagtacgacttcttccagaccatgagcgtgatcggcggcctgctgctggtggtggccctgggccccggcggcgtgagcatggacgagaagaagaaggagtggtag

SEQ ID NO: 101312 - DNA, 561 bp, synthetic construct
  misc_feature 1..561: note = Description of Artificial Sequence: Synthetic coding sequence
  source 1..561: mol_type = other DNA
atgggccagaacgacctgatgggcaccgccgaggacttcgccgaccagttcctgagagtgaccaagcagtacctgccccacgtggccagactgtgcctgatcagcaccttcctggaggacggcatcagaatgtggttccagtggagcgagcagagagactacatcgacaccacctggaactgcggctacctgctggccagcagcttcgtgttcctgaacctgctgggccagctgaccggctgcgtgctggtgctgagcagaaacttcgtgcagtacgcctgcttcggcctgttcggcatcatcgccctgcagaccatcgcctacagcatcctgtgggacctgaagttcctgatgagaaacctggccctgggcggcggcctgctgctgctgctggccgagagcagaagcgagggcaagagcatgttcgccggcgtgcccaccatgagagagagcagccccaagcagtacatgcagctgggcggcagagtgctgctggtgctgatgttcatgaccctgctgcacttcgacgccagcttcttcagccagcccagccagcagtag

SEQ ID NO: 101313 - DNA, 567 bp, synthetic construct
  misc_feature 1..567: note = Description of Artificial Sequence: Synthetic coding sequence
  source 1..567: mol_type = other DNA
atgggccagaacgacctgatgggcaccgccgaggacttcgccgaccagttcctgagagtgaccaagcagtacctgccccacgtggccagactgtgcctgatcagcaccttcctggaggacggcatcagaatgtggttccagtggagcgagcagagagactacatcgacaccacctggaactgcggctacctgctggccagcagcttcgtgttcctgaacctgctgggccagctgaccggctgcgtgctggtgctgagcagaaacttcgtgcagtacgcctgcttcggcctgttcggcatcatcgccctgcagaccatcgcctacagcatcctgtgggacctgaagttcctgatgagaaacctggccctgggcggcggcctgctgctgctgctggccgagagcagaagcgagggcaagagcatgttcgccggcgtgcccaccatgagagagagcagccccaagcacacctgcctggccaagaccagaggcagacagggcctggtgagaggcggcttcaacaagaccgccagcttctacgtgagcagcagcctgcccctgccctggtag

SEQ ID NO: 101314 - DNA, 783 bp, synthetic construct
  misc_feature 1..783: note = Description of Artificial Sequence: Synthetic coding sequence
  source 1..783: mol_type = other DNA
atgagaagcctggccaccgagttcctgagagtgaccaagcagtacctgccccacgtggccagactgtgcctgatcagcaccttcctggaggacggcatcagaatgtggttccagtggagcgagcagagagactacatcgacaccacctggaactgcggctacctgctggccagcagcttcgtgttcctgaacctgctgggccagctgaccggctgcgtgctggtgctgagcagaaacttcgtgcagtacgcctgcttcggcctgttcggcatcatcgccctgcagaccatcgcctacagcatcctgtgggacctgaagttcctgatgagaaacctggccctgggcggcggcctgctgctgctgctggccgagagcagaagcgagggcaagagcatgttcgccggcgtgcccaccatgagagagagcagccccaagcagtacatgcagctgggcggcagagtgctgctggtgctgatgttcatgaccctgctgcacttcgacgccagcttcttcagcatcgtgcagaacatcgtgggcaccgccctgatgatcctggtggccatcggcttcaagaccaagctggccgccctgaccctggtggtgtggctgttcgccatcaacgtgtacttcaacgccttctggaccatccccgtgtacaagcccatgcacgacttcctgaagtacgacttcttccagaccatgagcgtgatcggcggcctgctgctggtggtggccctgggccccggcggcgtgagcatggacgagaagaagaaggagtggtag

SEQ ID NO: 101315 - DNA, 387 bp, synthetic construct
  misc_feature 1..387: note = Description of Artificial Sequence: Synthetic coding sequence
  source 1..387: mol_type = other DNA
atgggccagaacgacctgatgggcaccgccgaggacttcgccgaccagttcctgagagtgaccaagcagtacctgccccacgtggccagactgtgcctgatcagcaccttcctggaggacggcatcagaatgtggttccagtggagcgagcagagagactacatcgacaccacctggaactgcggctacctgctggccagcagcttcgtgttcctgaacctgctgggccagctgaccggctgcgtgctggtgctgagcagaaacttcgtgcagtacgcctgcttcggcctgttcggcatcatcgccctgcagaccatcgcctacagcatcctgtgggacctgaagttcctgatgagactgagcagaaccagctgggcccagctgtag

SEQ ID NO: 101316 - DNA, 1086 bp, synthetic construct
  misc_feature 1..1086: note = Description of Artificial Sequence: Synthetic coding sequence
  source 1..1086: mol_type = other DNA
atggccagcctgctggccaaggacgcctacctgcagagcctggccaagaagatctgcagccacagcgcccccgagcagcaggccagaaccagagccggcaagacccagggcagcgagaccgccggcccccccaagaagaagagaaagaagacccagaagaagttcagaaagagagaggagaaggccgccgagcacaaggccaagagcctgggcgagaagagccccgccgccagcggcgccagaagacccgaggccgccaaggaggaggccgcctgggccagcagcagcgccggcaaccccgccgacggcctggccaccgagcccgagagcgtgttcgccctggacgtgctgagacagagactgcacgagaagatccaggaggccagaggccagggcagcgccaaggagctgagccccgccgccctggagaagagaagaagaagaaagcaggagagagacagaaagaagagaaagagaaaggagctgagagccaaggagaaggccagaaaggccgaggaggccaccgaggcccaggaggtggtggaggccacccccgagggcgcctgcaccgagcccagagagccccccggcctgatcttcaacaaggtggaggtgagcgaggacgagcccgccagcaaggcccagagaagaaaggagaagagacagagagtgaagggcaacctgacccccctgaccggcagaaactacagacagctgctggagagactgcaggccagacagagcagactggacgagctgagaggccaggacgagggcaaggcccaggagctggaggccaagatgaagtggaccaacctgctgtacaaggccgagggcgtgaagatcagagacgacgagagactgctgcaggaggccctgaagagaaaggagaagagaagagcccagagacagagaagatgggagaagagaaccgccggcgtggtggagaagatgcagcagagacaggacagaagaagacagaacctgagaagaaagaaggccgccagagccgagagaagactgctgagagccagaaagaagggcagaatcctgccccaggacctggagagagccggcctggtgtag

SEQ ID NO: 101317 - DNA, 789 bp, synthetic construct
  misc_feature 1..789: note = Description of Artificial Sequence: Synthetic coding sequence
  source 1..789: mol_type = other DNA
atggccatgagcagcggcggcagcggcggcggcgtgcccgagcaggaggacagcgtgctgttcagaagaggcaccggccagagcgacgacagcgacatctgggacgacaccgccctgatcaaggcctacgacaaggccgtggccagcttcaagcacgccctgaagaacggcgacatctgcgagaccagcggcaagcccaagaccacccccaagagaaagcccgccaagaagaacaagagccagaagaagaacaccgccgccagcctgcagcagtggaaggtgggcgacaagtgcagcgccatctggagcgaggacggctgcatctaccccgccaccatcgccagcatcgacttcaagagagagacctgcgtggtggtgtacaccggctacggcaacagagaggagcagaacctgagcgacctgctgagccccatctgcgaggtggccaacaacatcgagcagaacgcccaggagaacgagaacgagagccaggtgagcaccgacgagagcgagaacagcagaagccccggcaacaagagcgacaacatcaagcccaagagcgccccctggaacagcttcctgcccccccccccccccatgcccggccccagactgggccccggcaagatcatccccccccccccccccatctgccccgacagcctggacgacgccgacgccctgggcagcatgctgatcagctggtacatgagcggctaccacaccggctactacatgggcttcagacagaaccagaaggagggcagatgcagccacagcctgaactag

SEQ ID NO: 101318 - DNA, 885 bp, synthetic construct
  misc_feature 1..885: note = Description of Artificial Sequence: Synthetic coding sequence
  source 1..885: mol_type = other DNA
atggccatgagcagcggcggcagcggcggcggcgtgcccgagcaggaggacagcgtgctgttcagaagaggcaccggccagagcgacgacagcgacatctgggacgacaccgccctgatcaaggcctacgacaaggccgtggccagcttcaagcacgccctgaagaacggcgacatctgcgagaccagcggcaagcccaagaccacccccaagagaaagcccgccaagaagaacaagagccagaagaagaacaccgccgccagcctgcagcagtggaaggtgggcgacaagtgcagcgccatctggagcgaggacggctgcatctaccccgccaccatcgccagcatcgacttcaagagagagacctgcgtggtggtgtacaccggctacggcaacagagaggagcagaacctgagcgacctgctgagccccatctgcgaggtggccaacaacatcgagcagaacgcccaggagaacgagaacgagagccaggtgagcaccgacgagagcgagaacagcagaagccccggcaacaagagcgacaacatcaagcccaagagcgccccctggaacagcttcctgcccccccccccccccatgcccggccccagactgggccccggcaagcccggcctgaagttcaacggccccccccccccccccccccccccccccccccacctgctgagctgctggctgccccccttccccagcggcccccccatcatccccccccccccccccatctgccccgacagcctggacgacgccgacgccctgggcagcatgctgatcagctggtacatgagcggctaccacaccggctactacatgggcttcagacagaaccagaaggagggcagatgcagccacagcctgaactag

SEQ ID NO: 101319 - DNA, 789 bp, synthetic construct; identical to SEQ ID NO: 101317
  misc_feature 1..789: note = Description of Artificial Sequence: Synthetic coding sequence
  source 1..789: mol_type = other DNA

SEQ ID NO: 101320 - DNA, 849 bp, synthetic construct
  misc_feature 1..849: note = Description of Artificial Sequence: Synthetic coding sequence
  source 1..849: mol_type = other DNA
atggccatgagcagcggcggcagcggcggcggcgtgcccgagcaggaggacagcgtgctgttcagaagaggcaccggccagagcgacgacagcgacatctgggacgacaccgccctgatcaaggcctacgacaaggccgtggccagcttcaagcacgccctgaagaacggcgacatctgcgagaccagcggcaagcccaagaccacccccaagagaaagcccgccaagaagaacaagagccagaagaagaacaccgccgccagcctgcagcagtggaaggtgggcgacaagtgcagcgccatctggagcgaggacggctgcatctaccccgccaccatcgccagcatcgacttcaagagagagacctgcgtggtggtgtacaccggctacggcaacagagaggagcagaacctgagcgacctgctgagccccatctgcgaggtggccaacaacatcgagcagaacgcccaggagaacgagaacgagagccaggtgagcaccgacgagagcgagaacagcagaagccccggcaacaagagcgacaacatcaagcccaagagcgccccctggaacagcttcctgcccccccccccccccatgcccggccccagactgggccccggcaagcccggcctgaagttcaacggccccccccccccccccccccccccccccccccacctgctgagctgctggctgccccccttccccagcggcccccccatcatccccccccccccccccatctgccccgacagcctggacgacgccgacgccctgggcagcatgctgatcagctggtacatgagcggctaccacaccggctactacatggagatgctggcctag

SEQ ID NO: 101321 - DNA, 885 bp, synthetic construct
  misc_feature 1..885: note = Description of Artificial Sequence: Synthetic coding sequence
  source 1..885: mol_type = other DNA
atggccatgagcagcggcggcagcggcggcggcgtgcccgagcaggaggacagcgtgctgttcagaagaggcaccggccagagcgacgacagcgacatctgggacgacaccgccctgatcaaggcctacgacaaggccgtggccagcttcaagcacgccctgaagaacggcgacatctgcgagaccagcggcaagcccaagaccacccccaagagaaagcccgccaagaagaacaagagccagaagaagaacaccgccgccagcctgcagcagtggaaggtgggcgacaagtgcagcgccatctggagcgaggacggctgcatctaccccgccaccatcgccagcatcgacttcaagagagagacctgcgtggtggtgtacaccggctacggcaacagagaggagcagaacctgagcgacctgctgagccccatctgcgaggtggccaacaacatcgagcagaacgcccaggagaacgagaacgagagccaggtgagcaccgacgagagcgagaacagcagaagccccggcaacaagagcgacaacatcaagcccaagagcgccccctggaacagcttcctgcccccccccccccccatgcccggccccagactgggccccggcaagcccggcctgaagttcaacggccccccccccccccccccccccccccccccccacctgctgagctgctggctgccccccttccccagcggcccccccatcatccccccccccccccccatctgccccgacagcctggacgacgccgacgccctgggcagcatgctgatcagctggtacatgagcggctaccacaccggctactacatgaccggcttccactgcgtgagccaggacggcctgaacctgctgaccccctag

SEQ ID NO: 101322 - DNA, 684 bp, synthetic construct
  misc_feature 1..684: note = Description of Artificial Sequence: Synthetic coding sequence
  source 1..684: mol_type = other DNA
atggccatgagcagcggcggcagcggcggcggcgtgcccgagcaggaggacagcgtgctgttcagaagaggcaccggccagagcgacgacagcgacatctgggacgacaccgccctgatcaaggcctacgacaaggccgtggccagcttcaagcacgccctgaagaacggcgacatctgcgagaccagcggcaagcccaagaccacccccaagagaaagcccgccaagaagaacaagagccagaagaagaacaccgccgccagcctgcagcagaacgagaacgagagccaggtgagcaccgacgagagcgagaacagcagaagccccggcaacaagagcgacaacatcaagcccaagagcgccccctggaacagcttcctgcccccccccccccccatgcccggccccagactgggccccggcaagcccggcctgaagttcaacggccccccccccccccccccccccccccccccccacctgctgagctgctggctgccccccttccccagcggcccccccatcatccccccccccccccccatctgccccgacagcctggacgacgccgacgccctgggcagcatgctgatcagctggtacatgagcggctaccacaccggctactacatgggcttcagacagaaccagaaggagggcagatgcagccacagcctgaactag

SEQ ID NO: 101323 - DNA, 849 bp, synthetic construct; identical to SEQ ID NO: 101320
  misc_feature 1..849: note = Description of Artificial Sequence: Synthetic coding sequence
  source 1..849: mol_type = other DNA

SEQ ID NO: 101324 - DNA, 789 bp, synthetic construct; identical to SEQ ID NO: 101317
  misc_feature 1..789: note = Description of Artificial Sequence: Synthetic coding sequence
  source 1..789: mol_type = other DNA

SEQ ID NO: 101325 - DNA, 885 bp, synthetic construct; identical to SEQ ID NO: 101318
  misc_feature 1..885: note = Description of Artificial Sequence: Synthetic coding sequence
  source 1..885: mol_type = other DNA

SEQ ID NO: 101326 - DNA, 885 bp, synthetic construct; identical to SEQ ID NO: 101321
  misc_feature 1..885: note = Description of Artificial Sequence: Synthetic coding sequence
  source 1..885: mol_type = other DNA

SEQ ID NO: 101327 - DNA, 684 bp, synthetic construct; identical to SEQ ID NO: 101322
  misc_feature 1..684: note = Description of Artificial Sequence: Synthetic coding sequence
  source 1..684: mol_type = other DNA

SEQ ID NO: 101328 - DNA, 4494 bp, synthetic construct
  misc_feature 1..4494: note = Description of Artificial Sequence: Synthetic coding sequence
  source 1..4494: mol_type = other DNA
atgcccagatgcatcgcccacttctgcgagaagccccccagcgtgagctacagcatcctggagagcgtgagcaaggccaagttcgccgccggcagcgtggtgagcttcaagtgcatggagggcttcgtgctgaacaccagcgccaagatcgagtgcatgagaggcggccagtggaaccccagccccatgagcatccagtgcatccccgtgagatgcggcgagccccccagcatcatgaacggctacgccagcggcagcaactacagcttcggcgccatggtggcctacagctgcaacaagggcttctacatcaagggcgagaagaagagcacctgcgaggccaccggccagtggagcagccccatccccacctgccaccccgtgagctgcggcgagccccccaaggtggagaacggcttcctggagcacaccaccggcagaatcttcgagagcgaggtgagataccagtgcaaccccggctacaagagcgtgggcagccccgtgttcgtgtgccaggccaacagacactggcacagcgagagccccctgatgtgcgtgcccctggactgcggcaagcccccccccatccagaacggcttcatgaagggcgagaacttcgaggtgggcagcaaggtgcagttcttctgcaacgagggctacgagctggtgggcgacagcagctggacctgccagaagagcggcaagtggaacaagaagagcaaccccaagtgcatgcccgccaagtgccccgagccccccctgctggagaaccagctggtgctgaaggagctgaccaccgaggtgggcgtggtgaccttcagctgcaaggagggccacgtgctgcagggccccagcgtgctgaagtgcctgcccagccagcagtggaacgacagcttccccgtgtgcaagatcgtgctgtgcacccccccccccctgatcagcttcggcgtgcccatccccagcagcgccctgcacttcggcagcaccgtgaagtacagctgcgtgggcggcttcttcctgagaggcaacagcaccaccctgtgccagcccgacggcacctggagcagccccctgcccgagtgcgtgcccgtggagtgcccccagcccgaggagatccccaacggcatcatcgacgtgcagggcctggcctacctgagcaccgccctgtacacctgcaagcccggcttcgagctggtgggcaacaccaccaccctgtgcggcgagaacggccactggctgggcggcaagcccacctgcaaggccatcgagtgcctgaagcccaaggagatcctgaacggcaagttcagctacaccgacctgcactacggccagaccgtgacctacagctgcaacagaggcttcagactggagggccccagcgccctgacctgcctggagaccggcgactgggacgtggacgcccccagctgcaacgccatccactgcgacagcccccagcccatcgagaacggcttcgtggagggcgccgactacagctacggcgccatcatcatctacagctgcttccccggcttccaggtggccggccacgccatgcagacctgcgaggagagcggctggagcagcagcatccccacctgcatgcccatcgactgcggcctgcccccccacatcgacttcggcgactgcaccaagctgaaggacgaccagggctacttcgagcaggaggacgacatgatggaggtgccctacgtgaccccccaccccccctaccacctgggcgccgtggccaagacctgggagaacaccaaggagagccccgccacccacagcagcaacttcctgtacggcaccatggtgagctacacctgcaaccccggctacgagctgctgggcaaccccgtgctgatctgccaggaggacggcacctggaacggcagcgcccccagctgcatcagcatcgagtgcgacctgcccaccgcccccgagaacggcttcctgagattcaccgagaccagcatgggcagcgccgtgcagtacagctgcaagcccggccacatcctggccggcagcgacctgagactgtgcctggagaacagaaagtggagcggcgccagccccagatgcgaggccatcagctgcaagaagcccaaccccgtgatgaacggcagcatcaagggcagcaactacacctacctgagcaccctgtactacgagtgcgaccccggctacgtgctgaacggcaccgagagaagaacctgccaggacgacaagaactgggacgaggacgagcccatctgcatccccgtggactgcagcagcccccccgtgagcgccaacggccaggtgagaggcgacgagtacaccttccagaaggagatcgagtacacctgcaacgagggcttcctgctggagggcgccagaagcagagtgtgcctggccaacggcagctggagcggcgccacccccgactgcgtgcccgtgagatgcgccacccccccccagctggccaacggcgtgaccgagggcctggactacggcttcatgaaggaggtgaccttccactgccacgagggctacatcctgcacggcgcccccaagctgacctgccagagcgacggcaactgggacgccgagatccccctgtgcaagcccgtgaactgcggcccccccgaggacctggcccacggcttccccaacggcttcagcttcatccacggcggccacatccagtaccagtgcttccccggctacaagctgcacggcaacagcagcagaagatgcctgagcaacggcagctggagcggcagcagccccagctgcctgccctgcagatgcagcacccccgtgatcgagtacggcaccgtgaacggcaccgacttcgactgcggcaaggccgccagaatccagtgcttcaagggcttcaagctgctgggcctgagcgagatcacctgcgaggccgacggccagtggagcagcggcttcccccactgcgagcacaccagctgcggcagcctgcccatgatccccaacgccttcatcagcgagaccagcagctggaaggagaacgtgatcacctacagctgcagaagcggctacgtgatccagggcagcagcgacctgatctgcaccgagaagggcgtgtggagccagccctaccccgtgtgcgagcccctgagctgcggcagcccccccagcgtggccaacgccgtggccaccggcgaggcccacacctacgagagcgaggtgaagctgagatgcctggagggctacaccatggacaccgacaccgacaccttcacctgccagaaggacggcagatggttccccgagagaatcagctgcagccccaagaagtgccccctgcccgagaacatcacccacatcctggtgcacggcgacgacttcagcgtgaacagacaggtgagcgtgagctgcgccgagggctacaccttcgagggcgtgaacatcagcgtgtgccagctggacggcacctgggagccccccttcagcgacgagagctgcagccccgtgagctgcggcaagcccgagagccccgagcacggcttcgtggtgggcagcaagtacaccttcgagagcaccatcatctaccagtgcgagcccggctacgagctggagggcaacagagagagagtgtgccaggagaacagacagtggagcggcggcgtggccatctgcaaggagaccagatgcgagacccccctggagttcctgaacggcaaggccgacatcgagaacagaaccaccggccccaacgtggtgtacagctgcaacagaggctacagcctggagggccccagcgaggcccactgcaccgagaacggcacctggagccaccccgtgcccctgtgcaagcccaacccctgccccgtgcccttcgtgatccccgagaacgccctgctgagcgagaaggagttctacgtggaccagaacgtgagcatcaagtgcagagagggcttcctgctgcagggccacggcatcatcacctgcaaccccgacgagacctggacccagaccagcgccaagtgcgagaagatcagctgcggcccccccgcccacgtggagaacgccatcgccagaggcgtgcactaccagtacggcgacatgatcacctacagctgctacagcggctacatgctggagggcttcctgagaagcgtgtgcctggagaacggcacctggaccagcccccccatctgcagagccgtgtgcagattcccctgccagaacggcggcatctgccagagacccaacgcctgcagctgccccgagggctggatgggcagactgtgcgaggagcccatctgcatcctgccctgcctgaacggcggcagatgcgtggccccctaccagtgcgactgcccccccggctggaccggcagcagatgccacaccgccgtgtgccagagcccctgcctgaacggcggcaagtgcgtgagacccaacagatgccactgcctgagcagctggaccggccacaactgcagcagaaagagaagaaccggcttctag

SEQ ID NO: 101329 - DNA, 4650 bp, synthetic construct
  misc_feature 1..4650: note = Description of Artificial Sequence: Synthetic coding sequence
  source 1..4650: mol_type = other DNA
atgtggcccagactggccttctgctgctggggcctggccctggtgagcggctgggccaccttccagcagatgagccccagcagaaacttcagcttcagactgttccccgagaccgcccccggcgcccccggcagcatccccgccccccccgcccccggcgacgaggccgccggcagcagagtggagagactgggccaggccttcagaagaagagtgagactgctgagagagctgagcgagagactggagctggtgttcctggtggacgacagcagcagcgtgggcgaggtgaacttcagaagcgagctgatgttcgtgagaaagctgctgagcgacttccccgtggtgcccaccgccaccagagtggccatcgtgaccttcagcagcaagaactacgtggtgcccagagtggactacatcagcaccagaagagccagacagcacaagtgcgccctgctgctgcaggagatccccgccatcagctacagaggcggcggcacctacaccaagggcgccttccagcaggccgcccagatcctgctgcacgccagagagaacagcaccaaggtggtgttcctgatcaccgacggctacagcaacggcggcgaccccagacccatcgccgccagcctgagagacagcggcgtggagatcttcaccttcggcatctggcagggcaacatcagagagctgaacgacatggccagcacccccaaggaggagcactgctacctgctgcacagcttcgaggagttcgaggccctggccagaagagccctgcacgaggacctgcccagcggcagcttcatccaggacgacatggtgcactgcagctacctgtgcgacgagggcaaggactgctgcgacagaatgggcagctgcaagtgcggcacccacaccggccacttcgagtgcatctgcgagaagggctactacggcaagggcctgcagtacgagtgcaccgcctgccccagcggcacctacaagcccgagggcagccccggcggcatcagcagctgcatcccctgccccgacgagaaccacaccagcccccccggcagcaccagccccgaggactgcgtgtgcagagagggctacagagccagcggccagacctgcgagctggtgcactgccccgccctgaagccccccgagaacggctacttcatccagaacacctgcaacaaccacttcaacgccgcctgcggcgtgagatgccaccccggcttcgacctggtgggcagcagcatcatcctgtgcctgcccaacggcctgtggagcggcagcgagagctactgcagagtgagaacctgcccccacctgagacagcccaagcacggccacatcagctgcagcaccagagagatgctgtacaagaccacctgcctggtggcctgcgacgagggctacagactggagggcagcgacaagctgacctgccagggcaacagccagtgggacggccccgagcccagatgcgtggagagacactgcagcaccttccagatgcccaaggacgtgatcatcagcccccacaactgcggcaagcagcccgccaagttcggcaccatctgctacgtgagctgcagacagggcttcatcctgagcggcgtgaaggagatgctgagatgcaccaccagcggcaagtggaacgtgggcgtgcaggccgccgtgtgcaaggacgtggaggccccccagatcaactgccccaaggacatcgaggccaagaccctggagcagcaggacagcgccaacgtgacctggcagatccccaccgccaaggacaacagcggcgagaaggtgagcgtgcacgtgcaccccgccttcacccccccctacctgttccccatcggcgacgtggccatcgtgtacaccgccaccgacctgagcggcaaccaggccagctgcatcttccacatcaaggtgatcgacgccgagccccccgtgatcgactggtgcagaagccccccccccgtgcaggtgagcgagaaggtgcacgccgccagctgggacgagccccagttcagcgacaacagcggcgccgagctggtgatcaccagaagccacacccagggcgacctgttcccccagggcgagaccatcgtgcagtacaccgccaccgaccccagcggcaacaacagaacctgcgacatccacatcgtgatcaagggcagcccctgcgagatccccttcacccccgtgaacggcgacttcatctgcacccccgacaacaccggcgtgaactgcaccctgacctgcctggagggctacgacttcaccgagggcagcaccgacaagtactactgcgcctacgaggacggcgtgtggaagcccacctacaccaccgagtggcccgactgcgccaagaagagattcgccaaccacggcttcaagagcttcgagatgttctacaaggccgccagatgcgacgacaccgacctgatgaagaagttcagcgaggccttcgagaccaccctgggcaagatggtgcccagcttctgcagcgacgccgaggacatcgactgcagactggaggagaacctgaccaagaagtactgcctggagtacaactacgactacgagaacggcttcgccatcggccccggcggctggggcgccgccaacagactggactacagctacgacgacttcctggacaccgtgcaggagaccgccaccagcatcggcaacgccaagagcagcagaatcaagagaagcgcccccctgagcgactacaagatcaagctgatcttcaacatcaccgccagcgtgcccctgcccgacgagagaaacgacaccctggagtgggagaaccagcagagactgctgcagaccctggagaccatcaccaacaagctgaagagaaccctgaacaaggaccccatgtacagcttccagctggccagcgagatcctgatcgccgacagcaacagcctggagaccaagaaggccagccccttctgcagacccggcagcgtgctgagaggcagaatgtgcgtgaactgccccctgggcacctactacaacctggagcacttcacctgcgagagctgcagaatcggcagctaccaggacgaggagggccagctggagtgcaagctgtgccccagcggcatgtacaccgagtacatccacagcagaaacatcagcgactgcaaggcccagtgcaagcagggcacctacagctacagcggcctggagacctgcgagagctgccccctgggcacctaccagcccaagttcggcagcagaagctgcctgagctgccccgagaacaccagcaccgtgaagagaggcgccgtgaacatcagcgcctgcggcgtgccctgccccgagggcaagttcagcagaagcggcctgatgccctgccacccctgccccagagactactaccagcccaacgccggcaaggccttctgcctggcctgccccttctacggcaccacccccttcgccggcagcagaagcatcaccgagtgcagcagcttcagcagcaccttcagcgccgccgaggagagcgtggtgccccccgccagcctgggccacatcaagaagagacacgagatcagcagcagagtgttccacgagtgcttcttcaacccctgccacaacagcggcacctgccagcagctgggcagaggctacgtgtgcctgtgccccctgggctacaccggcctgaagtgcgagaccgacatcgacgagtgcagccccctgccctgcctgaacaacggcgtgtgcaaggacctggtgggcgagttcatctgcgagtgccccagcggctacaccggccagagatgcgaggagaacatcaacgagtgcagcagcagcccctgcctgaacaagggcatctgcgtggacggcgtggccggctacagatgcacctgcgtgaagggcttcgtgggcctgcactgcgagaccgaggtgaacgagtgccagagcaacccctgcctgaacaacgccgtgtgcgaggaccaggtgggcggcttcctgtgcaagtgcccccccggcttcctgggcaccagatgcggcaagaacgtggacgagtgcctgagccagccctgcaagaacggcgccacctgcaaggacggcgccaacagcttcagatgcctgtgcgccgccggcttcaccggcagccactgcgagctgaacatcaacgagtgccagagcaacccctgcagaaaccaggccacctgcgtggacgagctgaacagctacagctgcaagtgccagcccggcttcagcggcaagagatgcgagaccgagcagagcaccggcttcaacctggacttcgaggtgagcggcatctacggctacgtgatgctggacggcatgctgcccagcctgcacgccctgacctgcaccttctggatgaagagcagcgacgacatgaactacggcacccccatcagctacgccgtggacaacggcagcgacaacaccctgctgctgaccgactacaacggctgggtgctgtacgtgaacggcagagagaagatcaccaactgccccagcgtgaacgacggcagatggcaccacatcgccatcacctggaccagcgccaacggcatctggaaggtgtacatcgacggcaagctgagcgacggcggcgccggcctgagcgtgggcctgcccatccccggcatgttctag

SEQ ID NO: 101330 - DNA, 2538 bp, synthetic construct
  misc_feature 1..2538: note = Description of Artificial Sequence: Synthetic coding sequence
  source 1..2538: mol_type = other DNA
atgagccccagcagaaacttcagcttcagactgttccccgagaccgcccccggcgcccccggcagcatccccgccccccccgcccccggcgacgaggccgccggcagcagagtggagagactgggccaggccttcagaagaagagtgagactgctgagagagctgagcgagagactggagctggtgttcctggtggacgacagcagcagcgtgggcgaggtgaacttcagaagcgagctgatgttcgtgagaaagctgctgagcgacttccccgtggtgcccaccgccaccagagtggccatcgtgaccttcagcagcaagaactacgtggtgcccagagtggactacatcagcaccagaagagccagacagcacaagtgcgccctgctgctgcaggagatccccgccatcagctacagaggcggcggcacctacaccaagggcgccttccagcaggccgcccagatcctgctgcacgccagagagaacagcaccaaggtggtgttcctgatcaccgacggctacagcaacggcggcgaccccagacccatcgccgccagcctgagagacagcggcgtggagatcttcaccttcggcatctggcagggcaacatcagagagctgaacgacatggccagcacccccaaggaggagcactgctacctgctgcacagcttcgaggagttcgaggccctggccagaagagccctgcacgaggacctgcccagcggcagcttcatccaggacgacatggtgcactgcagctacctgtgcgacgagggcaaggactgctgcgacagaatgggcagctgcaagtgcggcacccacaccggccacttcgagtgcatctgcgagaagggctactacggcaagggcctgcagtacgagtgcaccgcctgccccagcggcacctacaagcccgagggcagccccggcggcatcagcagctgcatcccctgccccgacgagaaccacaccagcccccccggcagcaccagccccgaggactgcgtgtgcagagagggctacagagccagcggccagacctgcgagctggtgcactgccccgccctgaagccccccgagaacggctacttcatccagaacacctgcaacaaccacttcaacgccgcctgcggcgtgagatgccaccccggcttcgacctggtgggcagcagcatcatcctgtgcctgcccaacggcctgtggagcggcagcgagagctactgcagagtgagaacctgcccccacctgagacagcccaagcacggccacatcagctgcagcaccagagagatgctgtacaagaccacctgcctggtggcctgcgacgagggctacagactggagggcagcgacaagctgacctgccagggcaacagccagtgggacggccccgagcccagatgcgtggagagacactgcagcaccttccagatgcccaaggacgtgatcatcagcccccacaactgcggcaagcagcccgccaagttcggcaccatctgctacgtgagctgcagacagggcttcatcctgagcggcgtgaaggagatgctgagatgcaccaccagcggcaagtggaacgtgggcgtgcaggccgccgtgtgcaaggacgtggaggccccccagatcaactgccccaaggacatcgaggccaagaccctggagcagcaggacagcgccaacgtgacctggcagatccccaccgccaaggacaacagcggcgagaaggtgagcgtgcacgtgcaccccgccttcacccccccctacctgttccccatcggcgacgtggccatcgtgtacaccgccaccgacctgagcggcaaccaggccagctgcatcttccacatcaaggtgatcgacgccgagccccccgtgatcgactggtgcagaagccccccccccgtgcaggtgagcgagaaggtgcacgccgccagctgggacgagccccagttcagcgacaacagcggcgccgagctggtgatcaccagaagccacacccagggcgacctgttcccccagggcgagaccatcgtgcagtacaccgccaccgaccccagcggcaacaacagaacctgcgacatccacatcgtgatcaagggcagcccctgcgagatccccttcacccccgtgaacggcgacttcatctgcacccccgacaacaccggcgtgaactgcaccctgacctgcctggagggctacgacttcaccgagggcagcaccgacaagtactactgcgcctacgaggacggcgtgtggaagcccacctacaccaccgagtggcccgactgcgccaagaagagattcgccaaccacggcttcaagagcttcgagatgttctacaaggccgccagatgcgacgacaccgacctgatgaagaagttcagcgaggccttcgagaccaccctgggcaagatggtgcccagcttctgcagcgacgccgaggacatcgactgcagactggaggagaacctgaccaagaagtactgcctggagtacaactacgactacgagaacggcttcgccatcggcaactag

SEQ ID NO: 101331 - DNA, 1548 bp, synthetic construct
  misc_feature 1..1548: note = Description of Artificial Sequence: Synthetic coding sequence
  source 1..1548: mol_type = other DNA
ctggagaaccagctggtgctgaaggagctgaccaccgaggtgggcgtggtgaccttcagctgcaaggagggccacgtgctgcagggccccagcgtgctgaagtgcctgcccagccagcagtggaacgacagcttccccgtgtgcaagatcgtgctgtgcacccccccccccctgatcagcttcggcgtgcccatccccagcagcgccctgcacttcggcagcaccgtgaagtacagctgcgtgggcggcttcttcctgagaggcaacagcaccaccctgtgccagcccgacggcacctggagcagccccctgcccgagtgcgtgcccgtggagtgcccccagcccgaggagatccccaacggcatcatcgacgtgcagggcctggcctacctgagcaccgccctgtacacctgcaagcccggcttcgagctggtgggcaacaccaccaccctgtgcggcgagaacggccactggctgggcggcaagcccacctgcaaggccatcgagtgcctgaagcccaaggagatcctgaacggcaagttcagctacaccgacctgcactacggccagaccgtgacctacagctgcaacagaggcttcagactggagggccccagcgccctgacctgcctggagaccggcgactgggacgtggacgcccccagctgcaacgccatccactgcgacagcccccagcccatcgagaacggcttcgtggagggcgccgactacagctacggcgccatcatcatctacagctgcttccccggcttccaggtggccggccacgccatgcagacctgcgaggagagcggctggagcagcagcatccccacctgcatgcccatcgactgcggcctgcccccccacatcgacttcggcgactgcaccaagctgaaggacgaccagggctacttcgagcaggaggacgacatgatggaggtgccctacgtgaccccccaccccccctaccacctgggcgccgtggccaagacctgggagaacaccaaggagagccccgccacccacagcagcaacttcctgtacggcaccatggtgagctacacctgcaaccccggctacgagctgctgggcaaccccgtgctgatctgccaggaggacggcacctggaacggcagcgcccccagctgcatcagcatcgagtgcgacctgcccaccgcccccgagaacggcttcctgagattcaccgagaccagcatgggcagcgccgtgcagtacagctgcaagcccggccacatcctggccggcagcgacctgagactgtgcctggagaacagaaagtggagcggcgccagccccagatgcgaggccatcagctgcaagaagcccaaccccgtgatgaacggcagcatcaagggcagcaactacacctacctgagcaccctgtactacgagtgcgaccccggctacgtgctgaacggcaccgagagaagaacctgccaggacgacaagaccggcatgagaatgagccccttcgccttcctgtggaccgccgtgcacccccagagccagcccatggccagatag

SEQ ID NO: 101332 - DNA, 10647 bp, synthetic construct
  misc_feature 1..10647: note = Description of Artificial Sequence: Synthetic coding sequence
  source 1..10647: mol_type = other DNA
atgagccccagcagaaacttcagcttcagactgttccccgagaccgcccccggcgcccccggcagcatccccgccccccccgcccccggcgacgaggccgccggcagcagagtggagagactgggccaggccttcagaagaagagtgagactgctgagagagctgagcgagagactggagctggtgttcctggtggacgacagcagcagcgtgggcgaggtgaacttcagaagcgagctgatgttcgtgagaaagctgctgagcgacttccccgtggtgcccaccgccaccagagtggccatcgtgaccttcagcagcaagaactacgtggtgcccagagtggactacatcagcaccagaagagccagacagcacaagtgcgccctgctgctgcaggagatccccgccatcagctacagaggcggcggcacctacaccaagggcgccttccagcaggccgcccagatcctgctgcacgccagagagaacagcaccaaggtggtgttcctgatcaccgacggctacagcaacggcggcgaccccagacccatcgccgccagcctgagagacagcggcgtggagatcttcaccttcggcatctggcagggcaacatcagagagctgaacgacatggccagcacccccaaggaggagcactgctacctgctgcacagcttcgaggagttcgaggccctggccagaagagccctgcacgaggacctgcccagcggcagcttcatccaggacgacatggtgcactgcagctacctgtgcgacgagggcaaggactgctgcgacagaatgggcagctgcaagtgcggcacccacaccggccacttcgagtgcatctgcgagaagggctactacggcaagggcctgcagtacgagtgcaccgcctgccccagcggcacctacaagcccgagggcagccccggcggcatcagcagctgcatcccctgccccgacgagaaccacaccagcccccccggcagcaccagccccgaggactgcgtgtgcagagagggctacagagccagcggccagacctgcgagctggtgcactgccccgccctgaagccccccgagaacggctacttcatccagaacacctgcaacaaccacttcaacgccgcctgcggcgtgagatgccaccccggcttcgacctggtgggcagcagcatcatcctgtgcctgcccaacggcctgtggagcggcagcgagagctactgcagagtgagaacctgcccccacctgagacagcccaagcacggccacatcagctgcagcaccagagagatgctgtacaagaccacctgcctggtggcctgcgacgagggctacagactggagggcagcgacaagctgacctgccagggcaacagccagtgggacggccccgagcccagatgcgtggagagacactgcagcaccttccagatgcccaaggacgtgatcatcagcccccacaactgcggcaagcagcccgccaagttcggcaccatctgctacgtgagctgcagacagggcttcatcctgagcggcgtgaaggagatgctgagatgcaccaccagcggcaagtggaacgtgggcgtgcaggccgccgtgtgcaaggacgtggaggccccccagatcaactgccccaaggacatcgaggccaagaccctggagcagcaggacagcgccaacgtgacctggcagatccccaccgccaaggacaacagcggcgagaaggtgagcgtgcacgtgcaccccgccttcacccccccctacctgttccccatcggcgacgtggccatcgtgtacaccgccaccgacctgagcggcaaccaggccagctgcatcttccacatcaaggtgatcgacgccgagccccccgtgatcgactggtgcagaagccccccccccgtgcaggtgagcgagaaggtgcacgccgccagctgggacgagccccagttcagcgacaacagcggcgccgagctggtgatcaccagaagccacacccagggcgacctgttcccccagggcgagaccatcgtgcagtacaccgccaccgaccccagcggcaacaacagaacctgcgacatccacatcgtgatcaagggcagcccctgcgagatccccttcacccccgtgaacggcgacttcatctgcacccccgacaacaccggcgtgaactgcaccctgacctgcctggagggctacgacttcaccgagggcagcaccgacaagtactactgcgcctacgaggacggcgtgtggaagcccacctacaccaccgagtggcccgactgcgccaagaagagattcgccaaccacggcttcaagagcttcgagatgttctacaaggccgccagatgcgacgacaccgacctgatgaagaagttcagcgaggccttcgagaccaccctgggcaagatggtgcccagcttctgcagcgacgccgaggacatcgactgcagactggaggagaacctgaccaagaagtactgcctggagtacaactacgactacgagaacggcttcgccatcggccccggcggctggggcgccgccaacagactggactacagctacgacgacttcctggacaccgtgcaggagaccgccaccagcatcggcaacgccaagagcagcagaatcaagagaagcgcccccctgagcgactacaagatcaagctgatcttcaacatcaccgccagcgtgcccctgcccgacgagagaaacgacaccctggagtgggagaaccagcagagactgctgcagaccctggagaccatcaccaacaagctgaagagaaccctgaacaaggaccccatgtacagcttccagctggccagcgagatcctgatcgccgacagcaacagcctggagaccaagaaggccagccccttctgcagacccggcagcgtgctgagaggcagaatgtgcgtgaactgccccctgggcacctactacaacctggagcacttcacctgcgagagctgcagaatcggcagctaccaggacgaggagggccagctggagtgcaagctgtgccccagcggcatgtacaccgagtacatccacagcagaaacatcagcgactgcaaggcccagtgcaagcagggcacctacagctacagcggcctggagacctgcgagagctgccccctgggcacctaccagcccaagttcggcagcagaagctgcctgagctgccccgagaacaccagcaccgtgaagagaggcgccgtgaacatcagcgcctgcggcgtgccctgccccgagggcaagttcagcagaagcggcctgatgccctgccacccctgccccagagactactaccagcccaacgccggcaaggccttctgcctggcctgccccttctacggcaccacccccttcgccggcagcagaagcatcaccgagtgcagcagcttcagcagcaccttcagcgccgccgaggagagcgtggtgccccccgccagcctgggccacatcaagaagagacacgagatcagcagccaggtgttccacgagtgcttcttcaacccctgccacaacagcggcacctgccagcagctgggcagaggctacgtgtgcctgtgccccctgggctacaccggcctgaagtgcgagaccgacatcgacgagtgcagccccctgccctgcctgaacaacggcgtgtgcaaggacctggtgggcgagttcatctgcgagtgccccagcggctacaccggccagagatgcgaggagaacatcaacgagtgcagcagcagcccctgcctgaacaagggcatctgcgtggacggcgtggccggctacagatgcacctgcgtgaagggcttcgtgggcctgcactgcgagaccgaggtgaacgagtgccagagcaacccctgcctgaacaacgccgtgtgcgaggaccaggtgggcggcttcctgtgcaagtgcccccccggcttcctgggcaccagatgcggcaagaacgtggacgagtgcctgagccagccctgcaagaacggcgccacctgcaaggacggcgccaacagcttcagatgcctgtgcgccgccggcttcaccggcagccactgcgagctgaacatcaacgagtgccagagcaacccctgcagaaaccaggccacctgcgtggacgagctgaacagctacagctgcaagtgccagcccggcttcagcggcaagagatgcgagaccgagcagagcaccggcttcaacctggacttcgaggtgagcggcatctacggctacgtgatgctggacggcatgctgcccagcctgcacgccctgacctgcaccttctggatgaagagcagcgacgacatgaactacggcacccccatcagctacgccgtggacaacggcagcgacaacaccctgctgctgaccgactacaacggctgggtgctgtacgtgaacggcagagagaagatcaccaactgccccagcgtgaacgacggcagatggcaccacatcgccatcacctggaccagcgccaacggcatctggaaggtgtacatcgacggcaagctgagcgacggcggcgccggcctgagcgtgggcctgcccatccccggcggcggcgccctggtgctgggccaggagcaggacaagaagggcgagggcttcagccccgccgagagcttcgtgggcagcatcagccagctgaacctgtgggactacgtgctgagcccccagcaggtgaagagcctggccaccagctgccccgaggagctgagcaagggcaacgtgctggcctggcccgacttcctgagcggcatcgtgggcaaggtgaagatcgacagcaagagcatcttctgcagcgactgccccagactgggcggcagcgtgccccacctgagaaccgccagcgaggacctgaagcccggcagcaaggtgaacctgttctgcgaccccggcttccagctggtgggcaaccccgtgcagtactgcctgaaccagggccagtggacccagcccctgccccactgcgagagaatcagctgcggcgtgcccccccccctggagaacggcttccacagcgccgacgacttctacgccggcagcaccgtgacctaccagtgcaacaacggctactacctgctgggcgacagcagaatgttctgcaccgacaacggcagctggaacggcgtgagccccagctgcctggacgtggacgagtgcgccgtgggcagcgactgcagcgagcacgccagctgcctgaacgtggacggcagctacatctgcagctgcgtgcccccctacaccggcgacggcaagaactgcgccgagcccatcaagtgcaaggcccccggcaaccccgagaacggccacagcagcggcgagatctacaccgtgggcgccgaggtgaccttcagctgccaggagggctaccagctgatgggcgtgaccaagatcacctgcctggagagcggcgagtggaaccacctgatcccctactgcaaggccgtgagctgcggcaagcccgccatccccgagaacggctgcatcgaggagctggccttcaccttcggcagcaaggtgacctacagatgcaacaagggctacaccctggccggcgacaaggagagcagctgcctggccaacagcagctggagccacagcccccccgtgtgcgagcccgtgaagtgcagcagccccgagaacatcaacaacggcaagtacatcctgagcggcctgacctacctgagcaccgccagctacagctgcgacaccggctacagcctgcagggccccagcatcatcgagtgcaccgccagcggcatctgggacagagccccccccgcctgccacctggtgttctgcggcgagccccccgccatcaaggacgccgtgatcaccggcaacaacttcaccttcagaaacaccgtgacctacacctgcaaggagggctacaccctggccggcctggacaccatcgagtgcctggccgacggcaagtggagcagaagcgaccagcagtgcctggccgtgagctgcgacgagccccccatcgtggaccacgccagccccgagaccgcccacagactgttcggcgacatcgccttctactactgcagcgacggctacagcctggccgacaacagccagctgctgtgcaacgcccagggcaagtgggtgccccccgagggccaggacatgcccagatgcatcgcccacttctgcgagaagccccccagcgtgagctacagcatcctggagagcgtgagcaaggccaagttcgccgccggcagcgtggtgagcttcaagtgcatggagggcttcgtgctgaacaccagcgccaagatcgagtgcatgagaggcggccagtggaaccccagccccatgagcatccagtgcatccccgtgagatgcggcgagccccccagcatcatgaacggctacgccagcggcagcaactacagcttcggcgccatggtggcctacagctgcaacaagggcttctacatcaagggcgagaagaagagcacctgcgaggccaccggccagtggagcagccccatccccacctgccaccccgtgagctgcggcgagccccccaaggtggagaacggcttcctggagcacaccaccggcagaatcttcgagagcgaggtgagataccagtgcaaccccggctacaagagcgtgggcagccccgtgttcgtgtgccaggccaacagacactggcacagcgagagccccctgatgtgcgtgcccctggactgcggcaagcccccccccatccagaacggcttcatgaagggcgagaacttcgaggtgggcagcaaggtgcagttcttctgcaacgagggctacgagctggtgggcgacagcagctggacctgccagaagagcggcaagtggaacaagaagagcaaccccaagtgcatgcccgccaagtgccccgagccccccctgctggagaaccagctggtgctgaaggagctgaccaccgaggtgggcgtggtgaccttcagctgcaaggagggccacgtgctgcagggccccagcgtgctgaagtgcctgcccagccagcagtggaacgacagcttccccgtgtgcaagatcgtgctgtgcacccccccccccctgatcagcttcggcgtgcccatccccagcagcgccctgcacttcggcagcaccgtgaagtacagctgcgtgggcggcttcttcctgagaggcaacagcaccaccctgtgccagcccgacggcacctggagcagccccctgcccgagtgcgtgcccgtggagtgcccccagcccgaggagatccccaacggcatcatcgacgtgcagggcctggcctacctgagcaccgccctgtacacctgcaagcccggcttcgagctggtgggcaacaccaccaccctgtgcggcgagaacggccactggctgggcggcaagcccacctgcaaggccatcgagtgcctgaagcccaaggagatcctgaacggcaagttcagctacaccgacctgcactacggccagaccgtgacctacagctgcaacagaggcttcagactggagggccccagcgccctgacctgcctggagaccggcgactgggacgtggacgcccccagctgcaacgccatccactgcgacagcccccagcccatcgagaacggcttcgtggagggcgccgactacagctacggcgccatcatcatctacagctgcttccccggcttccaggtggccggccacgccatgcagacctgcgaggagagcggctggagcagcagcatccccacctgcatgcccatcgactgcggcctgcccccccacatcgacttcggcgactgcaccaagctgaaggacgaccagggctacttcgagcaggaggacgacatgatggaggtgccctacgtgaccccccaccccccctaccacctgggcgccgtggccaagacctgggagaacaccaaggagagccccgccacccacagcagcaacttcctgtacggcaccatggtgagctacacctgcaaccccggctacgagctgctgggcaaccccgtgctgatctgccaggaggacggcacctggaacggcagcgcccccagctgcatcagcatcgagtgcgacctgcccaccgcccccgagaacggcttcctgagattcaccgagaccagcatgggcagcgccgtgcagtacagctgcaagcccggccacatcctggccggcagcgacctgagactgtgcctggagaacagaaagtggagcggcgccagccccagatgcgaggccatcagctgcaagaagcccaaccccgtgatgaacggcagcatcaagggcagcaactacacctacctgagcaccctgtactacgagtgcgaccccggctacgtgctgaacggcaccgagagaagaacctgccaggacgacaagaactgggacgaggacgagcccatctgcatccccgtggactgcagcagcccccccgtgagcgccaacggccaggtgagaggcgacgagtacaccttccagaaggagatcgagtacacctgcaacgagggcttcctgctggagggcgccagaagcagagtgtgcctggccaacggcagctggagcggcgccacccccgactgcgtgcccgtgagatgcgccacccccccccagctggccaacggcgtgaccgagggcctggactacggcttcatgaaggaggtgaccttccactgccacgagggctacatcctgcacggcgcccccaagctgacctgccagagcgacggcaactgggacgccgagatccccctgtgcaagcccgtgaactgcggcccccccgaggacctggcccacggcttccccaacggcttcagcttcatccacggcggccacatccagtaccagtgcttccccggctacaagctgcacggcaacagcagcagaagatgcctgagcaacggcagctggagcggcagcagccccagctgcctgccctgcagatgcagcacccccgtgatcgagtacggcaccgtgaacggcaccgacttcgactgcggcaaggccgccagaatccagtgcttcaagggcttcaagctgctgggcctgagcgagatcacctgcgaggccgacggccagtggagcagcggcttcccccactgcgagcacaccagctgcggcagcctgcccatgatccccaacgccttcatcagcgagaccagcagctggaaggagaacgtgatcacctacagctgcagaagcggctacgtgatccagggcagcagcgacctgatctgcaccgagaagggcgtgtggagccagccctaccccgtgtgcgagcccctgagctgcggcagcccccccagcgtggccaacgccgtggccaccggcgaggcccacacctacgagagcgaggtgaagctgagatgcctggagggctacaccatggacaccgacaccgacaccttcacctgccagaaggacggcagatggttccccgagagaatcagctgcagccccaagaagtgccccctgcccgagaacatcacccacatcctggtgcacggcgacgacttcagcgtgaacagacaggtgagcgtgagctgcgccgagggctacaccttcgagggcgtgaacatcagcgtgtgccagctggacggcacctgggagccccccttcagcgacgagagctgcagccccgtgagctgcggcaagcccgagagccccgagcacggcttcgtggtgggcagcaagtacaccttcgagagcaccatcatctaccagtgcgagcccggctacgagctggagggcaacagagagagagtgtgccaggagaacagacagtggagcggcggcgtggccatctgcaaggagaccagatgcgagacccccctggagttcctgaacggcaaggccgacatcgagaacagaaccaccggccccaacgtggtgtacagctgcaacagaggctacagcctggagggccccagcgaggcccactgcaccgagaacggcacctggagccaccccgtgcccctgtgcaagcccaacccctgccccgtgcccttcgtgatccccgagaacgccctgctgagcgagaaggagttctacgtggaccagaacgtgagcatcaagtgcagagagggcttcctgctgcagggccacggcatcatcacctgcaaccccgacgagacctggacccagaccagcgccaagtgcgagaagatcagctgcggcccccccgcccacgtggagaacgccatcgccagaggcgtgcactaccagtacggcgacatgatcacctacagctgctacagcggctacatgctggagggcttcctgagaagcgtgtgcctggagaacggcacctggaccagcccccccatctgcagagccgtgtgcagattcccctgccagaacggcggcatctgccagagacccaacgcctgcagctgccccgagggctggatgggcagactgtgcgaggagcccatctgcatcctgccctgcctgaacggcggcagatgcgtggccccctaccagtgcgactgcccccccggctggaccggcagcagatgccacaccgccgtgtgccagagcccctgcctgaacggcggcaagtgcgtgagacccaacagatgccactgcctgagcagctggaccggccacaactgcagcagaaagagaagaaccggcttctag

SEQ ID NO: 101333 - DNA, 10716 bp, synthetic construct
  misc_feature 1..10716: note = Description of Artificial Sequence: Synthetic coding sequence
  source 1..10716: mol_type = other DNA
atgtggcccagactggccttctgctgctggggcctggccctggtgagcggctgggccaccttccagcagatgagccccagcagaaacttcagcttcagactgttccccgagaccgcccccggcgcccccggcagcatccccgccccccccgcccccggcgacgaggccgccggcagcagagtggagagactgggccaggccttcagaagaagagtgagactgctgagagagctgagcgagagactggagctggtgttcctggtggacgacagcagcagcgtgggcgaggtgaacttcagaagcgagctgatgttcgtgagaaagctgctgagcgacttccccgtggtgcccaccgccaccagagtggccatcgtgaccttcagcagcaagaactacgtggtgcccagagtggactacatcagcaccagaagagccagacagcacaagtgcgccctgctgctgcaggagatccccgccatcagctacagaggcggcggcacctacaccaagggcgccttccagcaggccgcccagatcctgctgcacgccagagagaacagcaccaaggtggtgttcctgatcaccgacggctacagcaacggcggcgaccccagacccatcgccgccagcctgagagacagcggcgtggagatcttcaccttcggcatctggcagggcaacatcagagagctgaacgacatggccagcacccccaaggaggagcactgctacctgctgcacagcttcgaggagttcgaggccctggccagaagagccctgcacgaggacctgcccagcggcagcttcatccaggacgacatggtgcactgcagctacctgtgcgacgagggcaaggactgctgcgacagaatgggcagctgcaagtgcggcacccacaccggccacttcgagtgcatctgcgagaagggctactacggcaagggcctgcagtacgagtgcaccgcctgccccagcggcacctacaagcccgagggcagccccggcggcatcagcagctgcatcccctgccccgacgagaaccacaccagcccccccggcagcaccagccccgaggactgcgtgtgcagagagggctacagagccagcggccagacctgcgagctggtgcactgccccgccctgaagccccccgagaacggctacttcatccagaacacctgcaacaaccacttcaacgccgcctgcggcgtgagatgccaccccggcttcgacctggtgggcagcagcatcatcctgtgcctgcccaacggcctgtggagcggcagcgagagctactgcagagtgagaacctgcccccacctgagacagcccaagcacggccacatcagctgcagcaccagagagatgctgtacaagaccacctgcctggtggcctgcgacgagggctacagactggagggcagcgacaagctgacctgccagggcaacagccagtgggacggccccgagcccagatgcgtggagagacactgcagcaccttccagatgcccaaggacgtgatcatcagcccccacaactgcggcaagcagcccgccaagttcggcaccatctgctacgtgagctgcagacagggcttcatcctgagcggcgtgaaggagatgctgagatgcaccaccagcggcaagtggaacgtgggcgtgcaggccgccgtgtgcaaggacgtggaggccccccagatcaactgccccaaggacatcgaggccaagaccctggagcagcaggacagcgccaacgtgacctggcagatccccaccgccaaggacaacagcggcgagaaggtgagcgtgcacgtgcaccccgccttcacccccccctacctgttccccatcggcgacgtggccatcgtgtacaccgccaccgacctgagcggcaaccaggccagctgcatcttccacatcaaggtgatcgacgccgagccccccgtgatcgactggtgcagaagccccccccccgtgcaggtgagcgagaaggtgcacgccgccagctgggacgagccccagttcagcgacaacagcggcgccgagctggtgatcaccagaagccacacccagggcgacctgttcccccagggcgagaccatcgtgcagtacaccgccaccgaccccagcggcaacaacagaacctgcgacatccacatcgtgatcaagggcagcccctgcgagatccccttcacccccgtgaacggcgacttcatctgcacccccgacaacaccggcgtgaactgcaccctgacctgcctggagggctacgacttcaccgagggcagcaccgacaagtactactgcgcctacgaggacggcgtgtggaagcccacctacaccaccgagtggcccgactgcgccaagaagagattcgccaaccacggcttcaagagcttcgagatgttctacaaggccgccagatgcgacgacaccgacctgatgaagaagttcagcgaggccttcgagaccaccctgggcaagatggtgcccagcttctgcagcgacgccgaggacatcgactgcagactggaggagaacctgaccaagaagtactgcctggagtacaactacgactacgagaacggcttcgccatcggccccggcggctggggcgccgccaacagactggactacagctacgacgacttcctggacaccgtgcaggagaccgccaccagcatcggcaacgccaagagcagcagaatcaagagaagcgcccccctgagcgactacaagatcaagctgatcttcaacatcaccgccagcgtgcccctgcccgacgagagaaacgacaccctggagtgggagaaccagcagagactgctgcagaccctggagaccatcaccaacaagctgaagagaaccctgaacaaggaccccatgtacagcttccagctggccagcgagatcctgatcgccgacagcaacagcctggagaccaagaaggccagccccttctgcagacccggcagcgtgctgagaggcagaatgtgcgtgaactgccccctgggcacctactacaacctggagcacttcacctgcgagagctgcagaatcggcagctaccaggacgaggagggccagctggagtgcaagctgtgccccagcggcatgtacaccgagtacatccacagcagaaacatcagcgactgcaaggcccagtgcaagcagggcacctacagctacagcggcctggagacctgcgagagctgccccctgggcacctaccagcccaagttcggcagcagaagctgcctgagctgccccgagaacaccagcaccgtgaagagaggcgccgtgaacatcagcgcctgcggcgtgccctgccccgagggcaagttcagcagaagcggcctgatgccctgccacccctgccccagagactactaccagcccaacgccggcaaggccttctgcctggcctgccccttctacggcaccacccccttcgccggcagcagaagcatcaccgagtgcagcagcttcagcagcaccttcagcgccgccgaggagagcgtggtgccccccgccagcctgggccacatcaagaagagacacgagatcagcagccaggtgttccacgagtgcttcttcaacccctgccacaacagcggcacctgccagcagctgggcagaggctacgtgtgcctgtgccccctgggctacaccggcctgaagtgcgagaccgacatcgacgagtgcagccccctgccctgcctgaacaacggcgtgtgcaaggacctggtgggcgagttcatctgcgagtgccccagcggctacaccggccagagatgcgaggagaacatcaacgagtgcagcagcagcccctgcctgaacaagggcatctgcgtggacggcgtggccggctacagatgcacctgcgtgaagggcttcgtgggcctgcactgcgagaccgaggtgaacgagtgccagagcaacccctgcctgaacaacgccgtgtgcgaggaccaggtgggcggcttcctgtgcaagtgcccccccggcttcctgggcaccagatgcggcaagaacgtggacgagtgcctgagccagccctgcaagaacggcgccacctgcaaggacggcgccaacagcttcagatgcctgtgcgccgccggcttcaccggcagccactgcgagctgaacatcaacgagtgccagagcaacccctgcagaaaccaggccacctgcgtggacgagctgaacagctacagctgcaagtgccagcccggcttcagcggcaagagatgcgagaccgagcagagcaccggcttcaacctggacttcgaggtgagcggcatctacggctacgtgatgctggacggcatgctgcccagcctgcacgccctgacctgcaccttctggatgaagagcagcgacgacatgaactacggcacccccatcagctacgccgtggacaacggcagcgacaacaccctgctgctgaccgactacaacggctgggtgctgtacgtgaacggcagagagaagatcaccaactgccccagcgtgaacgacggcagatggcaccacatcgccatcacctggaccagcgccaacggcatctggaaggtgtacatcgacggcaagctgagcgacggcggcgccggcctgagcgtgggcctgcccatccccggcggcggcgccctggtgctgggccaggagcaggacaagaagggcgagggcttcagccccgccgagagcttcgtgggcagcatcagccagctgaacctgtgggactacgtgctgagcccccagcaggtgaagagcctggccaccagctgccccgaggagctgagcaagggcaacgtgctggcctggcccgacttcctgagcggcatcgtgggcaaggtgaagatcgacagcaagagcatcttctgcagcgactgccccagactgggcggcagcgtgccccacctgagaaccgccagcgaggacctgaagcccggcagcaaggtgaacctgttctgcgaccccggcttccagctggtgggcaaccccgtgcagtactgcctgaaccagggccagtggacccagcccctgccccactgcgagagaatcagctgcggcgtgcccccccccctggagaacggcttccacagcgccgacgacttctacgccggcagcaccgtgacctaccagtgcaacaacggctactacctgctgggcgacagcagaatgttctgcaccgacaacggcagctggaacggcgtgagccccagctgcctggacgtggacgagtgcgccgtgggcagcgactgcagcgagcacgccagctgcctgaacgtggacggcagctacatctgcagctgcgtgcccccctacaccggcgacggcaagaactgcgccgagcccatcaagtgcaaggcccccggcaaccccgagaacggccacagcagcggcgagatctacaccgtgggcgccgaggtgaccttcagctgccaggagggctaccagctgatgggcgtgaccaagatcacctgcctggagagcggcgagtggaaccacctgatcccctactgcaaggccgtgagctgcggcaagcccgccatccccgagaacggctgcatcgaggagctggccttcaccttcggcagcaaggtgacctacagatgcaacaagggctacaccctggccggcgacaaggagagcagctgcctggccaacagcagctggagccacagcccccccgtgtgcgagcccgtgaagtgcagcagccccgagaacatcaacaacggcaagtacatcctgagcggcctgacctacctgagcaccgccagctacagctgcgacaccggctacagcctgcagggccccagcatcatcgagtgcaccgccagcggcatctgggacagagccccccccgcctgccacctggtgttctgcggcgagccccccgccatcaaggacgccgtgatcaccggcaacaacttcaccttcagaaacaccgtgacctacacctgcaaggagggctacaccctggccggcctggacaccatcgagtgcctggccgacggcaagtggagcagaagcgaccagcagtgcctggccgtgagctgcgacgagccccccatcgtggaccacgccagccccgagaccgcccacagactgttcggcgacatcgccttctactactgcagcgacggctacagcctggccgacaacagccagctgctgtgcaacgcccagggcaagtgggtgccccccgagggccaggacatgcccagatgcatcgcccacttctgcgagaagccccccagcgtgagctacagcatcctggagagcgtgagcaaggccaagttcgccgccggcagcgtggtgagcttcaagtgcatggagggcttcgtgctgaacaccagcgccaagatcgagtgcatgagaggcggccagtggaaccccagccccatgagcatccagtgcatccccgtgagatgcggcgagccccccagcatcatgaacggctacgccagcggcagcaactacagcttcggcgccatggtggcctacagctgcaacaagggcttctacatcaagggcgagaagaagagcacctgcgaggccaccggccagtggagcagccccatccccacctgccaccccgtgagctgcggcgagccccccaaggtggagaacggcttcctggagcacaccaccggcagaatcttcgagagcgaggtgagataccagtgcaaccccggctacaagagcgtgggcagccccgtgttcgtgtgccaggccaacagacactggcacagcgagagccccctgatgtgcgtgcccctggactgcggcaagcccccccccatccagaacggcttcatgaagggcgagaacttcgaggtgggcagcaaggtgcagttcttctgcaacgagggctacgagctggtgggcgacagcagctggacctgccagaagagcggcaagtggaacaagaagagcaaccccaagtgcatgcccgccaagtgccccgagccccccctgctggagaaccagctggtgctgaaggagctgaccaccgaggtgggcgtggtgaccttcagctgcaaggagggccacgtgctgcagggccccagcgtgctgaagtgcctgcccagccagcagtggaacgacagcttccccgtgtgcaagatcgtgctgtgcacccccccccccctgatcagcttcggcgtgcccatccccagcagcgccctgcacttcggcagcaccgtgaagtacagctgcgtgggcggcttcttcctgagaggcaacagcaccaccctgtgccagcccgacggcacctggagcagccccctgcccgagtgcgtgcccgtggagtgcccccagcccgaggagatccccaacggcatcatcgacgtgcagggcctggcctacctgagcaccgccctgtacacctgcaagcccggcttcgagctggtgggcaacaccaccaccctgtgcggcgagaacggccactggctgggcggcaagcccacctgcaaggccatcgagtgcctgaagcccaaggagatcctgaacggcaagttcagctacaccgacctgcactacggccagaccgtgacctacagctgcaacagaggcttcagactggagggccccagcgccctgacctgcctggagaccggcgactgggacgtggacgcccccagctgcaacgccatccactgcgacagcccccagcccatcgagaacggcttcgtggagggcgccgactacagctacggcgccatcatcatctacagctgcttccccggcttccaggtggccggccacgccatgcagacctgcgaggagagcggctggagcagcagcatccccacctgcatgcccatcgactgcggcctgcccccccacatcgacttcggcgactgcaccaagctgaaggacgaccagggctacttcgagcaggaggacgacatgatggaggtgccctacgtgaccccccaccccccctaccacctgggcgccgtggccaagacctgggagaacaccaaggagagccccgccacccacagcagcaacttcctgtacggcaccatggtgagctacacctgcaaccccggctacgagctgctgggcaaccccgtgctgatctgccaggaggacggcacctggaacggcagcgcccccagctgcatcagcatcgagtgcgacctgcccaccgcccccgagaacggcttcctgagattcaccgagaccagcatgggcagcgccgtgcagtacagctgcaagcccggccacatcctggccggcagcgacctgagactgtgcctggagaacagaaagtggagcggcgccagccccagatgcgaggccatcagctgcaagaagcccaaccccgtgatgaacggcagcatcaagggcagcaactacacctacctgagcaccctgtactacgagtgcgaccccggctacgtgctgaacggcaccgagagaagaacctgccaggacgacaagaactgggacgaggacgagcccatctgcatccccgtggactgcagcagcccccccgtgagcgccaacggccaggtgagaggcgacgagtacaccttccagaaggagatcgagtacacctgcaacgagggcttcctgctggagggcgccagaagcagagtgtgcctggccaacggcagctggagcggcgccacccccgactgcgtgcccgtgagatgcgccacccccccccagctggccaacggcgtgaccgagggcctggactacggcttcatgaaggaggtgaccttccactgccacgagggctacatcctgcacggcgcccccaagctgacctgccagagcgacggcaactgggacgccgagatccccctgtgcaagcccgtgaactgcggcccccccgaggacctggcccacggcttccccaacggcttcagcttcatccacggcggccacatccagtaccagtgcttccccggctacaagctgcacggcaacagcagcagaagatgcctgagcaacggcagctggagcggcagcagccccagctgcctgccctgcagatgcagcacccccgtgatcgagtacggcaccgtgaacggcaccgacttcgactgcggcaaggccgccagaatccagtgcttcaagggcttcaagctgctgggcctgagcgagatcacctgcgaggccgacggccagtggagcagcggcttcccccactgcgagcacaccagctgcggcagcctgcccatgatccccaacgccttcatcagcgagaccagcagctggaaggagaacgtgatcacctacagctgcagaagcggctacgtgatccagggcagcagcgacctgatctgcaccgagaagggcgtgtggagccagccctaccccgtgtgcgagcccctgagctgcggcagcccccccagcgtggccaacgccgtggccaccggcgaggcccacacctacgagagcgaggtgaagctgagatgcctggagggctacaccatggacaccgacaccgacaccttcacctgccagaaggacggcagatggttccccgagagaatcagctgcagccccaagaagtgccccctgcccgagaacatcacccacatcctggtgcacggcgacgacttcagcgtgaacagacaggtgagcgtgagctgcgccgagggctacaccttcgagggcgtgaacatcagcgtgtgccagctggacggcacctgggagccccccttcagcgacgagagctgcagccccgtgagctgcggcaagcccgagagccccgagcacggcttcgtggtgggcagcaagtacaccttcgagagcaccatcatctaccagtgcgagcccggctacgagctggagggcaacagagagagagtgtgccaggagaacagacagtggagcggcggcgtggccatctgcaaggagaccagatgcgagacccccctggagttcctgaacggcaaggccgacatcgagaacagaaccaccggccccaacgtggtgtacagctgcaacagaggctacagcctggagggccccagcgaggcccactgcaccgagaacggcacctggagccaccccgtgcccctgtgcaagcccaacccctgccccgtgcccttcgtgatccccgagaacgccctgctgagcgagaaggagttctacgtggaccagaacgtgagcatcaagtgcagagagggcttcctgctgcagggccacggcatcatcacctgcaaccccgacgagacctggacccagaccagcgccaagtgcgagaagatcagctgcggcccccccgcccacgtggagaacgccatcgccagaggcgtgcactaccagtacggcgacatgatcacctacagctgctacagcggctacatgctggagggcttcctgagaagcgtgtgcctggagaacggcacctggaccagcccccccatctgcagagccgtgtgcagattcccctgccagaacggcggcatctgccagagacccaacgcctgcagctgccccgagggctggatgggcagactgtgcgaggagcccatctgcatcctgccctgcctgaacggcggcagatgcgtggccccctaccagtgcgactgcccccccggctggaccggcagcagatgccacaccgccgtgtgccagagcccctgcctgaacggcggcaagtgcgtgagacccaacagatgccactgcctgagcagctggaccggccacaactgcagcagaaagagaagaaccggcttctag

SEQ ID NO: 101334 - DNA, 1356 bp, synthetic construct
  misc_feature 1..1356: note = Description of Artificial Sequence: Synthetic coding sequence
  source 1..1356: mol_type = other DNA
atggacttcgacgtgggcagaaccacccacctgagcagcagcccctgcagcgccagcaacggcggcgagagcggccaggtgagcaagagaagatgcctgatcggcgagagcggccacgacaccccctggtgcagccccatcaaggtgaagtacggcgacgtgtactgcagagccccccagggcggctactacaagaccgccctgggcaccagatgcgacatcagatgccagaagggctacgagctgcacggcagcagcctgctgatctgccagagcaacaagagatggagcgacaaggtgatctgcaagcagaagagatgccccaccctggccatgcccgccaacggcggcttcaagtgcgtggacggcgcctacttcaacagcagatgcgagtactactgcagccccggctacaccctgaagggcgagagaaccgtgacctgcatggacaacaaggcctggagcggcagacccgccagctgcgtggacatggagccccccagaatcaagtgccccagcgtgaaggagagaatcgccgagcccaacaagctgaccgtgagagtgagctgggagacccccgagggcagagacaccgccgacggcatcctgaccgacgtgatcctgaagggcctgccccccggcagcaacttccccgagggcgaccacaagatccagtacaccgtgtacgacagagccgagaacaagggcacctgcaagttcagagtgaaggtgagagtgaagagatgcggcaagctgaacgcccccgagaacggctacatgaagtgcagcagcgacggcgacaactacggcgccacctgcgagttcagctgcatcggcggctacgagctgcagggcagccccgccagagtgtgccagagcaacctggcctggagcggcaccgagcccacctgcgccgccatgaacgtgaacgtgggcgtgagaaccgccgccgccctgctggaccagttctacgagaagagaagactgctgatcgtgagcacccccaccgccagaaacctgctgtacagactgcagctgggcatgctgcagcaggcccagtgcggcctggacctgagacacatcaccgtggtggagctggtgggcgtgttccccaccctgatcggcagaatcggcgccaagatcatgccccccgccctggccctgcagctgagactgctgctgagaatccccctgtacagcttcagcatggtgctggtggacaagcacggcatggacaaggagagatacgtgagcctggtgatgcccgtggccctgttcaacctgatcgacaccttccccctgagaaaggaggagatggtgctgcaggccgagatgagccagacctgcaacacctag

SEQ ID NO: 101335 - DNA, 1395 bp, synthetic construct
  misc_feature 1..1395: note = Description of Artificial Sequence: Synthetic coding sequence
  source 1..1395: mol_type = other DNA
atgggcagccccgcccacagacccgccctgctgctgctgctgccccccctgctgctgctgctgctgctgagagtgccccccagcagaagcttccccggcagcggcgacagccccctggaggacgacgaggtgggctacagccaccccagatacaaggacaccccctggtgcagccccatcaaggtgaagtacggcgacgtgtactgcagagccccccagggcggctactacaagaccgccctgggcaccagatgcgacatcagatgccagaagggctacgagctgcacggcagcagcctgctgatctgccagagcaacaagagatggagcgacaaggtgatctgcaagcagaagagatgccccaccctggccatgcccgccaacggcggcttcaagtgcgtggacggcgcctacttcaacagcagatgcgagtactactgcagccccggctacaccctgaagggcgagagaaccgtgacctgcatggacaacaaggcctggagcggcagacccgccagctgcgtggacatggagccccccagaatcaagtgccccagcgtgaaggagagaatcgccgagcccaacaagctgaccgtgagagtgagctgggagacccccgagggcagagacaccgccgacggcatcctgaccgacgtgatcctgaagggcctgccccccggcagcaacttccccgagggcgaccacaagatccagtacaccgtgtacgacagagccgagaacaagggcacctgcaagttcagagtgaaggtgagagtgaagagatgcggcaagctgaacgcccccgagaacggctacatgaagtgcagcagcgacggcgacaactacggcgccacctgcgagttcagctgcatcggcggctacgagctgcagggcagccccgccagagtgtgccagagcaacctggcctggagcggcaccgagcccacctgcgccgccatgaacgtgaacgtgggcgtgagaaccgccgccgccctgctggaccagttctacgagaagagaagactgctgatcgtgagcacccccaccgccagaaacctgctgtacagactgcagctgggcatgctgcagcaggcccagtgcggcctggacctgagacacatcaccgtggtggagctggtgggcgtgttccccaccctgatcggcagaatcggcgccaagatcatgccccccgccctggccctgcagctgagactgctgctgagaatccccctgtacagcttcagcatggtgctggtggacaagcacggcatggacaaggagagatacgtgagcctggtgatgcccgtggccctgttcaacctgatcgacaccttccccctgagaaaggaggagatggtgctgcaggccgagatgagccagacctgcaacacctag

SEQ ID NO: 101336 - DNA, 1218 bp, synthetic construct
  misc_feature 1..1218: note = Description of Artificial Sequence: Synthetic coding sequence
  source 1..1218: mol_type = other DNA
atgggcagccccgcccacagacccgccctgctgctgctgctgccccccctgctgctgctgctgctgctgagagtgccccccagcagaagcttccccggcagcggcgacagccccctggaggacgacgaggtgggctacagccaccccagatacaaggacaccccctggtgcagccccatcaaggtgaagtacggcgacgtgtactgcagagccccccagggcggctactacaagaccgccctgggcaccagatgcgacatcagatgccagaagggctacgagctgcacggcagcagcctgctgatctgccagagcaacaagagatggagcgacaaggtgatctgcaagcacatggagccccccagaatcaagtgccccagcgtgaaggagagaatcgccgagcccaacaagctgaccgtgagagtgagctgggagacccccgagggcagagacaccgccgacggcatcctgaccgacgtgatcctgaagggcctgccccccggcagcaacttccccgagggcgaccacaagatccagtacaccgtgtacgacagagccgagaacaagggcacctgcaagttcagagtgaaggtgagagtgaagagatgcggcaagctgaacgcccccgagaacggctacatgaagtgcagcagcgacggcgacaactacggcgccacctgcgagttcagctgcatcggcggctacgagctgcagggcagccccgccagagtgtgccagagcaacctggcctggagcggcaccgagcccacctgcgccgccatgaacgtgaacgtgggcgtgagaaccgccgccgccctgctggaccagttctacgagaagagaagactgctgatcgtgagcacccccaccgccagaaacctgctgtacagactgcagctgggcatgctgcagcaggcccagtgcggcctggacctgagacacatcaccgtggtggagctggtgggcgtgttccccaccctgatcggcagaatcggcgccaagatcatgccccccgccctggccctgcagctgagactgctgctgagaatccccctgtacagcttcagcatggtgctggtggacaagcacggcatggacaaggagagatacgtgagcctggtgatgcccgtggccctgttcaacctgatcgacaccttccccctgagaaaggaggagatggtgctgcaggccgagatgagccagacctgcaacacctag

SEQ ID NO: 101337 - DNA, 1140 bp, synthetic construct
  misc_feature 1..1140: note = Description of Artificial Sequence: Synthetic coding sequence
  source 1..1140: mol_type = other DNA
atgggcagccccgcccacagacccgccctgctgctgctgctgccccccctgctgctgctgctgctgctgagagtgccccccagcagaagcttccccggcagcggcgacagccccctggaggacgacgaggtgggctacagccaccccagatacaaggacaccccctggtgcagccccatcaaggtgaagtacggcgacgtgtactgcagagccccccagggcggctactacaagaccgccctgggcaccagatgcgacatcagatgccagaagggctacgagctgcacggcagcagcctgctgatctgccagagcaacaagagatggagcgacaaggtgatctgcaagcagaagagatgccccaccctggccatgcccgccaacggcggcttcaagtgcgtggacggcgcctacttcaacagcagatgcgagtactactgcagccccggctacaccctgaagggcgagagaaccgtgacctgcatggacaacaaggcctggagcggcagacccgccagctgcgtggacatggagccccccagaatcaagtgccccagcgtgaaggagagaatcgccgagcccaacaagctgaccgtgagagtgagctgggagacccccgagggcagagacaccgccgacggcatcctgaccgacgtgatcctgaagggcctgccccccggcagcaacttccccgagggcgaccacaagatccagtacaccgtgtacgacagagccgagaacaagggcacctgcaagttcagagtgaaggtgagagtgaagagatgcggcaagctgaacgcccccgagaacggctacatgaagtgcagcagcgacggcgacaactacggcgccacctgcgagttcagctgcatcggcggctacgagctgcagggcagccccgccagagtgtgccagagcaacctggcctggagcggcaccgagcccacctgcgccgccatgaacgtgaacgtgggcgtgagaaccgccgccgccctgctggaccagttctacgagaagagaagactgctgatcgtgagcacccccaccgccagaaacctgctgtacagactgcagctgggcatgctgcaggccgtggccgccaaccccaccctgctgctgcagtacggcgccagcggctag

SEQ ID NO: 101338 - DNA, 1335 bp, synthetic construct
  misc_feature 1..1335: note = Description of Artificial Sequence: Synthetic coding sequence
  source 1..1335: mol_type = other DNA
atgggcagccccgcccacagacccgccctgctgctgctgctgccccccctgctgctgctgctgctgctgagagtgccccccagcagaagcttccccgacaccccctggtgcagccccatcaaggtgaagtacggcgacgtgtactgcagagccccccagggcggctactacaagaccgccctgggcaccagatgcgacatcagatgccagaagggctacgagctgcacggcagcagcctgctgatctgccagagcaacaagagatggagcgacaaggtgatctgcaagcagaagagatgccccaccctggccatgcccgccaacggcggcttcaagtgcgtggacggcgcctacttcaacagcagatgcgagtactactgcagccccggctacaccctgaagggcgagagaaccgtgacctgcatggacaacaaggcctggagcggcagacccgccagctgcgtggacatggagccccccagaatcaagtgccccagcgtgaaggagagaatcgccgagcccaacaagctgaccgtgagagtgagctgggagacccccgagggcagagacaccgccgacggcatcctgaccgacgtgatcctgaagggcctgccccccggcagcaacttccccgagggcgaccacaagatccagtacaccgtgtacgacagagccgagaacaagggcacctgcaagttcagagtgaaggtgagagtgaagagatgcggcaagctgaacgcccccgagaacggctacatgaagtgcagcagcgacggcgacaactacggcgccacctgcgagttcagctgcatcggcggctacgagctgcagggcagccccgccagagtgtgccagagcaacctggcctggagcggcaccgagcccacctgcgccgccatgaacgtgaacgtgggcgtgagaaccgccgccgccctgctggaccagttctacgagaagagaagactgctgatcgtgagcacccccaccgccagaaacctgctgtacagactgcagctgggcatgctgcagcaggcccagtgcggcctggacctgagacacatcaccgtggtggagctggtgggcgtgttccccaccctgatcggcagaatcggcgccaagatcatgccccccgccctggccctgcagctgagactgctgctgagaatccccctgtacagcttcagcatggtgctggtggacaagcacggcatggacaaggagagatacgtgagcctggtgatgcccgtggccctgttcaacctgatcgacaccttccccctgagaaaggaggagatggtgctgcaggccgagatgagccagacctgcaacacctag

SEQ ID NO: 101339 - DNA, 1398 bp, synthetic construct
  misc_feature 1..1398: note = Description of Artificial Sequence: Synthetic coding sequence
  source 1..1398: mol_type = other DNA
atggccagccagctgacccagagaggcgccctgttcctgctgttcttcctgacccccgccgtgacccccacctggtacgccggcagcggctactaccccgacgagagctacaacgaggtgtacgccgaggaggtgccccaggcccccgccctggactacagagtgcccagatggtgctacaccctgaacatccaggacggcgaggccacctgctacagccccaagggcggcaactaccacagcagcctgggcaccagatgcgagctgagctgcgacagaggcttcagactgatcggcagaagaagcgtgcagtgcctgcccagcagaagatggagcggcaccgcctactgcagacagatgagatgccacgccctgcccttcatcaccagcggcacctacacctgcaccaacggcgtgctgctggacagcagatgcgactacagctgcagcagcggctaccacctggagggcgacagaagcagaatctgcatggaggacggcagatggagcggcggcgagcccgtgtgcgtggacatcgacccccccaagatcagatgcccccacagcagagagaagatggccgagcccgagaagctgaccgccagagtgtactgggacccccccctggtgaaggacagcgccgacggcaccatcaccagagtgaccctgagaggccccgagcccggcagccacttccccgagggcgagcacgtgatcagatacaccgcctacgacagagcctacaacagagccagctgcaagttcatcgtgaaggtgcaggtgagaagatgccccaccctgaagcccccccagcacggctacctgacctgcaccagcgccggcgacaactacggcgccacctgcgagtaccactgcgacggcggctacgacagacagggcacccccagcagagtgtgccagagcagcagacagtggagcggcagcccccccatctgcgcccccatgaagatcaacgtgaacgtgaacagcgccgccggcctgctggaccagttctacgagaagcagagactgctgatcatcagcgcccccgaccccagcaacagatactacaagatgcagatcagcatgctgcagcagagcacctgcggcctggacctgagacacgtgaccatcatcgagctggtgggccagcccccccaggaggtgggcagaatcagagagcagcagctgagcgccaacatcatcgaggagctgagacagttccagagactgaccagaagctacttcaacatggtgctgatcgacaagcagggcatcgacagagacagatacatggagcccgtgacccccgaggagatcttcaccttcatcgacgactacctgctgagcaaccaggagctgacccagagaagagagcagagagacatctgcgagtag

SEQ ID NO: 101340 - DNA, 1452 bp, synthetic construct
  misc_feature 1..1452: note = Description of Artificial Sequence: Synthetic coding sequence
  source 1..1452: mol_type = other DNA
tgaaccttcatggtggaggacgccgtggaggccatcggcttcggcaagttccagtggaagctgagcgtgctgaccggcctggcctggatggccgacgccatggagatgatgatcctgagcatcctggccccccagctgcactgcgagtggagactgcccagctggcaggtggccctgctgaccagcgtggtgttcgtgggcatgatgagcagcagcaccctgtggggcaacatcagcgaccagtacggcagaaagaccggcctgaagatcagcgtgctgtggaccctgtactacggcatcctgagcgccttcgcccccgtgtacagctggatcctggtgctgagaggcctggtgggcttcggcatcggcggcgtgccccagagcgtgaccctgtacgccgagttcctgcccatgaaggccagagccaagtgcatcctgctgatcgaggtgttctgggccatcggcaccgtgttcgaggtggtgctggccgtgttcgtgatgcccagcctgggctggagatggctgctgatcctgagcgccgtgcccctgctgctgttcgccgtgctgtgcttctggctgcccgagagcgccagatacgacgtgctgagcggcaaccaggagaaggccatcgccaccctgaagagaatcgccaccgagaacggcgcccccatgcccctgggcaagctgatcatcagcagacaggaggacagaggcaagatgagagacctgttcaccccccacttcagatggaccaccctgctgctgtggttcatctggttcagcaacgccttcagctactacggcctggtgctgctgaccaccgagctgttccaggccggcgacgtgtgcggcatcagcagcagaaagaaggccgtggaggccaagtgcagcctggcctgcgagtacctgagcgaggaggactacatggacctgctgtggaccaccctgagcgagttccccggcgtgctggtgaccctgtggatcatcgacagactgggcagaaagaagaccatggccctgtgcttcgtgatcttcagcttctgcagcctgctgctgttcatctgcgtgggcagaaacgtgctgaccctgctgctgttcatcgccagagccttcatcagcggcggcttccaggccgcctacgtgtacacccccgaggtgtaccccaccgccaccagagccctgggcctgggcacctgcagcggcatggccagagtgggcgccctgatcacccccttcatcgcccaggtgatgctggagagcagcgtgtacctgaccctggccgtgtacagcggctgctgcctgctggccgccctggccagctgcttcctgcccatcgagaccaagggcagaggcctgcaggagagcagccacagagagtggggccaggagatggtgggcagaggcatgcacggcgccggcgtgaccagaagcaacagcggcagccaggagtag

SEQ ID NO: 101341 - DNA, 39 bp, synthetic construct
  misc_feature 1..39: note = Description of Artificial Sequence: Synthetic coding sequence
  source 1..39: mol_type = other DNA
atggaggaggacctgttccagctgagacagctgccctag

SEQ ID NO: 101342 - DNA, 1023 bp, synthetic construct
  misc_feature 1..1023: note = Description of Artificial Sequence: Synthetic coding sequence
  source 1..1023: mol_type = other DNA
atggccgccggcagactgatcatcaagaccgagttcctgcccaccaagtacagaggctacatgctgcccctgagccaggtgttctggctggccggcagcctgctgatcatcggcctggccagcgtgatcatccccaccatcggctggagatggctgatcagagtggccagcatccccggcatcatcctgatcgtggccttcaagttcatccccgagagcgccagattcaacgtgagcaccggcaacaccagagccgccctggccaccctggagagagtggccaagatgaacagaagcgtgatgcccgagggcaagctggtggagcccgtgctggagaagagaggcagattcgccgacctgctggacgccaagtacctgagaaccaccctgcagatctgggtgatctggctgggcatcagcttcgcctactacggcgtgatcctggccagcgccgagctgctggagagagacctggtgtgcggcagcaagagcgacagcgccgtggtggtgaccggcggcgacagcggcgagagccagagcccctgctactgccacatgttcgcccccagcgactacagaaccatgatcatcagcaccatcggcgagatcgccctgaaccccctgaacatcctgggcatcaacttcctgggcagaagactgagcctgagcatcaccatgggctgcaccgccctgttcttcctgctgctgaacatctgcaccagcagcgccggcctgatcggcttcctgttcatgctgagagccctggtggccgccaacttcaacaccgtgtacatctacaccgccgaggtgtaccccaccaccatgagagccctgggcatgggcaccagcggcagcctgtgcagaatcggcgccatggtggcccccttcatcagccaggtgctgatgagcgccagcatcctgggcgccctgtgcctgttcagcagcgtgtgcgtggtgtgcgccatcagcgccttcaccctgcccatcgagaccaagggcagagccctgcagcagatcaagtag

SEQ ID NO: 101343 - DNA, 1479 bp, synthetic construct
  misc_feature 1..1479: note = Description of Artificial Sequence: Synthetic coding sequence
  source 1..1479: mol_type = other DNA
atggccaccaagcccaccgagcccgtgaccatcctgagcctgagaaagctgagcctgggcaccgccgagccccaggtgaaggagcccaagaccttcaccgtggaggacgccgtggagaccatcggcttcggcagattccacatcgccctgttcctgatcatgggcagcaccggcgtggtggaggccatggagatcatgctgatcgccgtggtgagccccgtgatcagatgcgagtggcagctggagaactggcaggtggccctggtgaccaccatggtgttcttcggctacatggtgttcagcatcctgttcggcctgctggccgacagatacggcagatggaagatcctgctgatcagcttcctgtggggcgcctacttcagcctgctgaccagcttcgcccccagctacatctggttcgtgttcctgagaaccatggtgggctgcggcgtgagcggccacagccagggcctgatcatcaagaccgagttcctgcccaccaagtacagaggctacatgctgcccctgagccaggtgttctggctggccggcagcctgctgatcatcggcctggccagcgtgatcatccccaccatcggctggagatggctgatcagagtggccagcatccccggcatcatcctgatcgtggccttcaagttcatccccgagagcgccagattcaacgtgagcaccggcaacaccagagccgccctggccaccctggagagagtggccaagatgaacagaagcgtgatgcccgagggcaagctggtggagcccgtgctggagaagagaggcagattcgccgacctgctggacgccaagtacctgagaaccaccctgcagatctgggtgatctggctgggcatcagcttcgcctactacggcgtgatcctggccagcgccgagctgctggagagagacctggtgtgcggcagcaagagcgacagcgccgtggtggtgaccggcggcgacagcggcgagagccagagcccctgctactgccacatgttcgcccccagcgactacagaaccatgatcatcagcaccatcggcgagatcgccctgaaccccctgaacatcctgggcatcaacttcctgggcagaagactgagcctgagcatcaccatgggctgcaccgccctgttcttcctgctgctgaacatctgcaccagcagcgccggcctgatcggcttcctgttcatgctgagagccctggtggccgccaacttcaacaccgtgtacatctacaccgccgaggtgtaccccaccaccatgagagccctgggcatgggcaccagcggcagcctgtgcagaatcggcgccatggtggcccccttcatcagccaggtgctgatgagcgccagcatcctgggcgccctgtgcctgttcagcagcgtgtgcgtggtgtgcgccatcagcgccttcaccctgcccatcgagaccaagggcagagccctgcagcagatcaagtag

SEQ ID NO: 101344 - DNA, 1023 bp, synthetic construct; identical to SEQ ID NO: 101342
  misc_feature 1..1023: note = Description of Artificial Sequence: Synthetic coding sequence
  source 1..1023: mol_type = other DNA

SEQ ID NO: 101345 - DNA, 1758 bp, synthetic construct
  misc_feature 1..1758: note = Description of Artificial Sequence: Synthetic coding sequence
  source 1..1758: mol_type = other DNA
atgggcagcctgaaggaggagctgctgaaggccatctggcacgccttcaccgccctggaccaggaccacagcggcaaggtgagcaagagccagctgaaggtgctgagccacaacctgtgcaccgtgctgaaggtgccccacgaccccgtggccctggaggagcacttcagagacgacgacgagggccccgtgagcaaccagggctacatgccctacctgaacagattcatcctggagaaggtgcaggacaacttcgacaagatcgagttcaacagaatgtgctggaccctgtgcgtgaagaagaacctgaccaagaaccccctgctgatcaccgaggaggacgccttcaagatctgggtgatcttcaacttcctgagcgaggacaagtaccccctgatcatcgtgagcgaggagatcgagtacctgctgaagaagctgaccgaggccatgggcggcggctggcagcaggagcagttcgagcactacaagatcaacttcgacgacagcaagaacggcctgagcgcctgggagctgatcgagctgatcggcaacggccagttcagcaagggcatggacagacagaccgtgagcatggccatcaacgaggtgttcaacgagctgatcctggacgtgctgaagcagggctacatgatgaagaagggccacagaagaaagaactggaccgagagatggttcgtgctgaagcccaacatcatcagctactacgtgagcgaggacctgaaggacaagaagggcgacatcctgctggacgagaactgctgcgtggagagcctgcccgacaaggacggcaagaagtgcctgttcctggtgaagtgcttcgacaagaccttcgagatcagcgccagcgacaagaagaagaagcaggagtggatccaggccatccacagcaccatccacctgctgaagctgggcagcccccccccccacaaggaggccagacagagaagaaaggagctgagaaagaagcagctggccgagcaggaggagctggagagacagatgaaggagctgcaggccgccaacgagagcaagcagcaggagctggaggccgtgagaaagaagctggaggaggccgccagcagagccgccgaggaggagaagaagagactgcagacccaggtggagctgcaggccagattcagcaccgagctggagagagagaagctgatcagacagcagatggaggagcaggtggcccagaagagcagcgagctggagcagtacctgcagagagtgagagagctggaggacatgtacctgaagctgcaggaggccctggaggacgagagacaggccagacaggacgaggagaccgtgagaaagctgcaggccagactgctggaggaggagagcagcaagagagccgagctggagaagtggcacctggagcagcagcaggccatccagaccaccgaggccgagaagcaggagctggagaaccagagagtgctgaaggagcaggccctgcaggaggccatggagcagctggagcagctggagctggagagaaagcaggccctggagcagtacgaggaggtgaagaagaagctggagatggccaccaacaagaccaagagctggaaggacaaggtggcccaccacgagggcctgatcagactgatcgagcccggcagcaagaacccccacctgatcaccaactggggccccgccgccttcaccgaggccgagctggaggagagagagaagaactggaaggagaagaagaccaccgagtag

SEQ ID NO: 101346 - DNA, 3129 bp, synthetic construct
  misc_feature 1..3129: note = Description of Artificial Sequence: Synthetic coding sequence
  source 1..3129: mol_type = other DNA
atggagcaggacaccgccgccgtggccgccaccgtggccgccgccgacgccaccgccaccatcgtggtgatcgaggacgagcagcccggccccagcaccagccaggaggagggcgccgccgccgccgccaccgaggccaccgccgccaccgagaagggcgagaagaagaaggagaagaacgtgagcagcttccagctgaagctggccgccaaggcccccaagagcgagaaggagatggaccccgagtacgaggagaagatgaaggccgacagagccaagagattcgagttcctgctgaagcagaccgagctgttcgcccacttcatccagcccagcgcccagaagagccccaccagccccctgaacatgaagctgggcagacccagaatcaagaaggacgagaagcagagcctgatcagcgccggcgactacagacacagaagaaccgagcaggaggaggacgaggagctgctgagcgagagcagaaagaccagcaacgtgtgcatcagattcgaggtgagccccagctacgtgaagggcggccccctgagagactaccagatcagaggcctgaactggctgatcagcctgtacgagaacggcgtgaacggcatcctggccgacgagatgggcctgggcaagaccctgcagaccatcgccctgctgggctacctgaagcactacagaaacatccccggcccccacatggtgctggtgcccaagagcaccctgcacaactggatgaacgagttcaagagatgggtgcccagcctgagagtgatctgcttcgtgggcgacaaggacgccagagccgccttcatcagagacgagatgatgcccggcgagtgggacgtgtgcgtgaccagctacgagatggtgatcaaggagaagagcgtgttcaagaagttccactggagatacctggtgatcgacgaggcccacagaatcaagaacgagaagagcaagctgagcgagatcgtgagagagttcaagagcaccaacagactgctgctgaccggcacccccctgcagaacaacctgcacgagctgtgggccctgctgaacttcctgctgcccgacgtgttcaacagcgccgacgacttcgacagctggttcgacaccaagaactgcctgggcgaccagaagctggtggagagactgcacgccgtgctgaagcccttcctgctgagaagaatcaagaccgacgtggagaagagcctgccccccaagaaggagatcaagatctacctgggcctgagcaagatgcagagagagtggtacaccaagatcctgatgaaggacatcgacgtgctgaacagcagcggcaagatggacaagatgagactgctgaacatcctgatgcagctgagaaagtgctgcaaccacccctacctgttcgacggcgccgagcccggccccccctacaccaccgacgagcacatcgtgagcaacagcggcaagatggtggtgctggacaagctgctggccaagctgaaggagcagggcagcagagtgctgatcttcagccagatgaccagactgctggacatcctggaggactactgcatgtggagaggctacgagtactgcagactggacggccagaccccccacgaggagagagaggaggccatcgaggccttcaacgcccccaacagcagcaagttcatcttcatgctgagcaccagagccggcggcctgggcatcaacctggccagcgccgacgtggtgatcctgtacgacagcgactggaacccccaggtggacctgcaggccatggacagagcccacagaatcggccagaagaagcccgtgagagtgttcagactgatcaccgacaacaccgtggaggagagaatcgtggagagagccgagatcaagctgagactggacagcatcgtgatccagcagggcagactgatcgaccagcagagcaacaagctggccaaggaggagatgctgcagatgatcagacacggcgccacccacgtgttcgccagcaaggagagcgagctgaccgacgaggacatcaccaccatcctggagagaggcgagaagaagaccgccgagatgaacgagagactgcagaagatgggcgagagcagcctgagaaacttcagaatggacatcgagcagagcctgtacaagttcgagggcgaggactacagagagaagcagaagctgggcatggtggagtggatcgagccccccaagagagagagaaaggccaactacgccgtggacgcctacttcagagaggccctgagagtgagcgagcccaagatccccaaggcccccagaccccccaagcagcccaacgtgcaggacttccagttcttcccccccagactgttcgagctgctggagaaggagatcctgtactacagaaagaccatcggctacaaggtgcccagaaaccccgacatccccaaccccgccctggcccagagagaggagcagaagaagatcgacggcgccgagcccctgacccccgaggagaccgaggagaaggagaagctgctgacccagggcttcaccaactggaccaagagagacttcaaccagttcatcaaggccaacgagaagtacggcagagacgacatcgacaacatcgccagagaggtggagggcaagagccccgaggaggtgatggagtacagcgccgtgttctgggagagatgcaacgagctgcaggacatcgagaagatcatggcccagatcgagagaggcgaggccagaatccagagaagaatcagcatcaagaaggccctggacgccaagatcgccagatacaaggcccccttccaccagctgagaatccagtacggcaccagcaagggcaagaactacaccgaggaggaggacagattcctgatctgcatgctgcacaagatgggcttcgacagagagaacgtgtacgaggagctgagacagtgcgtgagaaacgccccccagttcagattcgactggttcatcaagagcagaaccgccatggagttccagagaagatgcaacaccctgatcagcctgatcgagaaggagaacatggagatcgaggagagagagagagccgagaagaagaagagagccaccaagacccccatggtgaagttcagcgccttcagctag

SEQ ID NO: 101347 - DNA, 3165 bp, synthetic construct
  misc_feature 1..3165: note = Description of Artificial Sequence: Synthetic coding sequence
  source 1..3165: mol_type = other DNA
atggagcaggacaccgccgccgtggccgccaccgtggccgccgccgacgccaccgccaccatcgtggtgatcgaggacgagcagcccggccccagcaccagccaggaggagggcgccgccgccgccgccaccgaggccaccgccgccaccgagaagggcgagaagaagaaggagaagaacgtgagcagcttccagctgaagctggccgccaaggcccccaagagcgagaaggagatggaccccgagtacgaggagaagatgaaggccgacagagccaagagattcgagttcctgctgaagcagaccgagctgttcgcccacttcatccagcccagcgcccagaagagccccaccagccccctgaacatgaagctgggcagacccagaatcaagaaggacgagaagcagagcctgatcagcgccggcgactacagacacagaagaaccgagcaggaggaggacgaggagctgctgagcgagagcagaaagaccagcaacgtgtgcatcagattcgaggtgagccccagctacgtgaagggcggccccctgagagactaccagatcagaggcctgaactggctgatcagcctgtacgagaacggcgtgaacggcatcctggccgacgagatgggcctgggcaagaccctgcagaccatcgccctgctgggctacctgaagcactacagaaacatccccggcccccacatggtgctggtgcccaagagcaccctgcacaactggatgaacgagttcaagagatgggtgcccagcctgagagtgatctgcttcgtgggcgacaaggacgccagagccgccttcatcagagacgagatgatgcccggcgagtgggacgtgtgcgtgaccagctacgagatggtgatcaaggagaagagcgtgttcaagaagttccactggagatacctggtgatcgacgaggcccacagaatcaagaacgagaagagcaagctgagcgagatcgtgagagagttcaagagcaccaacagactgctgctgaccggcacccccctgcagaacaacctgcacgagctgtgggccctgctgaacttcctgctgcccgacgtgttcaacagcgccgacgacttcgacagctggttcgacaccaagaactgcctgggcgaccagaagctggtggagagactgcacgccgtgctgaagcccttcctgctgagaagaatcaagaccgacgtggagaagagcctgccccccaagaaggagatcaagatctacctgggcctgagcaagatgcagagagagtggtacaccaagatcctgatgaaggacatcgacgtgctgaacagcagcggcaagatggacaagatgagactgctgaacatcctgatgcagctgagaaagtgctgcaaccacccctacctgttcgacggcgccgagcccggccccccctacaccaccgacgagcacatcgtgagcaacagcggcaagatggtggtgctggacaagctgctggccaagctgaaggagcagggcagcagagtgctgatcttcagccagatgaccagactgctggacatcctggaggactactgcatgtggagaggctacgagtactgcagactggacggccagaccccccacgaggagagagaggacaagttcctggaggtggagttcctgggccagagagaggccatcgaggccttcaacgcccccaacagcagcaagttcatcttcatgctgagcaccagagccggcggcctgggcatcaacctggccagcgccgacgtggtgatcctgtacgacagcgactggaacccccaggtggacctgcaggccatggacagagcccacagaatcggccagaagaagcccgtgagagtgttcagactgatcaccgacaacaccgtggaggagagaatcgtggagagagccgagatcaagctgagactggacagcatcgtgatccagcagggcagactgatcgaccagcagagcaacaagctggccaaggaggagatgctgcagatgatcagacacggcgccacccacgtgttcgccagcaaggagagcgagctgaccgacgaggacatcaccaccatcctggagagaggcgagaagaagaccgccgagatgaacgagagactgcagaagatgggcgagagcagcctgagaaacttcagaatggacatcgagcagagcctgtacaagttcgagggcgaggactacagagagaagcagaagctgggcatggtggagtggatcgagccccccaagagagagagaaaggccaactacgccgtggacgcctacttcagagaggccctgagagtgagcgagcccaagatccccaaggcccccagaccccccaagcagcccaacgtgcaggacttccagttcttcccccccagactgttcgagctgctggagaaggagatcctgtactacagaaagaccatcggctacaaggtgcccagaaaccccgacatccccaaccccgccctggcccagagagaggagcagaagaagatcgacggcgccgagcccctgacccccgaggagaccgaggagaaggagaagctgctgacccagggcttcaccaactggaccaagagagacttcaaccagttcatcaaggccaacgagaagtacggcagagacgacatcgacaacatcgccagagaggtggagggcaagagccccgaggaggtgatggagtacagcgccgtgttctgggagagatgcaacgagctgcaggacatcgagaagatcatggcccagatcgagagaggcgaggccagaatccagagaagaatcagcatcaagaaggccctggacgccaagatcgccagatacaaggcccccttccaccagctgagaatccagtacggcaccagcaagggcaagaactacaccgaggaggaggacagattcctgatctgcatgctgcacaagatgggcttcgacagagagaacgtgtacgaggagctgagacagtgcgtgagaaacgccccccagttcagattcgactggttcatcaagagcagaaccgccatggagttccagagaagatgcaacaccctgatcagcctgatcgagaaggagaacatggagatcgaggagagagagagagccgagaagaagaagagagccaccaagacccccatggtgaagttcagcgccttcagctag

SEQ ID NO: 101348 - DNA, 3129 bp, synthetic construct; identical to SEQ ID NO: 101346
  misc_feature 1..3129: note = Description of Artificial Sequence: Synthetic coding sequence
  source 1..3129: mol_type = other DNA

SEQ ID NO: 101349 - DNA, 3018 bp, synthetic construct
  misc_feature 1..3018: note = Description of Artificial Sequence: Synthetic coding sequence
  source 1..3018: mol_type = other DNA
atggagcaggacaccgccgccgtggccgccaccgtggccgccgccgacgccaccgccaccatcgtggtgatcgaggacgagcagcccggccccagcaccagccaggaggagaagaacgtgagcagcttccagctgaagctggccgccaaggcccccaagagcgagaaggagatggaccccgagtacgaggagaagatgaaggccgacagagccaagagattcgagttcctgctgaagcagaccgagctgttcgcccacttcatccagcccagcgcccagaagagccccaccagccccctgaacatgaagctgggcagacccagaatcaagaaggacgagaagcagagcctgatcagcgccggcgactacagacacagaagaaccgagcaggaggaggacgaggagctgctgagcgagagcagaaagaccagcaacgtgtgcatcagattcgaggtgagccccagctacgtgaagggcggccccctgagagactaccagatcagaggcctgaactggctgatcagcctgtacgagaacggcgtgaacggcatcctggccgacgagatgggcctgggcaagaccctgcagaccatcgccctgctgggctacctgaagcactacagaaacatccccggcccccacatggtgctggtgcccaagagcaccctgcacaactggatgaacgagttcaagagatgggtgcccagcctgagagtgatctgcttcgtgggcgacaaggacgccagagccgccttcatcagagacgagatgatgcccggcgagtgggacgtgtgcgtgaccagctacgagatggtgatcaaggagaagagcgtgttcaagaagttccactggagatacctggtgatcgacgaggcccacagaatcaagaacgagaagagcaagctgagcgagatcgtgagagagttcaagagcaccaacagactgctgctgaccggcacccccctgcagaacaacctgcacgagctgtgggccctgctgaacttcctgctgcccgacgtgttcaacagcgccgacgacttcgacagctggttcgacaccaagaactgcctgggcgaccagaagctggtggagagactgcacgccgtgctgaagcccttcctgctgagaagaatcaagaccgacgtggagaagagcctgccccccaagaaggagatcaagatctacctgggcctgagcaagatgcagagagagtggtacaccaagatcctgatgaaggacatcgacgtgctgaacagcagcggcaagatggacaagatgagactgctgaacatcctgatgcagctgagaaagtgctgcaaccacccctacctgttcgacggcgccgagcccggccccccctacaccaccgacgagcacatcgtgagcaacagcggcaagatggtggtgctggacaagctgctggccaagctgaaggagcagggcagcagagtgctgatcttcagccagatgaccagactgctggacatcctggaggactactgcatgtggagaggctacgagtactgcagactggacggccagaccccccacgaggagagagaggacaagttcctggaggtggagttcctgggccagagagaggccatcgaggccttcaacgcccccaacagcagcaagttcatcttcatgctgagcaccagagccggcggcctgggcatcaacctggccagcgccgacgtggtgatcctgtacgacagcgactggaacccccaggtggacctgcaggccatggacagagcccacagaatcggccagaagaagcccgtgagagtgttcagactgatcaccgacaacaccgtggaggagagaatcgtggagagagccgagatcaagctgagactggacagcatcgtgatccagcagggcagactgatcgaccagcagagcaacaagctggccaaggaggagatgctgcagatgatcagacacggcgccacccacgtgttcgccagcaaggagagcgagctgaccgacgaggacatcaccaccatcctggagagaggcgagaagaagaccgccgagatgaacgagagactgcagaagatgggcgagagcagcctgagaaacttcagaatggacatcgagcagagcctgtacaagttcgagggcgaggactacagagagaagcagaagctgggcatggtggagtggatcgagccccccaagagagagagaaaggccaactacgccgtggacgcctacttcagagaggccctgagagtgagcgagcccaagatccccaaggcccccagaccccccaagcagcccaacgtgcaggacttccagttcttcccccccagactgttcgagctgctggagaaggagatcctgtactacagaaagaccatcggctacaaggtgcccagaaaccccgacatccccaaccccgccctggcccagagagaggagcagaagaagatcgacggcgccgagcccctgacccccgaggagaccgaggagaaggagaagctgctgacccagggcttcaccaactggaccaagagagacttcaaccagttcatcaaggccaacgagaagtacggcagagacgacatcgacaacatcgccagagaggtggagggcaagagccccgaggaggtgatggagtacagcgccgtgttctgggagagatgcaacgagctgcaggacatcgagaagatcatggcccagatcgagagaggcgaggccagaatccagagaagaatcagcatcaagaaggccctggacgccaagatcgccagatacaaggcccccttccaccagctgagaatccagtacggcaccagcaagggcaagaactacaccgaggaggaggacagattcctgatctgcatgctgcacaagatgggcttcgacagagagaacgtgtacgaggagctgagacagtgcgtgagaaacgccccccagttcagattcgactggttcatcaagagcagaaccgccatggagttccagagaagatgcaacaccctgatcagcctgatcgagaaggagtag

SEQ ID NO: 101350 - DNA, 837 bp, synthetic construct
  misc_feature 1..837: note = Description of Artificial Sequence: Synthetic coding sequence
  source 1..837: mol_type = other DNA
atgctgatgaagagactggccgccagatgcttcgccggcctgctgatcctgagccccctgaccgtgatcagcgacagcagacccgccgacagcggcaaggccatcgaggacggcaacctggaggagatggaggaggaggtgagactgaagaagagaaagagaagaagaaacgtggacaaggaccccgccaaggaggacgtggagaaggccaagaagagaagaggcagaccccccgccgagaagctgagccccaacccccccaagctgaccaagcagatgaacgccatcatcgacaccgtgatcaactacaaggacagcagcggcagacagctgagcgaggtgttcatccagctgcccagcagaaaggagctgcccgagtactacgagctgatcagaaagcccgtggacttcaagaagatcaaggagagaatcagaaaccacaagtacagaagcctgggcgacctggagaaggacgtgatgctgctgtgccacaacgcccagaccttcaacctggagggcagccagatctacgaggacagcatcgtgctgcagagcgtgttcaagagcgccagacagaagatcgccaaggaggaggagagcgaggacgagagcaacgaggaggaggaggaggaggacgaggaggagagcgagagcgaggccaagagcgtgaaggtgaagatcaagctgaacaagaaggacgacaagggcagagacaagggcaagggcaagaagagacccaacagaggcaaggccaagcccgtggtgagcgacttcgacagcgacgaggagcaggacgagagagagcagagcgagggcagcggcaccgacgacgagtag

SEQ ID NO: 101351 - DNA, 711 bp, synthetic construct
  misc_feature 1..711: note = Description of Artificial Sequence: Synthetic coding sequence
  source 1..711: mol_type = other DNA
atggaggaggaggtgagactgaagaagagaaagagaagaagaaacgtggacaaggaccccgccaaggaggacgtggagaaggccaagaagagaagaggcagaccccccgccgagaagctgagccccaacccccccaagctgaccaagcagatgaacgccatcatcgacaccgtgatcaactacaaggacagcagcggcagacagctgagcgaggtgttcatccagctgcccagcagaaaggagctgcccgagtactacgagctgatcagaaagcccgtggacttcaagaagatcaaggagagaatcagaaaccacaagtacagaagcctgggcgacctggagaaggacgtgatgctgctgtgccacaacgcccagaccttcaacctggagggcagccagatctacgaggacagcatcgtgctgcagagcgtgttcaagagcgccagacagaagatcgccaaggaggaggagagcgaggacgagagcaacgaggaggaggaggaggaggacgaggaggagagcgagagcgaggccaagagcgtgaaggtgaagatcaagctgaacaagaaggacgacaagggcagagacaagggcaagggcaagaagagacccaacagaggcaaggccaagcccgtggtgagcgacttcgacagcgacgaggagcaggacgagagagagcagagcgagggcagcggcaccgacgacgagtag

SEQ ID NO: 101352 - DNA, 4773 bp, synthetic construct
  misc_feature 1..4773: note = Description of Artificial Sequence: Synthetic coding sequence
  source 1..4773: mol_type = other DNA
atgagcacccccaccgaccccggcgccatgccccaccccggccccagccccggccccggccccagccccggccccatcctgggccccagccccggccccggccccagccccggcagcgtgcacagcatgatgggccccagccccggcccccccagcgtgagccaccccatgcccaccatgggcagcaccgacttcccccaggagggcatgcaccagatgcacaagcccatcgacggcatccacgacaagggcatcgtggaggacatccactgcggcagcatgaagggcaccggcatgagacccccccaccccggcatgggccccccccagagccccatggaccagcacagccagggctacatgagcccccaccccagccccctgggcgcccccgagcacgtgagcagccccatgagcggcggcggccccacccccccccagatgccccccagccagcccggcgccctgatccccggcgacccccaggccatgagccagcccaacagaggccccagccccttcagccccgtgcagctgcaccagctgagagcccagatcctggcctacaagatgctggccagaggccagcccctgcccgagaccctgcagctggccgtgcagggcaagagaaccctgcccggcctgcagcagcagcagcagcagcagcagcagcagcagcagcagcagcagcagcagcagcagcagcagcagcagccccagcagcagcccccccagccccagacccagcagcagcagcagcccgccctggtgaactacaacagacccagcggccccggccccgagctgagcggccccagcaccccccagaagctgcccgtgcccgcccccggcggcagacccagccccgccccccccgccgccgcccagccccccgccgccgccgtgcccggccccagcgtgccccagcccgcccccggccagcccagccccgtgctgcagctgcagcagaagcagagcagaatcagccccatccagaagccccagggcctggaccccgtggagatcctgcaggagagagagtacagactgcaggccagaatcgcccacagaatccaggagctggagaacctgcccggcagcctgccccccgacctgagaaccaaggccaccgtggagctgaaggccctgagactgctgaacttccagagacagctgagacaggaggtggtggcctgcatgagaagagacaccaccctggagaccgccctgaacagcaaggcctacaagagaagcaagagacagaccctgagagaggccagaatgaccgagaagctggagaagcagcagaagatcgagcaggagagaaagagaagacagaagcaccaggagtacctgaacagcatcctgcagcacgccaaggacttcaaggagtaccacagaagcgtggccggcaagatccagaagctgagcaaggccgtggccacctggcacgccaacaccgagagagagcagaagaaggagaccgagagaatcgagaaggagagaatgagaagactgatggccgaggacgaggagggctacagaaagctgatcgaccagaagaaggacagaagactggcctacctgctgcagcagaccgacgagtacgtggccaacctgaccaacctggtgtgggagcacaagcaggcccaggccgccaaggagaagaagaagagaagaagaagaaagaagaaggccgaggagaacgccgagggcggcgagagcgccctgggccccgacggcgagcccatcgacgagagcagccagatgagcgacctgcccgtgaaggtgacccacaccgagaccggcaaggtgctgttcggccccgaggcccccaaggccagccagctggacgcctggctggagatgaaccccggctacgaggtggcccccagaagcgacagcgaggagagcgacagcgactacgaggaggaggacgaggaggaggagagcagcagacaggagaccgaggagaagatcctgctggaccccaacagcgaggaggtgagcgagaaggacgccaagcagatcatcgagaccgccaagcaggacgtggacgacgagtacagcatgcagtacagcgccagaggcagccagagctactacaccgtggcccacgccatcagcgagagagtggagaagcagagcgccctgctgatcaacggcaccctgaagcactaccagctgcagggcctggagtggatggtgagcctgtacaacaacaacctgaacggcatcctggccgacgagatgggcctgggcaagaccatccagaccatcgccctgatcacctacctgatggagcacaagagactgaacggcccctacctgatcatcgtgcccctgagcaccctgagcaactggacctacgagttcgacaagtgggcccccagcgtggtgaagatcagctacaagggcacccccgccatgagaagaagcctggtgccccagctgagaagcggcaagttcaacgtgctgctgaccacctacgagtacatcatcaaggacaagcacatcctggccaagatcagatggaagtacatgatcgtggacgagggccacagaatgaagaaccaccactgcaagctgacccaggtgctgaacacccactacgtggcccccagaagaatcctgctgaccggcacccccctgcagaacaagctgcccgagctgtgggccctgctgaacttcctgctgcccaccatcttcaagagctgcagcaccttcgagcagtggttcaacgcccccttcgccatgaccggcgagagagtggacctgaacgaggaggagaccatcctgatcatcagaagactgcacaaggtgctgagacccttcctgctgagaagactgaagaaggaggtggagagccagctgcccgagaaggtggagtacgtgatcaagtgcgacatgagcgccctgcagaagatcctgtacagacacatgcaggccaagggcatcctgctgaccgacggcagcgagaaggacaagaagggcaagggcggcgccaagaccctgatgaacaccatcatgcagctgagaaagatctgcaaccacccctacatgttccagcacatcgaggagagcttcgccgagcacctgggctacagcaacggcgtgatcaacggcgccgagctgtacagagccagcggcaagttcgagctgctggacagaatcctgcccaagctgagagccaccaaccacagagtgctgctgttctgccagatgaccagcctgatgaccatcatggaggactacttcgccttcagaaacttcctgtacctgagactggacggcaccaccaagagcgaggacagagccgccctgctgaagaagttcaacgagcccggcagccagtacttcatcttcctgctgagcaccagagccggcggcctgggcctgaacctgcaggccgccgacaccgtggtgatcttcgacagcgactggaacccccaccaggacctgcaggcccaggacagagcccacagaatcggccagcagaacgaggtgagagtgctgagactgtgcaccgtgaacagcgtggaggagaagatcctggccgccgccaagtacaagctgaacgtggaccagaaggtgatccaggccggcatgttcgaccagaagagcagcagccacgagagaagagccttcctgcaggccatcctggagcacgaggaggagaacgaggaggaggacgaggtgcccgacgacgagaccctgaaccagatgatcgccagaagagaggaggagttcgacctgttcatgagaatggacatggacagaagaagagaggacgccagaaaccccaagagaaagcccagactgatggaggaggacgagctgcccagctggatcatcaaggacgacgccgaggtggagagactgacctgcgaggaggaggaggagaagatcttcggcagaggcagcagacagagaagagacgtggactacagcgacgccctgaccgagaagcagtggctgagagccatcgaggacggcaacctggaggagatggaggaggaggtgagactgaagaagagaaagagaagaagaaacgtggacaaggaccccgccaaggaggacgtggagaaggccaagaagagaagaggcagaccccccgccgagaagctgagccccaacccccccaagctgaccaagcagatgaacgccatcatcgacaccgtgatcaactacaaggacagatgcaacgtggagaaggtgcccagcaacagccagctggagatcgagggcaacagcagcggcagacagctgagcgaggtgttcatccagctgcccagcagaaaggagctgcccgagtactacgagctgatcagaaagcccgtggacttcaagaagatcaaggagagaatcagaaaccacaagtacagaagcctgggcgacctggagaaggacgtgatgctgctgtgccacaacgcccagaccttcaacctggagggcagccagatctacgaggacagcatcgtgctgcagagcgtgttcaagagcgccagacagaagatcgccaaggaggaggagagcgaggacgagagcaacgaggaggaggaggaggaggacgaggaggagagcgagagcgaggccaagagcgtgaaggtgaagatcaagctgaacaagaaggacgacaagggcagagacaagggcaagggcaagaagagacccaacagaggcaaggccaagcccgtggtgagcgacttcgacagcgacgaggagcaggacgagagagagcagagcgagggcagcggcaccgacgacgagtag

SEQ ID NO: 101353 - DNA, 4719 bp, synthetic construct
  misc_feature 1..4719: note = Description of Artificial Sequence: Synthetic coding sequence
  source 1..4719: mol_type = other DNA
atgagcacccccaccgaccccggcgccatgccccaccccggccccagccccggccccggccccagccccggccccatcctgggccccagccccggccccggccccagccccggcagcgtgcacagcatgatgggccccagccccggcccccccagcgtgagccaccccatgcccaccatgggcagcaccgacttcccccaggagggcatgcaccagatgcacaagcccatcgacggcatccacgacaagggcatcgtggaggacatccactgcggcagcatgaagggcaccggcatgagacccccccaccccggcatgggccccccccagagccccatggaccagcacagccagggctacatgagcccccaccccagccccctgggcgcccccgagcacgtgagcagccccatgagcggcggcggccccacccccccccagatgccccccagccagcccggcgccctgatccccggcgacccccaggccatgagccagcccaacagaggccccagccccttcagccccgtgcagctgcaccagctgagagcccagatcctggcctacaagatgctggccagaggccagcccctgcccgagaccctgcagctggccgtgcagggcaagagaaccctgcccggcctgcagcagcagcagcagcagcagcagcagcagcagcagcagcagcagcagcagcagcagcagcagcagcagccccagcagcagcccccccagccccagacccagcagcagcagcagcccgccctggtgaactacaacagacccagcggccccggccccgagctgagcggccccagcaccccccagaagctgcccgtgcccgcccccggcggcagacccagccccgccccccccgccgccgcccagccccccgccgccgccgtgcccggccccagcgtgccccagcccgcccccggccagcccagccccgtgctgcagctgcagcagaagcagagcagaatcagccccatccagaagccccagggcctggaccccgtggagatcctgcaggagagagagtacagactgcaggccagaatcgcccacagaatccaggagctggagaacctgcccggcagcctgccccccgacctgagaaccaaggccaccgtggagctgaaggccctgagactgctgaacttccagagacagctgagacaggaggtggtggcctgcatgagaagagacaccaccctggagaccgccctgaacagcaaggcctacaagagaagcaagagacagaccctgagagaggccagaatgaccgagaagctggagaagcagcagaagatcgagcaggagagaaagagaagacagaagcaccaggagtacctgaacagcatcctgcagcacgccaaggacttcaaggagtaccacagaagcgtggccggcaagatccagaagctgagcaaggccgtggccacctggcacgccaacaccgagagagagcagaagaaggagaccgagagaatcgagaaggagagaatgagaagactgatggccgaggacgaggagggctacagaaagctgatcgaccagaagaaggacagaagactggcctacctgctgcagcagaccgacgagtacgtggccaacctgaccaacctggtgtgggagcacaagcaggcccaggccgccaaggagaagaagaagagaagaagaagaaagaagaaggccgaggagaacgccgagggcggcgagagcgccctgggccccgacggcgagcccatcgacgagagcagccagatgagcgacctgcccgtgaaggtgacccacaccgagaccggcaaggtgctgttcggccccgaggcccccaaggccagccagctggacgcctggctggagatgaaccccggctacgaggtggcccccagaagcgacagcgaggagagcgacagcgactacgaggaggaggacgaggaggaggagagcagcagacaggagaccgaggagaagatcctgctggaccccaacagcgaggaggtgagcgagaaggacgccaagcagatcatcgagaccgccaagcaggacgtggacgacgagtacagcatgcagtacagcgccagaggcagccagagctactacaccgtggcccacgccatcagcgagagagtggagaagcagagcgccctgctgatcaacggcaccctgaagcactaccagctgcagggcctggagtggatggtgagcctgtacaacaacaacctgaacggcatcctggccgacgagatgggcctgggcaagaccatccagaccatcgccctgatcacctacctgatggagcacaagagactgaacggcccctacctgatcatcgtgcccctgagcaccctgagcaactggacctacgagttcgacaagtgggcccccagcgtggtgaagatcagctacaagggcacccccgccatgagaagaagcctggtgccccagctgagaagcggcaagttcaacgtgctgctgaccacctacgagtacatcatcaaggacaagcacatcctggccaagatcagatggaagtacatgatcgtggacgagggccacagaatgaagaaccaccactgcaagctgacccaggtgctgaacacccactacgtggcccccagaagaatcctgctgaccggcacccccctgcagaacaagctgcccgagctgtgggccctgctgaacttcctgctgcccaccatcttcaagagctgcagcaccttcgagcagtggttcaacgcccccttcgccatgaccggcgagagagtggacctgaacgaggaggagaccatcctgatcatcagaagactgcacaaggtgctgagacccttcctgctgagaagactgaagaaggaggtggagagccagctgcccgagaaggtggagtacgtgatcaagtgcgacatgagcgccctgcagaagatcctgtacagacacatgcaggccaagggcatcctgctgaccgacggcagcgagaaggacaagaagggcaagggcggcgccaagaccctgatgaacaccatcatgcagctgagaaagatctgcaaccacccctacatgttccagcacatcgaggagagcttcgccgagcacctgggctacagcaacggcgtgatcaacggcgccgagctgtacagagccagcggcaagttcgagctgctggacagaatcctgcccaagctgagagccaccaaccacagagtgctgctgttctgccagatgaccagcctgatgaccatcatggaggactacttcgccttcagaaacttcctgtacctgagactggacggcaccaccaagagcgaggacagagccgccctgctgaagaagttcaacgagcccggcagccagtacttcatcttcctgctgagcaccagagccggcggcctgggcctgaacctgcaggccgccgacaccgtggtgatcttcgacagcgactggaacccccaccaggacctgcaggcccaggacagagcccacagaatcggccagcagaacgaggtgagagtgctgagactgtgcaccgtgaacagcgtggaggagaagatcctggccgccgccaagtacaagctgaacgtggaccagaaggtgatccaggccggcatgttcgaccagaagagcagcagccacgagagaagagccttcctgcaggccatcctggagcacgaggaggagaacgaggaggaggacgaggtgcccgacgacgagaccctgaaccagatgatcgccagaagagaggaggagttcgacctgttcatgagaatggacatggacagaagaagagaggacgccagaaaccccaagagaaagcccagactgatggaggaggacgagctgcccagctggatcatcaaggacgacgccgaggtggagagactgacctgcgaggaggaggaggagaagatcttcggcagaggcagcagacagagaagagacgtggactacagcgacgccctgaccgagaagcagtggctgagagccatcgaggacggcaacctggaggagatggaggaggaggtgagactgaagaagagaaagagaagaagaaacgtggacaaggaccccgccaaggaggacgtggagaaggccaagaagagaagaggcagaccccccgccgagaagctgagccccaacccccccaagctgaccaagcagatgaacgccatcatcgacaccgtgatcaactacaaggacagcagcggcagacagctgagcgaggtgttcatccagctgcccagcagaaaggagctgcccgagtactacgagctgatcagaaagcccgtggacttcaagaagatcaaggagagaatcagaaaccacaagtacagaagcctgggcgacctggagaaggacgtgatgctgctgtgccacaacgcccagaccttcaacctggagggcagccagatctacgaggacagcatcgtgctgcagagcgtgttcaagagcgccagacagaagatcgccaaggaggaggagagcgaggacgagagcaacgaggaggaggaggaggaggacgaggaggagagcgagagcgaggccaagagcgtgaaggtgaagatcaagctgaacaagaaggacgacaagggcagagacaagggcaagggcaagaagagacccaacagaggcaaggccaagcccgtggtgagcgacttcgacagcgacgaggagcaggacgagagagagcagagcgagggcagcggcaccgacgacgagtag

SEQ ID NO: 101354 - DNA, 360 bp, synthetic construct
  misc_feature 1..360: note = Description of Artificial Sequence: Synthetic coding sequence
  source 1..360: mol_type = other DNA
atgctgctgtgccacaacgcccagaccttcaacctggagggcagccagatctacgaggacagcatcgtgctgcagagcgtgttcaagagcgccagacagaagatcgccaaggaggaggagagcgaggacgagagcaacgaggaggaggaggaggaggacgaggaggagagcgagagcgaggccaagagcgtgaaggtgaagatcaagctgaacaagaaggacgacaagggcagagacaagggcaagggcaagaagagacccaacagaggcaaggccaagcccgtggtgagcgacttcgacagcgacgaggagcaggacgagagagagcagagcgagggcagcggcaccgacgacgagtag

SEQ ID NO: 101355 - DNA, 711 bp, synthetic construct; identical to SEQ ID NO: 101351
  misc_feature 1..711: note = Description of Artificial Sequence: Synthetic coding sequence
  source 1..711: mol_type = other DNA

SEQ ID NO: 101356 - DNA, 711 bp, synthetic construct; identical to SEQ ID NO: 101351
  misc_feature 1..711: note = Description of Artificial Sequence: Synthetic coding sequence
  source 1..711: mol_type = other DNA

SEQ ID NO: 101357 - DNA, 765 bp, synthetic construct
  misc_feature 1..765: note = Description of Artificial Sequence: Synthetic coding sequence
  source 1..765: mol_type = other DNA
atggaggaggaggtgagactgaagaagagaaagagaagaagaaacgtggacaaggaccccgccaaggaggacgtggagaaggccaagaagagaagaggcagaccccccgccgagaagctgagccccaacccccccaagctgaccaagcagatgaacgccatcatcgacaccgtgatcaactacaaggacagatgcaacgtggagaaggtgcccagcaacagccagctggagatcgagggcaacagcagcggcagacagctgagcgaggtgttcatccagctgcccagcagaaaggagctgcccgagtactacgagctgatcagaaagcccgtggacttcaagaagatcaaggagagaatcagaaaccacaagtacagaagcctgggcgacctggagaaggacgtgatgctgctgtgccacaacgcccagaccttcaacctggagggcagccagatctacgaggacagcatcgtgctgcagagcgtgttcaagagcgccagacagaagatcgccaaggaggaggagagcgaggacgagagcaacgaggaggaggaggaggaggacgaggaggagagcgagagcgaggccaagagcgtgaaggtgaagatcaagctgaacaagaaggacgacaagggcagagacaagggcaagggcaagaagagacccaacagaggcaaggccaagcccgtggtgagcgacttcgacagcgacgaggagcaggacgagagagagcagagcgagggcagcggcaccgacgacgagtag

SEQ ID NO: 101358 - DNA, 4719 bp, synthetic construct; identical to SEQ ID NO: 101353
  misc_feature 1..4719: note = Description of Artificial Sequence: Synthetic coding sequence
  source 1..4719: mol_type = other DNA

SEQ ID NO: 101359 - DNA, 4773 bp, synthetic construct; identical to SEQ ID NO: 101352
  misc_feature 1..4773: note = Description of Artificial Sequence: Synthetic coding sequence
  source 1..4773: mol_type = other DNA

SEQ ID NO: 101360 - DNA, 534 bp, synthetic construct
  misc_feature 1..534: note = Description of Artificial Sequence: Synthetic coding sequence
  source 1..534: mol_type = other DNA
atggaggaggaggtgagactgaagaagagaaagagaagaagaaacgtggacaaggaccccgccaaggaggacgtggagaaggccaagaagagaagaggcagaccccccgccgagaagctgagccccaacccccccaagctgaccaagcagatgaacgccatcatcgacaccgtgatcaactacaaggacagcagcggcagacagctgagcgaggtgttcatccagctgcccagcagaaaggagctgcccgagtactacgagctgatcagaaagcccgtggacttcaagaagatcaaggagagaatcagaaaccacaagtacagaagcctgggcgacctggagaaggacgtgatgctgctgtgccacaacgcccagaccttcaacctggagggcagccagatctacgaggacagcatcgtgctgcagagcgtgttcaagagcgccagacagaagatcgccaaggaggaggagagcgaggacgagagcaacgaggaggaggaggaggaggacgaggaggagagcgagagcgagtag

SEQ ID NO: 101361 - DNA, 816 bp, synthetic construct
  misc_feature 1..816: note = Description of Artificial Sequence: Synthetic coding sequence
  source 1..816: mol_type = other DNA
atgaagagactggccgccagatgcttcgccggcctgctgatcctgagccccctgaccgtgatcagcgacagcagacccgccgacagcggcaaggccatcgaggacggcaacctggaggagatggaggaggaggtgagactgaagaagagaaagagaagaagaaacgtggacaaggaccccgccaaggaggacgtggagaaggccaagaagagaagaggcagaccccccgccgagaagctgagccccaacccccccaagctgaccaagcagatgaacgccatcatcgacaccgtgatcaactacaaggacagcagcggcagacagctgagcgaggtgttcatccagctgcccagcagaaaggagctgcccgagtactacgagctgatcagaaagcccgtggacttcaagaagatcaaggagagaatcagaaaccacaagtacagaagcctgggcgacctggagaaggacgtgatgctgctgtgccacaacgcccagaccttcaacctggagggcagccagatctacgaggacagcatcgtgctgcagagcgtgttcaagagcgccagacagaagatcgccaaggaggaggagagcgaggacgagagcaacgaggaggaggaggaggaggacgaggaggagagcgagagcgaggccaagagcgtgaaggtgaagatcaagctgaacaagaaggacgacaagggcagagacaagggcaagggcaagaagagacccaacagaggcaaggccaagcccgtggtgagcgacttcgacagcgacgaggagcaggacgagagagtgagcgtggccgactggtag

SEQ ID NO: 101362 - DNA, 462 bp, synthetic construct
  misc_feature 1..462: note = Description of Artificial Sequence: Synthetic coding sequence
  source 1..462: mol_type = other DNA
atgaagagactggccgccagatgcttcgccggcctgctgatcctgagccccctgaccgtgatcagcgacagcagacccgccgacagcggcaaggccatcgaggacggcaacctggaggagatggaggaggaggtgagactgaagaagagaaagagaagaagaaacgtggacaaggaccccgccaaggaggacgtggagaaggccaagaagagaagaggcagaccccccgccgagaagctgagccccaacccccccaagctgaccaagcagatgaacgccatcatcgacaccgtgatcaactacaaggacagcagcggcagacagctgagcgaggtgttcatccagctgcccagcagaaaggagctgcccgagtactacgagctgatcagaaagcccgtggacttcaagaagatcaaggagagaatcagaaaccacaagtacagaagcctgggcgacctgtag

SEQ ID NO: 101363 - DNA, 468 bp, synthetic construct
  misc_feature 1..468: note = Description of Artificial Sequence: Synthetic coding sequence
  source 1..468: mol_type = other DNA
atgagcacccccaccgaccccggcgccatgccccaccccggccccagccccggccccggccccagccccggccccatcctgggccccagccccggccccggccccagccccggcagcgtgcacagcatgatgggccccagccccggcccccccagcgtgagccaccccatgcccaccatgggcagcaccgacttcccccaggagggcatgcaccagatgcacaagcccatcgacggcatccacgacaagggcatcgtggaggacatccactgcggcagcatgaagggcaccggcatgagacccccccaccccggcatgggccccccccagagccccatggaccagcacagccagggctacatgagcccccaccccagccccctgggcgcccccgagcacgtgagcagccccatgagcggcggcggccccacccccccccagatgccccccagccagcccggcgcctag

SEQ ID NO: 101364 - DNA, 1680 bp, synthetic construct
  misc_feature 1..1680: note = Description of Artificial Sequence: Synthetic coding sequence
  source 1..1680: mol_type = other DNA
atgagcacccccaccgaccccggcgccatgccccaccccggccccagccccggccccggccccagccccggccccatcctgggccccagccccggccccggccccagccccggcagcgtgcacagcatgatgggccccagccccggcccccccagcgtgagccaccccatgcccaccatgggcagcaccgacttcccccaggagggcatgcaccagatgcacaagcccatcgacggcatccacgacaagggcatcgtggaggacatccactgcggcagcatgaagggcaccggcatgagacccccccaccccggcatgggccccccccagagccccatggaccagcacagccagggctacatgagcccccaccccagccccctgggcgcccccgagcacgtgagcagccccatgagcggcggcggccccacccccccccagatgccccccagccagcccggcgccctgatccccggcgacccccaggccatgagccagcccaacagaggccccagccccttcagccccgtgcagctgcaccagctgagagcccagatcctggcctacaagatgctggccagaggccagcccctgcccgagaccctgcagctggccgtgcagggcaagagaaccctgcccggcctgcagcagcagcagcagcagcagcagcagcagcagcagcagcagcagcagcagcagcagcagcagcagcagccccagcagcagcccccccagccccagacccagcagcagcagcagcccgccctggtgaactacaacagacccagcggccccggccccgagctgagcggccccagcaccccccagaagctgcccgtgcccgcccccggcggcagacccagccccgccccccccgccgccgcccagccccccgccgccgccgtgcccggccccagcgtgccccagcccgcccccggccagcccagccccgtgctgcagctgcagcagaagcagagcagaatcagccccatccagaagccccagggcctggaccccgtggagatcctgcaggagagagagtacagactgcaggccagaatcgcccacagaatccaggagctggagaacctgcccggcagcctgccccccgacctgagaaccaaggccaccgtggagctgaaggccctgagactgctgaacttccagagacagctgagacaggaggtggtggcctgcatgagaagagacaccaccctggagaccgccctgaacagcaaggcctacaagagaagcaagagacagaccctgagagaggccagaatgaccgagaagctggagaagcagcagaagatcgagcaggagagaaagagaagacagaagcaccaggagtacctgaacagcatcctgcagcacgccaaggacttcaaggagtaccacagaagcgtggccggcaagatccagaagctgagcaaggccgtggccacctggcacgccaacaccgagagagagcagaagaaggagaccgagagaatcgagaaggagagaatgagaagactgatggccgaggacgaggagggctacagaaagctgatcgaccagaagaaggacagaagactggcctacctgctgcagcagaccgacgagtacgtggccaacctgaccaacctggtgtgggagcacaagcaggcccaggccgccaaggagaagaagaagagatag

SEQ ID NO: 101365 - DNA, 516 bp, synthetic construct
  misc_feature 1..516: note = Description of Artificial Sequence: Synthetic coding sequence
  source 1..516: mol_type = other DNA
atggaggaggaggtgagactgaagaagagaaagagaagaagaaacgtggacaaggaccccgccaaggaggacgtggagaaggccaagaagagaagaggcagaccccccgccgagaagctgagccccaacccccccaagctgaccaagcagatgaacgccatcatcgacaccgtgatcaactacaaggacagatgcaacgtggagaaggtgcccagcaacagccagctggagatcgagggcaacagcagcggcagacagctgagcgaggtgttcatccagctgcccagcagaaaggagctgcccgagtactacgagctgatcagaaagcccgtggacttcaagaagatcaaggagagaatcagaaaccacaagtacagaagcctgggcgacctggagaaggacgtgatgctgctgtgccacaacgcccagaccttcaacctggagggcagccagatctacgaggacagcatcgtgctgcagagcgtgttcaagagcgccagacagaagatcgcctag

SEQ ID NO: 101366 - DNA, 201 bp, synthetic construct
  misc_feature 1..201: note = Description of Artificial Sequence: Synthetic coding sequence
  source 1..201: mol_type = other DNA
atgagcacccccaccgaccccggcgccatgccccaccccggccccagccccggccccggccccagccccggccccatcctgggccccagccccggccccggccccagccccggcagcgtgcacagcatgatgggccccagccccggcccccccagcgtgagccaccccatgcccaccatgggcagcaccgacttcccctag

SEQ ID NO: 101367 - DNA, 4944 bp, synthetic construct
  misc_feature 1..4944: note = Description of Artificial Sequence: Synthetic coding sequence
  source 1..4944: mol_type = other DNA
atgagcacccccgacccccccctgggcggcacccccagacccggccccagccccggccccggccccagccccggcgccatgctgggccccagccccggccccagccccggcagcgcccacagcatgatgggccccagccccggcccccccagcgccggccaccccatccccacccagggccccggcggctacccccaggacaacatgcaccagatgcacaagcccatggagagcatgcacgagaagggcatgagcgacgaccccagatacaaccagatgaagggcatgggcatgagaagcggcggccacgccggcatgggccccccccccagccccatggaccagcacagccagggctaccccagccccctgggcggcagcgagcacgccagcagccccgtgcccgccagcggccccagcagcggcccccagatgagcagcggccccggcggcgcccccctggacggcgccgacccccaggccctgggccagcagaacagaggccccacccccttcaaccagaaccagctgcaccagctgagagcccagatcatggcctacaagatgctggccagaggccagcccctgcccgaccacctgcagatggccgtgcagggcaagagacccatgcccggcatgcagcagcagatgcccaccctgcccccccccagcgtgagcgccaccggccccggccccggccccggccccggccccggccccggccccggccccgccccccccaactacagcagaccccacggcatgggcggccccaacatgcccccccccggccccagcggcgtgccccccggcatgcccggccagccccccggcggcccccccaagccctggcccgagggccccatggccaacgccgccgcccccaccagcaccccccagaagctgatccccccccagcccaccggcagacccagccccgccccccccgccgtgccccccgccgccagccccgtgatgcccccccagacccagagccccggccagcccgcccagcccgcccccatggtgcccctgcaccagaagcagagcagaatcacccccatccagaagcccagaggcctggaccccgtggagatcctgcaggagagagagtacagactgcaggccagaatcgcccacagaatccaggagctggagaacctgcccggcagcctggccggcgacctgagaaccaaggccaccatcgagctgaaggccctgagactgctgaacttccagagacagctgagacaggaggtggtggtgtgcatgagaagagacaccgccctggagaccgccctgaacgccaaggcctacaagagaagcaagagacagagcctgagagaggccagaatcaccgagaagctggagaagcagcagaagatcgagcaggagagaaagagaagacagaagcaccaggagtacctgaacagcatcctgcagcacgccaaggacttcaaggagtaccacagaagcgtgaccggcaagatccagaagctgaccaaggccgtggccacctaccacgccaacaccgagagagagcagaagaaggagaacgagagaatcgagaaggagagaatgagaagactgatggccgaggacgaggagggctacagaaagctgatcgaccagaagaaggacaagagactggcctacctgctgcagcagaccgacgagtacgtggccaacctgaccgagctggtgagacagcacaaggccgcccaggtggccaaggagaagaagaagaagaagaagaagaagaaggccgagaacgccgagggccagacccccgccatcggccccgacggcgagcccctggacgagaccagccagatgagcgacctgcccgtgaaggtgatccacgtggagagcggcaagatcctgaccggcaccgacgcccccaaggccggccagctggaggcctggctggagatgaaccccggctacgaggtggcccccagaagcgacagcgaggagagcggcagcgaggaggaggaggaggaggaggaggaggagcagccccaggccgcccagccccccaccctgcccgtggaggagaagaagaagatccccgaccccgacagcgacgacgtgagcgaggtggacgccagacacatcatcgagaacgccaagcaggacgtggacgacgagtacggcgtgagccaggccctggccagaggcctgcagagctactacgccgtggcccacgccgtgaccgagagagtggacaagcagagcgccctgatggtgaacggcgtgctgaagcagtaccagatcaagggcctggagtggctggtgagcctgtacaacaacaacctgaacggcatcctggccgacgagatgggcctgggcaagaccatccagaccatcgccctgatcacctacctgatggagcacaagagaatcaacggccccttcctgatcatcgtgcccctgagcaccctgagcaactgggcctacgagttcgacaagtgggcccccagcgtggtgaaggtgagctacaagggcagccccgccgccagaagagccttcgtgccccagctgagaagcggcaagttcaacgtgctgctgaccacctacgagtacatcatcaaggacaagcacatcctggccaagatcagatggaagtacatgatcgtggacgagggccacagaatgaagaaccaccactgcaagctgacccaggtgctgaacacccactacgtggcccccagaagactgctgctgaccggcacccccctgcagaacaagctgcccgagctgtgggccctgctgaacttcctgctgcccaccatcttcaagagctgcagcaccttcgagcagtggttcaacgcccccttcgccatgaccggcgagaaggtggacctgaacgaggaggagaccatcctgatcatcagaagactgcacaaggtgctgagacccttcctgctgagaagactgaagaaggaggtggaggcccagctgcccgagaaggtggagtacgtgatcaagtgcgacatgagcgccctgcagagagtgctgtacagacacatgcaggccaagggcgtgctgctgaccgacggcagcgagaaggacaagaagggcaagggcggcaccaagaccctgatgaacaccatcatgcagctgagaaagatctgcaaccacccctacatgttccagcacatcgaggagagcttcagcgagcacctgggcttcaccggcggcatcgtgcagggcctggacctgtacagagccagcggcaagttcgagctgctggacagaatcctgcccaagctgagagccaccaaccacaaggtgctgctgttctgccagatgaccagcctgatgaccatcatggaggactacttcgcctacagaggcttcaagtacctgagactggacggcaccaccaaggccgaggacagaggcatgctgctgaagaccttcaacgagcccggcagcgagtacttcatcttcctgctgagcaccagagccggcggcctgggcctgaacctgcagagcgccgacaccgtgatcatcttcgacagcgactggaacccccaccaggacctgcaggcccaggacagagcccacagaatcggccagcagaacgaggtgagagtgctgagactgtgcaccgtgaacagcgtggaggagaagatcctggccgccgccaagtacaagctgaacgtggaccagaaggtgatccaggccggcatgttcgaccagaagagcagcagccacgagagaagagccttcctgcaggccatcctggagcacgaggagcaggacgagagcagacactgcagcaccggcagcggcagcgccagcttcgcccacaccgcccccccccccgccggcgtgaaccccgacctggaggagccccccctgaaggaggaggacgaggtgcccgacgacgagaccgtgaaccagatgatcgccagacacgaggaggagttcgacctgttcatgagaatggacctggacagaagaagagaggaggccagaaaccccaagagaaagcccagactgatggaggaggacgagctgcccagctggatcatcaaggacgacgccgaggtggagagactgacctgcgaggaggaggaggagaagatgttcggcagaggcagcagacacagaaaggaggtggactacagcgacagcctgaccgagaagcagtggctgaaggccatcgaggagggcaccctggaggagatcgaggaggaggtgagacagaagaagagcagcagaaagagaaagagagacagcgacgccggcagcagcacccccaccaccagcaccagaagcagagacaaggacgacgagagcaagaagcagaagaagagaggcagaccccccgccgagaagctgagccccaacccccccaacctgaccaagaagatgaagaagatcgtggacgccgtgatcaagtacaaggacagcagcagcggcagacagctgagcgaggtgttcatccagctgcccagcagaaaggagctgcccgagtactacgagctgatcagaaagcccgtggacttcaagaagatcaaggagagaatcagaaaccacaagtacagaagcctgaacgacctggagaaggacgtgatgctgctgtgccagaacgcccagaccttcaacctggagggcagcctgatctacgaggacagcatcgtgctgcagagcgtgttcaccagcgtgagacagaagatcgagaaggaggacgacagcgagggcgaggagagcgaggaggaggaggagggcgaggaggagggcagcgagagcgagagcagaagcgtgaaggtgaagatcaagctgggcagaaaggagaaggcccaggacagactgaagggcggcagaagaagacccagcagaggcagcagagccaagcccgtggtgagcgacgacgacagcgaggaggagcaggaggaggacagaagcggcagcggcagcgaggaggactag

SEQ ID NO: 101368 - DNA, 5040 bp, synthetic construct
  misc_feature 1..5040: note = Description of Artificial Sequence: Synthetic coding sequence
  source 1..5040: mol_type = other DNA
atgagcacccccgacccccccctgggcggcacccccagacccggccccagccccggccccggccccagccccggcgccatgctgggccccagccccggccccagccccggcagcgcccacagcatgatgggccccagccccggcccccccagcgccggccaccccatccccacccagggccccggcggctacccccaggacaacatgcaccagatgcacaagcccatggagagcatgcacgagaagggcatgagcgacgaccccagatacaaccagatgaagggcatgggcatgagaagcggcggccacgccggcatgggccccccccccagccccatggaccagcacagccagggctaccccagccccctgggcggcagcgagcacgccagcagccccgtgcccgccagcggccccagcagcggcccccagatgagcagcggccccggcggcgcccccctggacggcgccgacccccaggccctgggccagcagaacagaggccccacccccttcaaccagaaccagctgcaccagctgagagcccagatcatggcctacaagatgctggccagaggccagcccctgcccgaccacctgcagatggccgtgcagggcaagagacccatgcccggcatgcagcagcagatgcccaccctgcccccccccagcgtgagcgccaccggccccggccccggccccggccccggccccggccccggccccggccccgccccccccaactacagcagaccccacggcatgggcggccccaacatgcccccccccggccccagcggcgtgccccccggcatgcccggccagccccccggcggcccccccaagccctggcccgagggccccatggccaacgccgccgcccccaccagcaccccccagaagctgatccccccccagcccaccggcagacccagccccgccccccccgccgtgccccccgccgccagccccgtgatgcccccccagacccagagccccggccagcccgcccagcccgcccccatggtgcccctgcaccagaagcagagcagaatcacccccatccagaagcccagaggcctggaccccgtggagatcctgcaggagagagagtacagactgcaggccagaatcgcccacagaatccaggagctggagaacctgcccggcagcctggccggcgacctgagaaccaaggccaccatcgagctgaaggccctgagactgctgaacttccagagacagctgagacaggaggtggtggtgtgcatgagaagagacaccgccctggagaccgccctgaacgccaaggcctacaagagaagcaagagacagagcctgagagaggccagaatcaccgagaagctggagaagcagcagaagatcgagcaggagagaaagagaagacagaagcaccaggagtacctgaacagcatcctgcagcacgccaaggacttcaaggagtaccacagaagcgtgaccggcaagatccagaagctgaccaaggccgtggccacctaccacgccaacaccgagagagagcagaagaaggagaacgagagaatcgagaaggagagaatgagaagactgatggccgaggacgaggagggctacagaaagctgatcgaccagaagaaggacaagagactggcctacctgctgcagcagaccgacgagtacgtggccaacctgaccgagctggtgagacagcacaaggccgcccaggtggccaaggagaagaagaagaagaagaagaagaagaaggccgagaacgccgagggccagacccccgccatcggccccgacggcgagcccctggacgagaccagccagatgagcgacctgcccgtgaaggtgatccacgtggagagcggcaagatcctgaccggcaccgacgcccccaaggccggccagctggaggcctggctggagatgaaccccggctacgaggtggcccccagaagcgacagcgaggagagcggcagcgaggaggaggaggaggaggaggaggaggagcagccccaggccgcccagccccccaccctgcccgtggaggagaagaagaagatccccgaccccgacagcgacgacgtgagcgaggtggacgccagacacatcatcgagaacgccaagcaggacgtggacgacgagtacggcgtgagccaggccctggccagaggcctgcagagctactacgccgtggcccacgccgtgaccgagagagtggacaagcagagcgccctgatggtgaacggcgtgctgaagcagtaccagatcaagggcctggagtggctggtgagcctgtacaacaacaacctgaacggcatcctggccgacgagatgggcctgggcaagaccatccagaccatcgccctgatcacctacctgatggagcacaagagaatcaacggccccttcctgatcatcgtgcccctgagcaccctgagcaactgggcctacgagttcgacaagtgggcccccagcgtggtgaaggtgagctacaagggcagccccgccgccagaagagccttcgtgccccagctgagaagcggcaagttcaacgtgctgctgaccacctacgagtacatcatcaaggacaagcacatcctggccaagatcagatggaagtacatgatcgtggacgagggccacagaatgaagaaccaccactgcaagctgacccaggtgctgaacacccactacgtggcccccagaagactgctgctgaccggcacccccctgcagaacaagctgcccgagctgtgggccctgctgaacttcctgctgcccaccatcttcaagagctgcagcaccttcgagcagtggttcaacgcccccttcgccatgaccggcgagaaggtggacctgaacgaggaggagaccatcctgatcatcagaagactgcacaaggtgctgagacccttcctgctgagaagactgaagaaggaggtggaggcccagctgcccgagaaggtggagtacgtgatcaagtgcgacatgagcgccctgcagagagtgctgtacagacacatgcaggccaagggcgtgctgctgaccgacggcagcgagaaggacaagaagggcaagggcggcaccaagaccctgatgaacaccatcatgcagctgagaaagatctgcaaccacccctacatgttccagcacatcgaggagagcttcagcgagcacctgggcttcaccggcggcatcgtgcagggcctggacctgtacagagccagcggcaagttcgagctgctggacagaatcctgcccaagctgagagccaccaaccacaaggtgctgctgttctgccagatgaccagcctgatgaccatcatggaggactacttcgcctacagaggcttcaagtacctgagactggacggcaccaccaaggccgaggacagaggcatgctgctgaagaccttcaacgagcccggcagcgagtacttcatcttcctgctgagcaccagagccggcggcctgggcctgaacctgcagagcgccgacaccgtgatcatcttcgacagcgactggaacccccaccaggacctgcaggcccaggacagagcccacagaatcggccagcagaacgaggtgagagtgctgagactgtgcaccgtgaacagcgtggaggagaagatcctggccgccgccaagtacaagctgaacgtggaccagaaggtgatccaggccggcatgttcgaccagaagagcagcagccacgagagaagagccttcctgcaggccatcctggagcacgaggagcaggacgagagcagacactgcagcaccggcagcggcagcgccagcttcgcccacaccgcccccccccccgccggcgtgaaccccgacctggaggagccccccctgaaggaggaggacgaggtgcccgacgacgagaccgtgaaccagatgatcgccagacacgaggaggagttcgacctgttcatgagaatggacctggacagaagaagagaggaggccagaaaccccaagagaaagcccagactgatggaggaggacgagctgcccagctggatcatcaaggacgacgccgaggtggagagactgacctgcgaggaggaggaggagaagatgttcggcagaggcagcagacacagaaaggaggtggactacagcgacagcctgaccgagaagcagtggctgaagaagatcaccggcaaggacatccacgacaccgccagcagcgtggccagaggcctgcagttccagagaggcctgcagttctgcaccagagccagcaaggccatcgaggagggcaccctggaggagatcgaggaggaggtgagacagaagaagagcagcagaaagagaaagagagacagcgacgccggcagcagcacccccaccaccagcaccagaagcagagacaaggacgacgagagcaagaagcagaagaagagaggcagaccccccgccgagaagctgagccccaacccccccaacctgaccaagaagatgaagaagatcgtggacgccgtgatcaagtacaaggacagcagcagcggcagacagctgagcgaggtgttcatccagctgcccagcagaaaggagctgcccgagtactacgagctgatcagaaagcccgtggacttcaagaagatcaaggagagaatcagaaaccacaagtacagaagcctgaacgacctggagaaggacgtgatgctgctgtgccagaacgcccagaccttcaacctggagggcagcctgatctacgaggacagcatcgtgctgcagagcgtgttcaccagcgtgagacagaagatcgagaaggaggacgacagcgagggcgaggagagcgaggaggaggaggagggcgaggaggagggcagcgagagcgagagcagaagcgtgaaggtgaagatcaagctgggcagaaaggagaaggcccaggacagactgaagggcggcagaagaagacccagcagaggcagcagagccaagcccgtggtgagcgacgacgacagcgaggaggagcaggaggaggacagaagcggcagcggcagcgaggaggactag

SEQ ID NO: 101369 - DNA, 4854 bp, synthetic construct
  misc_feature 1..4854: note = Description of Artificial Sequence: Synthetic coding sequence
  source 1..4854: mol_type = other DNA
atgagcacccccgacccccccctgggcggcacccccagacccggccccagccccggccccggccccagccccggcgccatgctgggccccagccccggccccagccccggcagcgcccacagcatgatgggccccagccccggcccccccagcgccggccaccccatccccacccagggccccggcggctacccccaggacaacatgcaccagatgcacaagcccatggagagcatgcacgagaagggcatgagcgacgaccccagatacaaccagatgaagggcatgggcatgagaagcggcggccacgccggcatgggccccccccccagccccatggaccagcacagccagggctaccccagccccctgggcggcagcgagcacgccagcagccccgtgcccgccagcggccccagcagcggcccccagatgagcagcggccccggcggcgcccccctggacggcgccgacccccaggccctgggccagcagaacagaggccccacccccttcaaccagaaccagctgcaccagctgagagcccagatcatggcctacaagatgctggccagaggccagcccctgcccgaccacctgcagatggccgtgcagggcaagagacccatgcccggcatgcagcagcagatgcccaccctgcccccccccagcgtgagcgccaccggccccggccccggccccggccccggccccggccccggccccggccccgccccccccaactacagcagaccccacggcatgggcggccccaacatgcccccccccggccccagcggcgtgccccccggcatgcccggccagccccccggcggcccccccaagccctggcccgagggccccatggccaacgccgccgcccccaccagcaccccccagaagctgatccccccccagcccaccggcagacccagccccgccccccccgccgtgccccccgccgccagccccgtgatgcccccccagacccagagccccggccagcccgcccagcccgcccccatggtgcccctgcaccagaagcagagcagaatcacccccatccagaagcccagaggcctggaccccgtggagatcctgcaggagagagagtacagactgcaggccagaatcgcccacagaatccaggagctggagaacctgcccggcagcctggccggcgacctgagaaccaaggccaccatcgagctgaaggccctgagactgctgaacttccagagacagctgagacaggaggtggtggtgtgcatgagaagagacaccgccctggagaccgccctgaacgccaaggcctacaagagaagcaagagacagagcctgagagaggccagaatcaccgagaagctggagaagcagcagaagatcgagcaggagagaaagagaagacagaagcaccaggagtacctgaacagcatcctgcagcacgccaaggacttcaaggagtaccacagaagcgtgaccggcaagatccagaagctgaccaaggccgtggccacctaccacgccaacaccgagagagagcagaagaaggagaacgagagaatcgagaaggagagaatgagaagactgatggccgaggacgaggagggctacagaaagctgatcgaccagaagaaggacaagagactggcctacctgctgcagcagaccgacgagtacgtggccaacctgaccgagctggtgagacagcacaaggccgcccaggtggccaaggagaagaagaagaagaagaagaagaagaaggccgagaacgccgagggccagacccccgccatcggccccgacggcgagcccctggacgagaccagccagatgagcgacctgcccgtgaaggtgatccacgtggagagcggcaagatcctgaccggcaccgacgcccccaaggccggccagctggaggcctggctggagatgaaccccggctacgaggtggcccccagaagcgacagcgaggagagcggcagcgaggaggaggaggaggaggaggaggaggagcagccccaggccgcccagccccccaccctgcccgtggaggagaagaagaagatccccgaccccgacagcgacgacgtgagcgaggtggacgccagacacatcatcgagaacgccaagcaggacgtggacgacgagtacggcgtgagccaggccctggccagaggcctgcagagctactacgccgtggcccacgccgtgaccgagagagtggacaagcagagcgccctgatggtgaacggcgtgctgaagcagtaccagatcaagggcctggagtggctggtgagcctgtacaacaacaacctgaacggcatcctggccgacgagatgggcctgggcaagaccatccagaccatcgccctgatcacctacctgatggagcacaagagaatcaacggccccttcctgatcatcgtgcccctgagcaccctgagcaactgggcctacgagttcgacaagtgggcccccagcgtggtgaaggtgagctacaagggcagccccgccgccagaagagccttcgtgccccagctgagaagcggcaagttcaacgtgctgctgaccacctacgagtacatcatcaaggacaagcacatcctggccaagatcagatggaagtacatgatcgtggacgagggccacagaatgaagaaccaccactgcaagctgacccaggtgctgaacacccactacgtggcccccagaagactgctgctgaccggcacccccctgcagaacaagctgcccgagctgtgggccctgctgaacttcctgctgcccaccatcttcaagagctgcagcaccttcgagcagtggttcaacgcccccttcgccatgaccggcgagaaggtggacctgaacgaggaggagaccatcctgatcatcagaagactgcacaaggtgctgagacccttcctgctgagaagactgaagaaggaggtggaggcccagctgcccgagaaggtggagtacgtgatcaagtgcgacatgagcgccctgcagagagtgctgtacagacacatgcaggccaagggcgtgctgctgaccgacggcagcgagaaggacaagaagggcaagggcggcaccaagaccctgatgaacaccatcatgcagctgagaaagatctgcaaccacccctacatgttccagcacatcgaggagagcttcagcgagcacctgggcttcaccggcggcatcgtgcagggcctggacctgtacagagccagcggcaagttcgagctgctggacagaatcctgcccaagctgagagccaccaaccacaaggtgctgctgttctgccagatgaccagcctgatgaccatcatggaggactacttcgcctacagaggcttcaagtacctgagactggacggcaccaccaaggccgaggacagaggcatgctgctgaagaccttcaacgagcccggcagcgagtacttcatcttcctgctgagcaccagagccggcggcctgggcctgaacctgcagagcgccgacaccgtgatcatcttcgacagcgactggaacccccaccaggacctgcaggcccaggacagagcccacagaatcggccagcagaacgaggtgagagtgctgagactgtgcaccgtgaacagcgtggaggagaagatcctggccgccgccaagtacaagctgaacgtggaccagaaggtgatccaggccggcatgttcgaccagaagagcagcagccacgagagaagagccttcctgcaggccatcctggagcacgaggagcaggacgaggaggaggacgaggtgcccgacgacgagaccgtgaaccagatgatcgccagacacgaggaggagttcgacctgttcatgagaatggacctggacagaagaagagaggaggccagaaaccccaagagaaagcccagactgatggaggaggacgagctgcccagctggatcatcaaggacgacgccgaggtggagagactgacctgcgaggaggaggaggagaagatgttcggcagaggcagcagacacagaaaggaggtggactacagcgacagcctgaccgagaagcagtggctgaagaccctgaaggccatcgaggagggcaccctggaggagatcgaggaggaggtgagacagaagaagagcagcagaaagagaaagagagacagcgacgccggcagcagcacccccaccaccagcaccagaagcagagacaaggacgacgagagcaagaagcagaagaagagaggcagaccccccgccgagaagctgagccccaacccccccaacctgaccaagaagatgaagaagatcgtggacgccgtgatcaagtacaaggacagcagcagcggcagacagctgagcgaggtgttcatccagctgcccagcagaaaggagctgcccgagtactacgagctgatcagaaagcccgtggacttcaagaagatcaaggagagaatcagaaaccacaagtacagaagcctgaacgacctggagaaggacgtgatgctgctgtgccagaacgcccagaccttcaacctggagggcagcctgatctacgaggacagcatcgtgctgcagagcgtgttcaccagcgtgagacagaagatcgagaaggaggacgacagcgagggcgaggagagcgaggaggaggaggagggcgaggaggagggcagcgagagcgagagcagaagcgtgaaggtgaagatcaagctgggcagaaaggagaaggcccaggacagactgaagggcggcagaagaagacccagcagaggcagcagagccaagcccgtggtgagcgacgacgacagcgaggaggagcaggaggaggacagaagcggcagcggcagcgaggaggactag

SEQ ID NO: 101370 - DNA, 5046 bp, synthetic construct
  misc_feature 1..5046: note = Description of Artificial Sequence: Synthetic coding sequence
  source 1..5046: mol_type = other DNA
atgagcacccccgacccccccctgggcggcacccccagacccggccccagccccggccccggccccagccccggcgccatgctgggccccagccccggccccagccccggcagcgcccacagcatgatgggccccagccccggcccccccagcgccggccaccccatccccacccagggccccggcggctacccccaggacaacatgcaccagatgcacaagcccatggagagcatgcacgagaagggcatgagcgacgaccccagatacaaccagatgaagggcatgggcatgagaagcggcggccacgccggcatgggccccccccccagccccatggaccagcacagccagggctaccccagccccctgggcggcagcgagcacgccagcagccccgtgcccgccagcggccccagcagcggcccccagatgagcagcggccccggcggcgcccccctggacggcgccgacccccaggccctgggccagcagaacagaggccccacccccttcaaccagaaccagctgcaccagctgagagcccagatcatggcctacaagatgctggccagaggccagcccctgcccgaccacctgcagatggccgtgcagggcaagagacccatgcccggcatgcagcagcagatgcccaccctgcccccccccagcgtgagcgccaccggccccggccccggccccggccccggccccggccccggccccggccccgccccccccaactacagcagaccccacggcatgggcggccccaacatgcccccccccggccccagcggcgtgccccccggcatgcccggccagccccccggcggcccccccaagccctggcccgagggccccatggccaacgccgccgcccccaccagcaccccccagaagctgatccccccccagcccaccggcagacccagccccgccccccccgccgtgccccccgccgccagccccgtgatgcccccccagacccagagccccggccagcccgcccagcccgcccccatggtgcccctgcaccagaagcagagcagaatcacccccatccagaagcccagaggcctggaccccgtggagatcctgcaggagagagagtacagactgcaggccagaatcgcccacagaatccaggagctggagaacctgcccggcagcctggccggcgacctgagaaccaaggccaccatcgagctgaaggccctgagactgctgaacttccagagacagctgagacaggaggtggtggtgtgcatgagaagagacaccgccctggagaccgccctgaacgccaaggcctacaagagaagcaagagacagagcctgagagaggccagaatcaccgagaagctggagaagcagcagaagatcgagcaggagagaaagagaagacagaagcaccaggagtacctgaacagcatcctgcagcacgccaaggacttcaaggagtaccacagaagcgtgaccggcaagatccagaagctgaccaaggccgtggccacctaccacgccaacaccgagagagagcagaagaaggagaacgagagaatcgagaaggagagaatgagaagactgatgggccagagagagaagagcagaagaggcctgggcagccagagctgggccagaatcttcgccgacctgagcgaccaccagaacgactgcgtgaccagcgtgaccgagagcctggtgggccagatcctggccgcctgcagcggcgaggagggcgaggtggagtggaagggcagagacagagtgagaagactgagagccgaggacgaggagggctacagaaagctgatcgaccagaagaaggacaagagactggcctacctgctgcagcagaccgacgagtacgtggccaacctgaccgagctggtgagacagcacaaggccgcccaggtggccaaggagaagaagaagaagaagaagaagaagaaggccgagaacgccgagggccagacccccgccatcggccccgacggcgagcccctggacgagaccagccagatgagcgacctgcccgtgaaggtgatccacgtggagagcggcaagatcctgaccggcaccgacgcccccaaggccggccagctggaggcctggctggagatgaaccccggctacgaggtggcccccagaagcgacagcgaggagagcggcagcgaggaggaggaggaggaggaggaggaggagcagccccaggccgcccagccccccaccctgcccgtggaggagaagaagaagatccccgaccccgacagcgacgacgtgagcgaggtggacgccagacacatcatcgagaacgccaagcaggacgtggacgacgagtacggcgtgagccaggccctggccagaggcctgcagagctactacgccgtggcccacgccgtgaccgagagagtggacaagcagagcgccctgatggtgaacggcgtgctgaagcagtaccagatcaagggcctggagtggctggtgagcctgtacaacaacaacctgaacggcatcctggccgacgagatgggcctgggcaagaccatccagaccatcgccctgatcacctacctgatggagcacaagagaatcaacggccccttcctgatcatcgtgcccctgagcaccctgagcaactgggcctacgagttcgacaagtgggcccccagcgtggtgaaggtgagctacaagggcagccccgccgccagaagagccttcgtgccccagctgagaagcggcaagttcaacgtgctgctgaccacctacgagtacatcatcaaggacaagcacatcctggccaagatcagatggaagtacatgatcgtggacgagggccacagaatgaagaaccaccactgcaagctgacccaggtgctgaacacccactacgtggcccccagaagactgctgctgaccggcacccccctgcagaacaagctgcccgagctgtgggccctgctgaacttcctgctgcccaccatcttcaagagctgcagcaccttcgagcagtggttcaacgcccccttcgccatgaccggcgagaaggtggacctgaacgaggaggagaccatcctgatcatcagaagactgcacaaggtgctgagacccttcctgctgagaagactgaagaaggaggtggaggcccagctgcccgagaaggtggagtacgtgatcaagtgcgacatgagcgccctgcagagagtgctgtacagacacatgcaggccaagggcgtgctgctgaccgacggcagcgagaaggacaagaagggcaagggcggcaccaagaccctgatgaacaccatcatgcagctgagaaagatctgcaaccacccctacatgttccagcacatcgaggagagcttcagcgagcacctgggcttcaccggcggcatcgtgcagggcctggacctgtacagagccagcggcaagttcgagctgctggacagaatcctgcccaagctgagagccaccaaccacaaggtgctgctgttctgccagatgaccagcctgatgaccatcatggaggactacttcgcctacagaggcttcaagtacctgagactggacggcaccaccaaggccgaggacagaggcatgctgctgaagaccttcaacgagcccggcagcgagtacttcatcttcctgctgagcaccagagccggcggcctgggcctgaacctgcagagcgccgacaccgtgatcatcttcgacagcgactggaacccccaccaggacctgcaggcccaggacagagcccacagaatcggccagcagaacgaggtgagagtgctgagactgtgcaccgtgaacagcgtggaggagaagatcctggccgccgccaagtacaagctgaacgtggaccagaaggtgatccaggccggcatgttcgaccagaagagcagcagccacgagagaagagccttcctgcaggccatcctggagcacgaggagcaggacgaggaggaggacgaggtgcccgacgacgagaccgtgaaccagatgatcgccagacacgaggaggagttcgacctgttcatgagaatggacctggacagaagaagagaggaggccagaaaccccaagagaaagcccagactgatggaggaggacgagctgcccagctggatcatcaaggacgacgccgaggtggagagactgacctgcgaggaggaggaggagaagatgttcggcagaggcagcagacacagaaaggaggtggactacagcgacagcctgaccgagaagcagtggctgaagaccctgaaggccatcgaggagggcaccctggaggagatcgaggaggaggtgagacagaagaagagcagcagaaagagaaagagagacagcgacgccggcagcagcacccccaccaccagcaccagaagcagagacaaggacgacgagagcaagaagcagaagaagagaggcagaccccccgccgagaagctgagccccaacccccccaacctgaccaagaagatgaagaagatcgtggacgccgtgatcaagtacaaggacagcagcagcggcagacagctgagcgaggtgttcatccagctgcccagcagaaaggagctgcccgagtactacgagctgatcagaaagcccgtggacttcaagaagatcaaggagagaatcagaaaccacaagtacagaagcctgaacgacctggagaaggacgtgatgctgctgtgccagaacgcccagaccttcaacctggagggcagcctgatctacgaggacagcatcgtgctgcagagcgtgttcaccagcgtgagacagaagatcgagaaggaggacgacagcgagggcgaggagagcgaggaggaggaggagggcgaggaggagggcagcgagagcgagagcagaagcgtgaaggtgaagatcaagctgggcagaaaggagaaggcccaggacagactgaagggcggcagaagaagacccagcagaggcagcagagccaagcccgtggtgagcgacgacgacagcgaggaggagcaggaggaggacagaagcggcagcggcagcgaggaggactag

SEQ ID NO: 101371 - DNA, 4944 bp, synthetic construct; identical to SEQ ID NO: 101367
  misc_feature 1..4944: note = Description of Artificial Sequence: Synthetic coding sequence
  source 1..4944: mol_type = other DNA

SEQ ID NO: 101372 - DNA, 4842 bp, synthetic construct
  misc_feature 1..4842: note = Description of Artificial Sequence: Synthetic coding sequence
  source 1..4842: mol_type = other DNA
atgagcacccccgacccccccctgggcggcacccccagacccggccccagccccggccccggccccagccccggcgccatgctgggccccagccccggccccagccccggcagcgcccacagcatgatgggccccagccccggcccccccagcgccggccaccccatccccacccagggccccggcggctacccccaggacaacatgcaccagatgcacaagcccatggagagcatgcacgagaagggcatgagcgacgaccccagatacaaccagatgaagggcatgggcatgagaagcggcggccacgccggcatgggccccccccccagccccatggaccagcacagccagggctaccccagccccctgggcggcagcgagcacgccagcagccccgtgcccgccagcggccccagcagcggcccccagatgagcagcggccccggcggcgcccccctggacggcgccgacccccaggccctgggccagcagaacagaggccccacccccttcaaccagaaccagctgcaccagctgagagcccagatcatggcctacaagatgctggccagaggccagcccctgcccgaccacctgcagatggccgtgcagggcaagagacccatgcccggcatgcagcagcagatgcccaccctgcccccccccagcgtgagcgccaccggccccggccccggccccggccccggccccggccccggccccggccccgccccccccaactacagcagaccccacggcatgggcggccccaacatgcccccccccggccccagcggcgtgccccccggcatgcccggccagccccccggcggcccccccaagccctggcccgagggccccatggccaacgccgccgcccccaccagcaccccccagaagctgatccccccccagcccaccggcagacccagccccgccccccccgccgtgccccccgccgccagccccgtgatgcccccccagacccagagccccggccagcccgcccagcccgcccccatggtgcccctgcaccagaagcagagcagaatcacccccatccagaagcccagaggcctggaccccgtggagatcctgcaggagagagagtacagactgcaggccagaatcgcccacagaatccaggagctggagaacctgcccggcagcctggccggcgacctgagaaccaaggccaccatcgagctgaaggccctgagactgctgaacttccagagacagctgagacaggaggtggtggtgtgcatgagaagagacaccgccctggagaccgccctgaacgccaaggcctacaagagaagcaagagacagagcctgagagaggccagaatcaccgagaagctggagaagcagcagaagatcgagcaggagagaaagagaagacagaagcaccaggagtacctgaacagcatcctgcagcacgccaaggacttcaaggagtaccacagaagcgtgaccggcaagatccagaagctgaccaaggccgtggccacctaccacgccaacaccgagagagagcagaagaaggagaacgagagaatcgagaaggagagaatgagaagactgatggccgaggacgaggagggctacagaaagctgatcgaccagaagaaggacaagagactggcctacctgctgcagcagaccgacgagtacgtggccaacctgaccgagctggtgagacagcacaaggccgcccaggtggccaaggagaagaagaagaagaagaagaagaagaaggccgagaacgccgagggccagacccccgccatcggccccgacggcgagcccctggacgagaccagccagatgagcgacctgcccgtgaaggtgatccacgtggagagcggcaagatcctgaccggcaccgacgcccccaaggccggccagctggaggcctggctggagatgaaccccggctacgaggtggcccccagaagcgacagcgaggagagcggcagcgaggaggaggaggaggaggaggaggaggagcagccccaggccgcccagccccccaccctgcccgtggaggagaagaagaagatccccgaccccgacagcgacgacgtgagcgaggtggacgccagacacatcatcgagaacgccaagcaggacgtggacgacgagtacggcgtgagccaggccctggccagaggcctgcagagctactacgccgtggcccacgccgtgaccgagagagtggacaagcagagcgccctgatggtgaacggcgtgctgaagcagtaccagatcaagggcctggagtggctggtgagcctgtacaacaacaacctgaacggcatcctggccgacgagatgggcctgggcaagaccatccagaccatcgccctgatcacctacctgatggagcacaagagaatcaacggccccttcctgatcatcgtgcccctgagcaccctgagcaactgggcctacgagttcgacaagtgggcccccagcgtggtgaaggtgagctacaagggcagccccgccgccagaagagccttcgtgccccagctgagaagcggcaagttcaacgtgctgctgaccacctacgagtacatcatcaaggacaagcacatcctggccaagatcagatggaagtacatgatcgtggacgagggccacagaatgaagaaccaccactgcaagctgacccaggtgctgaacacccactacgtggcccccagaagactgctgctgaccggcacccccctgcagaacaagctgcccgagctgtgggccctgctgaacttcctgctgcccaccatcttcaagagctgcagcaccttcgagcagtggttcaacgcccccttcgccatgaccggcgagaaggtggacctgaacgaggaggagaccatcctgatcatcagaagactgcacaaggtgctgagacccttcctgctgagaagactgaagaaggaggtggaggcccagctgcccgagaaggtggagtacgtgatcaagtgcgacatgagcgccctgcagagagtgctgtacagacacatgcaggccaagggcgtgctgctgaccgacggcagcgagaaggacaagaagggcaagggcggcaccaagaccctgatgaacaccatcatgcagctgagaaagatctgcaaccacccctacatgttccagcacatcgaggagagcttcagcgagcacctgggcttcaccggcggcatcgtgcagggcctggacctgtacagagccagcggcaagttcgagctgctggacagaatcctgcccaagctgagagccaccaaccacaaggtgctgctgttctgccagatgaccagcctgatgaccatcatggaggactacttcgcctacagaggcttcaagtacctgagactggacggcaccaccaaggccgaggacagaggcatgctgctgaagaccttcaacgagcccggcagcgagtacttcatcttcctgctgagcaccagagccggcggcctgggcctgaacctgcagagcgccgacaccgtgatcatcttcgacagcgactggaacccccaccaggacctgcaggcccaggacagagcccacagaatcggccagcagaacgaggtgagagtgctgagactgtgcaccgtgaacagcgtggaggagaagatcctggccgccgccaagtacaagctgaacgtggaccagaaggtgatccaggccggcatgttcgaccagaagagcagcagccacgagagaagagccttcctgcaggccatcctggagcacgaggagcaggacgaggaggaggacgaggtgcccgacgacgagaccgtgaaccagatgatcgccagacacgaggaggagttcgacctgttcatgagaatggacctggacagaagaagagaggaggccagaaaccccaagagaaagcccagactgatggaggaggacgagctgcccagctggatcatcaaggacgacgccgaggtggagagactgacctgcgaggaggaggaggagaagatgttcggcagaggcagcagacacagaaaggaggtggactacagcgacagcctgaccgagaagcagtggctgaaggccatcgaggagggcaccctggaggagatcgaggaggaggtgagacagaagaagagcagcagaaagagaaagagagacagcgacgccggcagcagcacccccaccaccagcaccagaagcagagacaaggacgacgagagcaagaagcagaagaagagaggcagaccccccgccgagaagctgagccccaacccccccaacctgaccaagaagatgaagaagatcgtggacgccgtgatcaagtacaaggacagcagcggcagacagctgagcgaggtgttcatccagctgcccagcagaaaggagctgcccgagtactacgagctgatcagaaagcccgtggacttcaagaagatcaaggagagaatcagaaaccacaagtacagaagcctgaacgacctggagaaggacgtgatgctgctgtgccagaacgcccagaccttcaacctggagggcagcctgatctacgaggacagcatcgtgctgcagagcgtgttcaccagcgtgagacagaagatcgagaaggaggacgacagcgagggcgaggagagcgaggaggaggaggagggcgaggaggagggcagcgagagcgagagcagaagcgtgaaggtgaagatcaagctgggcagaaaggagaaggcccaggacagactgaagggcggcagaagaagacccagcagaggcagcagagccaagcccgtggtgagcgacgacgacagcgaggaggagcaggaggaggacagaagcggcagcggcagcgaggaggactag

SEQ ID NO: 101373 - DNA, 4851 bp, synthetic construct
  misc_feature 1..4851: note = Description of Artificial Sequence: Synthetic coding sequence
  source 1..4851: mol_type = other DNA
atgagcacccccgacccccccctgggcggcacccccagacccggccccagccccggccccggccccagccccggcgccatgctgggccccagccccggccccagccccggcagcgcccacagcatgatgggccccagccccggcccccccagcgccggccaccccatccccacccagggccccggcggctacccccaggacaacatgcaccagatgcacaagcccatggagagcatgcacgagaagggcatgagcgacgaccccagatacaaccagatgaagggcatgggcatgagaagcggcggccacgccggcatgggccccccccccagccccatggaccagcacagccagggctaccccagccccctgggcggcagcgagcacgccagcagccccgtgcccgccagcggccccagcagcggcccccagatgagcagcggccccggcggcgcccccctggacggcgccgacccccaggccctgggccagcagaacagaggccccacccccttcaaccagaaccagctgcaccagctgagagcccagatcatggcctacaagatgctggccagaggccagcccctgcccgaccacctgcagatggccgtgcagggcaagagacccatgcccggcatgcagcagcagatgcccaccctgcccccccccagcgtgagcgccaccggccccggccccggccccggccccggccccggccccggccccggccccgccccccccaactacagcagaccccacggcatgggcggccccaacatgcccccccccggccccagcggcgtgccccccggcatgcccggccagccccccggcggcccccccaagccctggcccgagggccccatggccaacgccgccgcccccaccagcaccccccagaagctgatccccccccagcccaccggcagacccagccccgccccccccgccgtgccccccgccgccagccccgtgatgcccccccagacccagagccccggccagcccgcccagcccgcccccatggtgcccctgcaccagaagcagagcagaatcacccccatccagaagcccagaggcctggaccccgtggagatcctgcaggagagagagtacagactgcaggccagaatcgcccacagaatccaggagctggagaacctgcccggcagcctggccggcgacctgagaaccaaggccaccatcgagctgaaggccctgagactgctgaacttccagagacagctgagacaggaggtggtggtgtgcatgagaagagacaccgccctggagaccgccctgaacgccaaggcctacaagagaagcaagagacagagcctgagagaggccagaatcaccgagaagctggagaagcagcagaagatcgagcaggagagaaagagaagacagaagcaccaggagtacctgaacagcatcctgcagcacgccaaggacttcaaggagtaccacagaagcgtgaccggcaagatccagaagctgaccaaggccgtggccacctaccacgccaacaccgagagagagcagaagaaggagaacgagagaatcgagaaggagagaatgagaagactgatggccgaggacgaggagggctacagaaagctgatcgaccagaagaaggacaagagactggcctacctgctgcagcagaccgacgagtacgtggccaacctgaccgagctggtgagacagcacaaggccgcccaggtggccaaggagaagaagaagaagaagaagaagaagaaggccgagaacgccgagggccagacccccgccatcggccccgacggcgagcccctggacgagaccagccagatgagcgacctgcccgtgaaggtgatccacgtggagagcggcaagatcctgaccggcaccgacgcccccaaggccggccagctggaggcctggctggagatgaaccccggctacgaggtggcccccagaagcgacagcgaggagagcggcagcgaggaggaggaggaggaggaggaggaggagcagccccaggccgcccagccccccaccctgcccgtggaggagaagaagaagatccccgaccccgacagcgacgacgtgagcgaggtggacgccagacacatcatcgagaacgccaagcaggacgtggacgacgagtacggcgtgagccaggccctggccagaggcctgcagagctactacgccgtggcccacgccgtgaccgagagagtggacaagcagagcgccctgatggtgaacggcgtgctgaagcagtaccagatcaagggcctggagtggctggtgagcctgtacaacaacaacctgaacggcatcctggccgacgagatgggcctgggcaagaccatccagaccatcgccctgatcacctacctgatggagcacaagagaatcaacggccccttcctgatcatcgtgcccctgagcaccctgagcaactgggcctacgagttcgacaagtgggcccccagcgtggtgaaggtgagctacaagggcagccccgccgccagaagagccttcgtgccccagctgagaagcggcaagttcaacgtgctgctgaccacctacgagtacatcatcaaggacaagcacatcctggccaagatcagatggaagtacatgatcgtggacgagggccacagaatgaagaaccaccactgcaagctgacccaggtgctgaacacccactacgtggcccccagaagactgctgctgaccggcacccccctgcagaacaagctgcccgagctgtgggccctgctgaacttcctgctgcccaccatcttcaagagctgcagcaccttcgagcagtggttcaacgcccccttcgccatgaccggcgagaaggtggacctgaacgaggaggagaccatcctgatcatcagaagactgcacaaggtgctgagacccttcctgctgagaagactgaagaaggaggtggaggcccagctgcccgagaaggtggagtacgtgatcaagtgcgacatgagcgccctgcagagagtgctgtacagacacatgcaggccaagggcgtgctgctgaccgacggcagcgagaaggacaagaagggcaagggcggcaccaagaccctgatgaacaccatcatgcagctgagaaagatctgcaaccacccctacatgttccagcacatcgaggagagcttcagcgagcacctgggcttcaccggcggcatcgtgcagggcctggacctgtacagagccagcggcaagttcgagctgctggacagaatcctgcccaagctgagagccaccaaccacaaggtgctgctgttctgccagatgaccagcctgatgaccatcatggaggactacttcgcctacagaggcttcaagtacctgagactggacggcaccaccaaggccgaggacagaggcatgctgctgaagaccttcaacgagcccggcagcgagtacttcatcttcctgctgagcaccagagccggcggcctgggcctgaacctgcagagcgccgacaccgtgatcatcttcgacagcgactggaacccccaccaggacctgcaggcccaggacagagcccacagaatcggccagcagaacgaggtgagagtgctgagactgtgcaccgtgaacagcgtggaggagaagatcctggccgccgccaagtacaagctgaacgtggaccagaaggtgatccaggccggcatgttcgaccagaagagcagcagccacgagagaagagccttcctgcaggccatcctggagcacgaggagcaggacgaggaggaggacgaggtgcccgacgacgagaccgtgaaccagatgatcgccagacacgaggaggagttcgacctgttcatgagaatggacctggacagaagaagagaggaggccagaaaccccaagagaaagcccagactgatggaggaggacgagctgcccagctggatcatcaaggacgacgccgaggtggagagactgacctgcgaggaggaggaggagaagatgttcggcagaggcagcagacacagaaaggaggtggactacagcgacagcctgaccgagaagcagtggctgaagaccctgaaggccatcgaggagggcaccctggaggagatcgaggaggaggtgagacagaagaagagcagcagaaagagaaagagagacagcgacgccggcagcagcacccccaccaccagcaccagaagcagagacaaggacgacgagagcaagaagcagaagaagagaggcagaccccccgccgagaagctgagccccaacccccccaacctgaccaagaagatgaagaagatcgtggacgccgtgatcaagtacaaggacagcagcggcagacagctgagcgaggtgttcatccagctgcccagcagaaaggagctgcccgagtactacgagctgatcagaaagcccgtggacttcaagaagatcaaggagagaatcagaaaccacaagtacagaagcctgaacgacctggagaaggacgtgatgctgctgtgccagaacgcccagaccttcaacctggagggcagcctgatctacgaggacagcatcgtgctgcagagcgtgttcaccagcgtgagacagaagatcgagaaggaggacgacagcgagggcgaggagagcgaggaggaggaggagggcgaggaggagggcagcgagagcgagagcagaagcgtgaaggtgaagatcaagctgggcagaaaggagaaggcccaggacagactgaagggcggcagaagaagacccagcagaggcagcagagccaagcccgtggtgagcgacgacgacagcgaggaggagcaggaggaggacagaagcggcagcggcagcgaggaggactag

SEQ ID NO: 101374 - DNA, 4845 bp, synthetic construct
  misc_feature 1..4845: note = Description of Artificial Sequence: Synthetic coding sequence
  source 1..4845: mol_type = other DNA
atgagcacccccgacccccccctgggcggcacccccagacccggccccagccccggccccggccccagccccggcgccatgctgggccccagccccggccccagccccggcagcgcccacagcatgatgggccccagccccggcccccccagcgccggccaccccatccccacccagggccccggcggctacccccaggacaacatgcaccagatgcacaagcccatggagagcatgcacgagaagggcatgagcgacgaccccagatacaaccagatgaagggcatgggcatgagaagcggcggccacgccggcatgggccccccccccagccccatggaccagcacagccagggctaccccagccccctgggcggcagcgagcacgccagcagccccgtgcccgccagcggccccagcagcggcccccagatgagcagcggccccggcggcgcccccctggacggcgccgacccccaggccctgggccagcagaacagaggccccacccccttcaaccagaaccagctgcaccagctgagagcccagatcatggcctacaagatgctggccagaggccagcccctgcccgaccacctgcagatggccgtgcagggcaagagacccatgcccggcatgcagcagcagatgcccaccctgcccccccccagcgtgagcgccaccggccccggccccggccccggccccggccccggccccggccccggccccgccccccccaactacagcagaccccacggcatgggcggccccaacatgcccccccccggccccagcggcgtgccccccggcatgcccggccagccccccggcggcccccccaagccctggcccgagggccccatggccaacgccgccgcccccaccagcaccccccagaagctgatccccccccagcccaccggcagacccagccccgccccccccgccgtgccccccgccgccagccccgtgatgcccccccagacccagagccccggccagcccgcccagcccgcccccatggtgcccctgcaccagaagcagagcagaatcacccccatccagaagcccagaggcctggaccccgtggagatcctgcaggagagagagtacagactgcaggccagaatcgcccacagaatccaggagctggagaacctgcccggcagcctggccggcgacctgagaaccaaggccaccatcgagctgaaggccctgagactgctgaacttccagagacagctgagacaggaggtggtggtgtgcatgagaagagacaccgccctggagaccgccctgaacgccaaggcctacaagagaagcaagagacagagcctgagagaggccagaatcaccgagaagctggagaagcagcagaagatcgagcaggagagaaagagaagacagaagcaccaggagtacctgaacagcatcctgcagcacgccaaggacttcaaggagtaccacagaagcgtgaccggcaagatccagaagctgaccaaggccgtggccacctaccacgccaacaccgagagagagcagaagaaggagaacgagagaatcgagaaggagagaatgagaagactgatggccgaggacgaggagggctacagaaagctgatcgaccagaagaaggacaagagactggcctacctgctgcagcagaccgacgagtacgtggccaacctgaccgagctggtgagacagcacaaggccgcccaggtggccaaggagaagaagaagaagaagaagaagaagaaggccgagaacgccgagggccagacccccgccatcggccccgacggcgagcccctggacgagaccagccagatgagcgacctgcccgtgaaggtgatccacgtggagagcggcaagatcctgaccggcaccgacgcccccaaggccggccagctggaggcctggctggagatgaaccccggctacgaggtggcccccagaagcgacagcgaggagagcggcagcgaggaggaggaggaggaggaggaggaggagcagccccaggccgcccagccccccaccctgcccgtggaggagaagaagaagatccccgaccccgacagcgacgacgtgagcgaggtggacgccagacacatcatcgagaacgccaagcaggacgtggacgacgagtacggcgtgagccaggccctggccagaggcctgcagagctactacgccgtggcccacgccgtgaccgagagagtggacaagcagagcgccctgatggtgaacggcgtgctgaagcagtaccagatcaagggcctggagtggctggtgagcctgtacaacaacaacctgaacggcatcctggccgacgagatgggcctgggcaagaccatccagaccatcgccctgatcacctacctgatggagcacaagagaatcaacggccccttcctgatcatcgtgcccctgagcaccctgagcaactgggcctacgagttcgacaagtgggcccccagcgtggtgaaggtgagctacaagggcagccccgccgccagaagagccttcgtgccccagctgagaagcggcaagttcaacgtgctgctgaccacctacgagtacatcatcaaggacaagcacatcctggccaagatcagatggaagtacatgatcgtggacgagggccacagaatgaagaaccaccactgcaagctgacccaggtgctgaacacccactacgtggcccccagaagactgctgctgaccggcacccccctgcagaacaagctgcccgagctgtgggccctgctgaacttcctgctgcccaccatcttcaagagctgcagcaccttcgagcagtggttcaacgcccccttcgccatgaccggcgagaaggtggacctgaacgaggaggagaccatcctgatcatcagaagactgcacaaggtgctgagacccttcctgctgagaagactgaagaaggaggtggaggcccagctgcccgagaaggtggagtacgtgatcaagtgcgacatgagcgccctgcagagagtgctgtacagacacatgcaggccaagggcgtgctgctgaccgacggcagcgagaaggacaagaagggcaagggcggcaccaagaccctgatgaacaccatcatgcagctgagaaagatctgcaaccacccctacatgttccagcacatcgaggagagcttcagcgagcacctgggcttcaccggcggcatcgtgcagggcctggacctgtacagagccagcggcaagttcgagctgctggacagaatcctgcccaagctgagagccaccaaccacaaggtgctgctgttctgccagatgaccagcctgatgaccatcatggaggactacttcgcctacagaggcttcaagtacctgagactggacggcaccaccaaggccgaggacagaggcatgctgctgaagaccttcaacgagcccggcagcgagtacttcatcttcctgctgagcaccagagccggcggcctgggcctgaacctgcagagcgccgacaccgtgatcatcttcgacagcgactggaacccccaccaggacctgcaggcccaggacagagcccacagaatcggccagcagaacgaggtgagagtgctgagactgtgcaccgtgaacagcgtggaggagaagatcctggccgccgccaagtacaagctgaacgtggaccagaaggtgatccaggccggcatgttcgaccagaagagcagcagccacgagagaagagccttcctgcaggccatcctggagcacgaggagcaggacgaggaggaggacgaggtgcccgacgacgagaccgtgaaccagatgatcgccagacacgaggaggagttcgacctgttcatgagaatggacctggacagaagaagagaggaggccagaaaccccaagagaaagcccagactgatggaggaggacgagctgcccagctggatcatcaaggacgacgccgaggtggagagactgacctgcgaggaggaggaggagaagatgttcggcagaggcagcagacacagaaaggaggtggactacagcgacagcctgaccgagaagcagtggctgaaggccatcgaggagggcaccctggaggagatcgaggaggaggtgagacagaagaagagcagcagaaagagaaagagagacagcgacgccggcagcagcacccccaccaccagcaccagaagcagagacaaggacgacgagagcaagaagcagaagaagagaggcagaccccccgccgagaagctgagccccaacccccccaacctgaccaagaagatgaagaagatcgtggacgccgtgatcaagtacaaggacagcagcagcggcagacagctgagcgaggtgttcatccagctgcccagcagaaaggagctgcccgagtactacgagctgatcagaaagcccgtggacttcaagaagatcaaggagagaatcagaaaccacaagtacagaagcctgaacgacctggagaaggacgtgatgctgctgtgccagaacgcccagaccttcaacctggagggcagcctgatctacgaggacagcatcgtgctgcagagcgtgttcaccagcgtgagacagaagatcgagaaggaggacgacagcgagggcgaggagagcgaggaggaggaggagggcgaggaggagggcagcgagagcgagagcagaagcgtgaaggtgaagatcaagctgggcagaaaggagaaggcccaggacagactgaagggcggcagaagaagacccagcagaggcagcagagccaagcccgtggtgagcgacgacgacagcgaggaggagcaggaggaggacagaagcggcagcggcagcgaggaggactag

SEQ ID NO: 101375 - DNA, 3159 bp, synthetic construct
  misc_feature 1..3159: note = Description of Artificial Sequence: Synthetic coding sequence
  source 1..3159: mol_type = other DNA
atgagcagcgccgccgagcccccccccccccccccccccgagagcgcccccagcaagcccgccgccagcatcgccagcggcggcagcaacagcagcaacaagggcggccccgagggcgtggccgcccaggccgtggccagcgccgccagcgccggccccgccgacgccgagatggaggagatcttcgacgacgccagccccggcaagcagaaggagatccaggagcccgaccccacctacgaggagaagatgcagaccgacagagccaacagattcgagtacctgctgaagcagaccgagctgttcgcccacttcatccagcccgccgcccagaagacccccaccagccccctgaagatgaagcccggcagacccagaatcaagaaggacgagaagcagaacctgctgagcgtgggcgactacagacacagaagaaccgagcaggaggaggacgaggagctgctgaccgagagcagcaaggccaccaacgtgtgcaccagattcgaggacagccccagctacgtgaagtggggcaagctgagagactaccaggtgagaggcctgaactggctgatcagcctgtacgagaacggcatcaacggcatcctggccgacgagatgggcctgggcaagaccctgcagaccatcagcctgctgggctacatgaagcactacagaaacatccccggcccccacatggtgctggtgcccaagagcaccctgcacaactggatgagcgagttcaagagatgggtgcccaccctgagaagcgtgtgcctgatcggcgacaaggagcagagagccgccttcgtgagagacgtgctgctgcccggcgagtgggacgtgtgcgtgaccagctacgagatgctgatcaaggagaagagcgtgttcaagaagttcaactggagatacctggtgatcgacgaggcccacagaatcaagaacgagaagagcaagctgagcgagatcgtgagagagttcaagaccaccaacagactgctgctgaccggcacccccctgcagaacaacctgcacgagctgtggagcctgctgaacttcctgctgcccgacgtgttcaacagcgccgacgacttcgacagctggttcgacaccaacaactgcctgggcgaccagaagctggtggagagactgcacatggtgctgagacccttcctgctgagaagaatcaaggccgacgtggagaagagcctgccccccaagaaggaggtgaagatctacgtgggcctgagcaagatgcagagagagtggtacaccagaatcctgatgaaggacatcgacatcctgaacagcgccggcaagatggacaagatgagactgctgaacatcctgatgcagctgagaaagtgctgcaaccacccctacctgttcgacggcgccgagcccggccccccctacaccaccgacatgcacctggtgaccaacagcggcaagatggtggtgctggacaagctgctgcccaagctgaaggagcagggcagcagagtgctgatcttcagccagatgaccagagtgctggacatcctggaggactactgcatgtggagaaactacgagtactgcagactggacggccagaccccccacgacgagagacaggacagcatcaacgcctacaacgagcccaacagcaccaagttcgtgttcatgctgagcaccagagccggcggcctgggcatcaacctggccaccgccgacgtggtgatcctgtacgacagcgactggaacccccaggtggacctgcaggccatggacagagcccacagaatcggccagaccaagaccgtgagagtgttcagattcatcaccgacaacaccgtggaggagagaatcgtggagagagccgagatgaagctgagactggacagcatcgtgatccagcagggcagactggtggaccagaacctgaacaagatcggcaaggacgagatgctgcagatgatcagacacggcgccacccacgtgttcgccagcaaggagagcgagatcaccgacgaggacatcgacggcatcctggagagaggcgccaagaagaccgccgagatgaacgagaagctgagcaagatgggcgagagcagcctgagaaacttcaccatggacaccgagagcagcgtgtacaacttcgagggcgaggactacagagagaagcagaagatcgccttcaccgagtggatcgagccccccaagagagagagaaaggccaactacgccgtggacgcctacttcagagaggccctgagagtgagcgagcccaaggcccccaaggcccccagaccccccaagcagcccaacgtgcaggacttccagttcttcccccccagactgttcgagctgctggagaaggagatcctgttctacagaaagaccatcggctacaaggtgcccagaaaccccgagctgcccaacgccgcccaggcccagaaggaggagcagctgaagatcgacgaggccgagagcctgaacgacgaggagctggaggagaaggagaagctgctgacccagggcttcaccaactggaacaagagagacttcaaccagttcatcaaggccaacgagaagtggggcagagacgacatcgagaacatcgccagagaggtggagggcaagacccccgaggaggtgatcgagtacagcgccgtgttctgggagagatgcaacgagctgcaggacatcgagaagatcatggcccagatcgagagaggcgaggccagaatccagagaagaatcagcatcaagaaggccctggacaccaagatcggcagatacaaggcccccttccaccagctgagaatcagctacggcaccaacaagggcaagaactacaccgaggaggaggacagattcctgatctgcatgctgcacaagctgggcttcgacaaggagaacgtgtacgacgagctgagacagtgcatcagaaacagcccccagttcagattcgactggttcctgaagagcagaaccgccatggagctgcagagaagatgcaacaccctgatcaccctgatcgagagagagaacatggagctggaggagaaggagaaggccgagaagaagaagagaggccccaagcccagcacccagaagagaaagatggacggcgcccccgacggcagaggcagaaagaagaagctgaagctgtag

SEQ ID NO: 101376 - DNA, 2988 bp, synthetic construct
  misc_feature 1..2988: note = Description of Artificial Sequence: Synthetic coding sequence
  source 1..2988: mol_type = other DNA
atggaggagatcttcgacgacgccagccccggcaagcagaaggagatccaggagcccgaccccacctacgaggagaagatgcagaccgacagagccaacagattcgagtacctgctgaagcagaccgagctgttcgcccacttcatccagcccgccgcccagaagacccccaccagccccctgaagatgaagcccggcagacccagaatcaagaaggacgagaagcagaacctgctgagcgtgggcgactacagacacagaagaaccgagcaggaggaggacgaggagctgctgaccgagagcagcaaggccaccaacgtgtgcaccagattcgaggacagccccagctacgtgaagtggggcaagctgagagactaccaggtgagaggcctgaactggctgatcagcctgtacgagaacggcatcaacggcatcctggccgacgagatgggcctgggcaagaccctgcagaccatcagcctgctgggctacatgaagcactacagaaacatccccggcccccacatggtgctggtgcccaagagcaccctgcacaactggatgagcgagttcaagagatgggtgcccaccctgagaagcgtgtgcctgatcggcgacaaggagcagagagccgccttcgtgagagacgtgctgctgcccggcgagtgggacgtgtgcgtgaccagctacgagatgctgatcaaggagaagagcgtgttcaagaagttcaactggagatacctggtgatcgacgaggcccacagaatcaagaacgagaagagcaagctgagcgagatcgtgagagagttcaagaccaccaacagactgctgctgaccggcacccccctgcagaacaacctgcacgagctgtggagcctgctgaacttcctgctgcccgacgtgttcaacagcgccgacgacttcgacagctggttcgacaccaacaactgcctgggcgaccagaagctggtggagagactgcacatggtgctgagacccttcctgctgagaagaatcaaggccgacgtggagaagagcctgccccccaagaaggaggtgaagatctacgtgggcctgagcaagatgcagagagagtggtacaccagaatcctgatgaaggacatcgacatcctgaacagcgccggcaagatggacaagatgagactgctgaacatcctgatgcagctgagaaagtgctgcaaccacccctacctgttcgacggcgccgagcccggccccccctacaccaccgacatgcacctggtgaccaacagcggcaagatggtggtgctggacaagctgctgcccaagctgaaggagcagggcagcagagtgctgatcttcagccagatgaccagagtgctggacatcctggaggactactgcatgtggagaaactacgagtactgcagactggacggccagaccccccacgacgagagacaggacagcatcaacgcctacaacgagcccaacagcaccaagttcgtgttcatgctgagcaccagagccggcggcctgggcatcaacctggccaccgccgacgtggtgatcctgtacgacagcgactggaacccccaggtggacctgcaggccatggacagagcccacagaatcggccagaccaagaccgtgagagtgttcagattcatcaccgacaacaccgtggaggagagaatcgtggagagagccgagatgaagctgagactggacagcatcgtgatccagcagggcagactggtggaccagaacctgaacaagatcggcaaggacgagatgctgcagatgatcagacacggcgccacccacgtgttcgccagcaaggagagcgagatcaccgacgaggacatcgacggcatcctggagagaggcgccaagaagaccgccgagatgaacgagaagctgagcaagatgggcgagagcagcctgagaaacttcaccatggacaccgagagcagcgtgtacaacttcgagggcgaggactacagagagaagcagaagatcgccttcaccgagtggatcgagccccccaagagagagagaaaggccaactacgccgtggacgcctacttcagagaggccctgagagtgagcgagcccaaggcccccaaggcccccagaccccccaagcagcccaacgtgcaggacttccagttcttcccccccagactgttcgagctgctggagaaggagatcctgttctacagaaagaccatcggctacaaggtgcccagaaaccccgagctgcccaacgccgcccaggcccagaaggaggagcagctgaagatcgacgaggccgagagcctgaacgacgaggagctggaggagaaggagaagctgctgacccagggcttcaccaactggaacaagagagacttcaaccagttcatcaaggccaacgagaagtggggcagagacgacatcgagaacatcgccagagaggtggagggcaagacccccgaggaggtgatcgagtacagcgccgtgttctgggagagatgcaacgagctgcaggacatcgagaagatcatggcccagatcgagagaggcgaggccagaatccagagaagaatcagcatcaagaaggccctggacaccaagatcggcagatacaaggcccccttccaccagctgagaatcagctacggcaccaacaagggcaagaactacaccgaggaggaggacagattcctgatctgcatgctgcacaagctgggcttcgacaaggagaacgtgtacgacgagctgagacagtgcatcagaaacagcccccagttcagattcgactggttcctgaagagcagaaccgccatggagctgcagagaagatgcaacaccctgatcaccctgatcgagagagagaacatggagctggaggagaaggagaaggccgagaagaagaagagaggccccaagcccagcacccagaagagaaagatggacggcgcccccgacggcagaggcagaaagaagaagctgaagctgtag

SEQ ID NO: 101377 - DNA, 2988 bp, synthetic construct; identical to SEQ ID NO: 101376
  misc_feature 1..2988: note = Description of Artificial Sequence: Synthetic coding sequence
  source 1..2988: mol_type = other DNA

SEQ ID NO: 101378 - DNA, 2865 bp, synthetic construct
  misc_feature 1..2865: note = Description of Artificial Sequence: Synthetic coding sequence
  source 1..2865: mol_type = other DNA
atgagcctgcccctgaccgaggagcagagaaagaagatcgaggagaacagacagaaggccctggccagaagagccgagaagctgctggccgagcagcaccagagaaccagcagcggcaccagcatcgccggcaaccccttccaggccaagcagggccccagccagaacttccccagagagagctgcaagcccgtgagccacggcgtgatcttcaagcagcagaacctgagcagcagcagcaacgccgaccagagaccccacgacagccacagcttccaggccaagggcatctggaagaagcccgaggagatgcccaccgcctgccccggccacagccccagaagccagatggccctgaccggcatcagcccccccctggcccagagcccccccgaggtgcccaagcagcagctgctgagctacgagctgggccagggccacgcccaggccagccccgagatcagattcacccccttcgccaaccccacccacaagcccctggccaagcccaagagcagccaggagacccccgcccacagcagcggccagccccccagagacgccaagctggaggccaagaccgccaaggccagccccagcggccagaacatcagctacatccacagcagcagcgagagcgtgacccccagaaccgagggcagactgcagcagaagagcggcagcagcgtgcagaagggcgtgaacagccagaagggcaagtgcgtgagaaacggcgacagattccaggtgctgatcggctacaacgccgagctgatcgccgtgttcaagaccctgcccagcaagaactacgaccccgacaccaagacctggaacttcagcatgaacgactacagcgccctgatgaaggccgcccagagcctgcccaccgtgaacctgcagcccctggagtgggcctacggcagcagcgagagccccagcaccagcagcgagggccaggccggcctgcccagcgcccccagcctgagcttcgtgaagggcagatgcatgctgatcagcagagcctacttcgaggccgacatcagctacagccaggacctgatcgccctgttcaagcagatggacagcagaagatacgacgtgaagaccagaaagtggagcttcctgctggaggagcacagcaagctgatcgccaaggtgagatgcctgccccaggtgcagctggaccccctgcccaccaccctgaccctggccttcgccagccagctgaagaagaccagcctgagcctgacccccgacgtgcccgaggccgacctgagcgaggtggaccccaagctggtgagcaacctgatgcccttccagagagccggcgtgaacttcgccatcgccaagggcggcagactgctgctggccgacgacatgggcctgggcaagaccatccaggccatctgcatcgccgccttctacagaaaggagtggcccctgctggtggtggtgcccagcagcgtgagattcacctgggagcaggccttcctgagatggctgcccagcctgagccccgactgcatcaacgtggtggtgaccggcaaggacagactgaccgccggcctgatcaacatcgtgagcttcgacctgctgagcaagctggagaagcagctgaagacccccttcaaggtggtgatcatcgacgagagccacttcctgaagaacagcagaaccgccagatgcagagccgccatgcccgtgctgaaggtggccaagagagtgatcctgctgagcggcacccccgccatgagcagacccgccgagctgtacacccagatcatcgccgtgaagcccaccttcttcccccagttccacgccttcggcctgagatactgcgacgccaagagaatgccctggggctgggactacagcggcagcagcaacctgggcgagctgaagctgctgctggaggaggccgtgatgctgagaagactgaagagcgacgtgctgagccagctgcccgccaagcagagaaagatcgtggtgatcgcccccggcagaatcaacgccagaaccagagccgccctggacgccgccgccaaggagatgaccaccaaggacaagaccaagcagcagcagaaggacgccctgatcctgttcttcaacagaaccgccgaggccaagatccccagcgtgatcgagtacatcctggacctgctggagagcggcagagagaagttcctggtgttcgcccaccacaaggtggtgctggacgccatcacccaggagctggagagaaagcacgtgcagcacatcagaatcgacggcagcaccagcagcgccgagagagaggacctgtgccagcagttccagctgagcgagagacacgccgtggccgtgctgagcatcaccgccgccaacatgggcctgaccttcagcagcgccgacctggtggtgttcgccgagctgttctggaaccccggcgtgctgatccaggccgaggacagagtgcacagaatcggccagaccagcagcgtgggcatccactacctggtggccaagggcaccgccgacgactacctgtggcccctgatccaggagaagatcaaggtgctggccgaggccggcctgagcgagaccaacttcagcgagatgaccgagagcaccgactacctgtacaaggaccccaagcagcagaagatctacgacctgttccagaagagcttcgagaaggagggcagcgacatggagctgctggaggccgccgagagcttcgaccccggcagcgccagcggcaccagcggcagcagcagccagaacatgggcgacaccctggacgagagcagcctgaccgccagcccccagaagaagagaagattcgagttcttcgacaactgggacagcttcaccagccccctgtag

SEQ ID NO: 101379 - DNA, 2865 bp, synthetic construct; identical to SEQ ID NO: 101378
  misc_feature 1..2865: note = Description of Artificial Sequence: Synthetic coding sequence
  source 1..2865: mol_type = other DNA

SEQ ID NO: 101380 - DNA, 60 bp, synthetic construct
  misc_feature 1..60: note = Description of Artificial Sequence: Synthetic coding sequence
  source 1..60: mol_type = other DNA
atgagcctgcccctgaccgaggagcagagaaagaagatcgaggagaacagacagaagtag

SEQ ID NO: 101381 - DNA, 441 bp, synthetic construct
  misc_feature 1..441: note = Description of Artificial Sequence: Synthetic coding sequence
  source 1..441: mol_type = other DNA
atgagcctgcccctgaccgaggagcagagaaagaagatcgaggagaacagacagaaggccctggccagaagagccgagaagctgctggccgagcagcaccagagaaccagcagcggcaccagcatcgccggcaaccccttccaggccaagcagggccccagccagaacttccccagagagagctgcaagcccgtgagccacggcgtgatcttcaagcagcagaacctgagcagcagcagcaacgccgaccagagaccccacgacagccacagcttccaggccaagggcatctggaagaagcccgaggagatgcccaccgcctgccccggccacagccccagaagccagatggccctgaccggcatcagcccccccctggcccagagcccccccgaggtgcccaagcagcagctgctgagctacgagctgggccagggctag

SEQ ID NO: 101382 - DNA, 279 bp, synthetic construct
  misc_feature 1..279: note = Description of Artificial Sequence: Synthetic coding sequence
  source 1..279: mol_type = other DNA
atgagcctgcccctgaccgaggagcagagaaagaagatcgaggagaacagacagaaggccctggccagaagagccgagaagctgctggccgagcagcaccagagaaccagcagcggcaccagcatcgccggcaaccccttccaggccaagcagggccccagccagaacttccccagagagagctgcaagcccgtgagccacggcgtgatcttcaagcagcagaacctgagcagcagcagcaacgccgaccagagaccccacgacagccacagcttctag

SEQ ID NO: 101383 - DNA, 393 bp, synthetic construct
  misc_feature 1..393: note = Description of Artificial Sequence: Synthetic coding sequence
  source 1..393: mol_type = other DNA
atgagcctgcccctgaccgaggagcagagaaagaagatcgaggagaacagacagaaggccctggccagaagagccgagaagctgctggccgagcagcaccagagaaccagcagcggcaccagcatcgccggcaaccccttccaggccaagcagggccccagccagaacttccccagagagagctgcaagcccgtgagccacggcgtgatcttcaagcagcagaacctgagcagcagcagcaacgccgaccagagaccccacgacagccacagcttccaggccaagggcatctggaagaagcccgaggagatgcccaccgcctgccccggccacagccccagaagccagatggccctgaccggcatcagcccccccctggcccagagcccctag

SEQ ID NO: 101384 - DNA, 3318 bp, synthetic construct
  misc_feature 1..3318: note = Description of Artificial Sequence: Synthetic coding sequence
  source 1..3318: mol_type = other DNA
atggccgccgccgccggcggcggcggccccggcaccgccgtgggcgccaccggcagcggcatcgccgccgccgccgccggcctggccgtgtacagaagaaaggacggcggccccgccaccaagttctgggagagccccgagaccgtgagccagctggacagcgtgagagtgtggctgggcaagcactacaagaagtacgtgcacgccgacgcccccaccaacaagaccctggccggcctggtggtgcagctgctgcagttccaggaggacgccttcggcaagcacgtgaccaaccccgccttcaccaagctgcccgccaagtgcttcatggacttcaaggccggcggcgccctgtgccacatcctgggcgccgcctacaagtacaagaacgagcagggctggagaagattcgacctgcagaaccccagcagaatggacagaaacgtggagatgttcatgaacatcgagaagaccctggtgcagaacaactgcctgaccagacccaacatctacctgatccccgacatcgacctgaagctggccaacaagctgaaggacatcatcaagagacaccagggcaccttcaccgacgagaagagcaaggccagccaccacatctacccctacagcagcagccaggacgacgaggagtggctgagacccgtgatgagaaaggagaagcaggtgctggtgcactggggcttctaccccgacagctacgacacctgggtgcacagcaacgacgtggacgccgagatcgaggacccccccatccccgagaagccctggaaggtgcacgtgaagtggatcctggacaccgacatcttcaacgagtggatgaacgaggaggactacgaggtggacgagaacagaaagcccgtgagcttcagacagagaatcagcaccaagaacgaggagcccgtgagaagccccgagagaagagacagaaaggccagcgccaacgccagaaagagaaagcacagccccagcccccccccccccacccccaccgagagcagaaagaagagcggcaagaagggccaggccagcctgtacggcaagagaagaagccagaaggaggaggacgagcaggaggacctgaccaaggacatggaggaccccacccccgtgcccaacatcgaggaggtggtgctgcccaagaacgtgaacctgaagaaggacagcgagaacacccccgtgaagggcggcaccgtggccgacctggacgagcaggacgaggagaccgtgaccgccggcggcaaggaggacgaggaccccgccaagggcgaccagagcagaagcgtggacctgggcgaggacaacgtgaccgagcagaccaaccacatcatcatccccagctacgccagctggttcgactacaactgcatccacgtgatcgagagaagagccctgcccgagttcttcaacggcaagaacaagagcaagacccccgagatctacctggcctacagaaacttcatgatcgacacctacagactgaacccccaggagtacctgaccagcaccgcctgcagaagaaacctgaccggcgacgtgtgcgccgtgatgagagtgcacgccttcctggagcagtggggcctggtgaactaccaggtggaccccgagagcagacccatggccatgggccccccccccaccccccacttcaacgtgctggccgacacccccagcggcctggtgcccctgcacctgagaagcccccaggtgcccgccgcccagcagatgctgaacttccccgagaagaacaaggagaagcccgtggacctgcagaacttcggcctgagaaccgacatctacagcaagaagaccctggccaagagcaagggcgccagcgccggcagagagtggaccgagcaggagaccctgctgctgctggaggccctggagatgtacaaggacgactggaacaaggtgagcgagcacgtgggcagcagaacccaggacgagtgcatcctgcacttcctgagactgcccatcgaggacccctacctggagaacagcgacgccagcctgggccccctggcctaccagcccgtgcccttcagccagagcggcaaccccgtgatgagcaccgtggccttcctggccagcgtggtggaccccagagtggccagcgccgccgccaaggccgccctggaggagttcagcagagtgagagaggaggtgcccctggagctggtggaggcccacgtgaagaaggtgcaggaggccgccagagccagcggcaaggtggaccccacctacggcctggagagcagctgcatcgccggcaccggccccgacgagcccgagaagctggagggcgccgaggaggagaagatggaggccgaccccgacggccagcagcccgagaaggccgagaacaaggtggagaacgagaccgacgagggcgacaaggcccaggacggcgagaacgagaagaacagcgagaaggagcaggacagcgaggtgagcgaggacaccaagagcgaggagaaggagaccgaggagaacaaggagctgaccgacacctgcaaggagagagagagcgacaccggcaagaagaaggtggagcacgagatcagcgagggcaacgtggccaccgccgccgccgccgccctggccagcgccgccaccaaggccaagcacctggccgccgtggaggagagaaagatcaagagcctggtggccctgctggtggagacccagatgaagaagctggagatcaagctgagacacttcgaggagctggagaccatcatggacagagagaaggaggccctggagcagcagagacagcagctgctgaccgagagacagaacttccacatggagcagctgaagtacgccgagctgagagccagacagcagatggagcagcagcagcacggccagaacccccagcaggcccaccagcacagcggcggccccggcctggcccccctgggcgccgccggccaccccggcatgatgccccaccagcagccccccccctaccccctgatgcaccaccagatgccccccccccaccccccccagcccggccagatccccggccccggcagcatgatgcccggccagcacatgcccggcagaatgatccccaccgtggccgccaacatccaccccagcggcagcggccccaccccccccggcatgccccccatgcccggcaacatcctgggccccagagtgcccctgaccgcccccaacggcatgtaccccccccccccccagcagcagccccccccccccccccccgccgacggcgtgccccccccccccgcccccggcccccccgccagcgccgccccctag

SEQ ID NO: 101385 - DNA, 3645 bp, synthetic construct
  misc_feature 1..3645: note = Description of Artificial Sequence: Synthetic coding sequence
  source 1..3645: mol_type = other DNA
atggccgtgagaaagaaggacggcggccccaacgtgaagtactacgaggccgccgacaccgtgacccagttcgacaacgtgagactgtggctgggcaagaactacaagaagtacatccaggccgagccccccaccaacaagagcctgagcagcctggtggtgcagctgctgcagttccaggaggaggtgttcggcaagcacgtgagcaacgcccccctgaccaagctgcccatcaagtgcttcctggacttcaaggccggcggcagcctgtgccacatcctggccgccgcctacaagttcaagagcgaccagggctggagaagatacgacttccagaaccccagcagaatggacagaaacgtggagatgttcatgaccatcgagaagagcctggtgcagaacaactgcctgagcagacccaacatcttcctgtgccccgagatcgagcccaagctgctgggcaagctgaaggacatcatcaagagacaccagggcaccgtgaccgaggacaagaacaacgccagccacgtggtgtaccccgtgcccggcaacctggaggaggaggagtgggtgagacccgtgatgaagagagacaagcaggtgctgctgcactggggctactaccccgacagctacgacacctggatccccgccagcgagatcgaggccagcgtggaggacgcccccacccccgagaagcccagaaaggtgcacgccaagtggatcctggacaccgacaccttcaacgagtggatgaacgaggaggactacgaggtgaacgacgacaagaaccccgtgagcagaagaaagaagatcagcgccaagaccctgaccgacgaggtgaacagccccgacagcgacagaagagacaagaagggcggcaactacaagaagagaaagagaagccccagccccagccccacccccgaggccaagaagaagaacgccaagaagggccccagcaccccctacaccaagagcaagagaggccacagagaggaggagcaggaggacctgaccaaggacatggacgagcccagccccgtgcccaacgtggaggaggtgaccctgcccaagaccgtgaacaccaagaaggacagcgagagcgcccccgtgaagggcggcaccatgaccgacctggacgagcaggaggacgagagcatggagaccaccggcaaggacgaggacgagaacagcaccggcaacaagggcgagcagaccaagaaccccgacctgcacgaggacaacgtgaccgagcagacccaccacatcatcatccccagctacgccgcctggttcgactacaacagcgtgcacgccatcgagagaagagccctgcccgagttcttcaacggcaagaacaagagcaagacccccgagatctacctggcctacagaaacttcatgatcgacacctacagactgaacccccaggagtacctgaccagcaccgcctgcagaagaaacctggccggcgacgtgtgcgccatcatgagagtgcacgccttcctggagcagtggggcctgatcaactaccaggtggacgccgagagcagacccacccccatgggccccccccccaccagccacttccacgtgctggccgacacccccagcggcctggtgcccctgcagcccaagaccccccagcagaccagcgccagccagcagatgctgaacttccccgacaagggcaaggagaagcccaccgacatgcagaacttcggcctgagaaccgacatgtacaccaagaagaacgtgcccagcaagagcaaggccgccgccagcgccaccagagagtggaccgagcaggagaccctgctgctgctggaggccctggagatgtacaaggacgactggaacaaggtgagcgagcacgtgggcagcagaacccaggacgagtgcatcctgcacttcctgagactgcccatcgaggacccctacctggaggacagcgaggccagcctgggccccctggcctaccagcccatccccttcagccagagcggcaaccccgtgatgagcaccgtggccttcctggccagcgtggtggaccccagagtggccagcgccgccgccaagagcgccctggaggagttcagcaagatgaaggaggaggtgcccaccgccctggtggaggcccacgtgagaaaggtggaggaggccgccaaggtgaccggcaaggccgaccccgccttcggcctggagagcagcggcatcgccggcaccaccagcgacgagcccgagagaatcgaggagagcggcaacgacgaggccagagtggagggccaggccaccgacgagaagaaggagcccaaggagcccagagagggcggcggcgccatcgaggaggaggccaaggagaagaccagcgaggcccccaagaaggacgaggagaagggcaaggagggcgacagcgagaaggagagcgagaagagcgacggcgaccccatcgtggaccccgagaaggagaaggagcccaaggagggccaggaggaggtgctgaaggaggtggtggagagcgagggcgagagaaagaccaaggtggagagagacatcggcgagggcaacctgagcaccgccgccgccgccgccctggccgccgccgccgtgaaggccaagcacctggccgccgtggaggagagaaagatcaagagcctggtggccctgctggtggagacccagatgaagaagctggagatcaagctgagacacttcgaggagctggagaccatcatggacagagagagagaggccctggagtaccagagacagcagctgctggccgacagacaggccttccacatggagcagctgaagtacgccgagatgagagccagacagcagcacttccagcagatgcaccagcagcagcagcagcccccccccgccctgccccccggcagccagcccatcccccccaccggcgccgccggcccccccgccgtgcacggcctggccgtggcccccgccagcgtggtgcccgcccccgccggcagcggcgccccccccggcagcctgggccccagcgagcagatcggccaggccggcagcaccgccggcccccagcagcagcagcccgccggcgccccccagcccggcgccgtgccccccggcgtgcccccccccggcccccacggccccagccccttccccaaccagcagaccccccccagcatgatgcccggcgccgtgcccggcagcggccaccccggcgtggccggcaacgcccccctgggcctgcccttcggcatgcccccccccccccccccccccgcccccagcatcatccccttcggcagcctggccgacagcatcagcatcaacctgcccgccccccccaacctgcacggccaccaccaccacctgcccttcgcccccggcaccctgcccccccccaacctgcccgtgagcatggccaaccccctgcaccccaacctgcccgccaccaccaccatgcccagcagcctgcccctgggccccggcctgggcagcgccgccgcccagagccccgccatcgtggccgccgtgcagggcaacctgctgcccagcgccagccccctgcccgaccccggcacccccctgccccccgaccccaccgcccccagccccggcaccgtgacccccgtgccccccccccagtag

SEQ ID NO: 101386 - DNA, 3393 bp, synthetic construct
  misc_feature 1..3393: note = Description of Artificial Sequence: Synthetic coding sequence
  source 1..3393: mol_type = other DNA
atggccgtgagaaagaaggacggcggccccaacgtgaagtactacgaggccgccgacaccgtgacccagttcgacaacgtgagactgtggctgggcaagaactacaagaagtacatccaggccgagccccccaccaacaagagcctgagcagcctggtggtgcagctgctgcagttccaggaggaggtgttcggcaagcacgtgagcaacgcccccctgaccaagctgcccatcaagtgcttcctggacttcaaggccggcggcagcctgtgccacatcctggccgccgcctacaagttcaagagcgaccagggctggagaagatacgacttccagaaccccagcagaatggacagaaacgtggagatgttcatgaccatcgagaagagcctggtgcagaacaactgcctgagcagacccaacatcttcctgtgccccgagatcgagcccaagctgctgggcaagctgaaggacatcatcaagagacaccagggcaccgtgaccgaggacaagaacaacgccagccacgtggtgtaccccgtgcccggcaacctggaggaggaggagtgggtgagacccgtgatgaagagagacaagcaggtgctgctgcactggggctactaccccgacagctacgacacctggatccccgccagcgagatcgaggccagcgtggaggacgcccccacccccgagaagcccagaaaggtgcacgccaagtggatcctggacaccgacaccttcaacgagtggatgaacgaggaggactacgaggtgaacgacgacaagaaccccgtgagcagaagaaagaagatcagcgccaagaccctgaccgacgaggtgaacagccccgacagcgacagaagagacaagaagggcggcaactacaagaagagaaagagaagccccagccccagccccacccccgaggccaagaagaagaacgccaagaagggccccagcaccccctacaccaagagcaagagaggccacagagaggaggagcaggaggacctgaccaaggacatggacgagcccagccccgtgcccaacgtggaggaggtgaccctgcccaagaccgtgaacaccaagaaggacagcgagagcgcccccgtgaagggcggcaccatgaccgacctggacgagcaggaggacgagagcatggagaccaccggcaaggacgaggacgagaacagcaccggcaacaagggcgagcagaccaagaaccccgacctgcacgaggacaacgtgaccgagcagacccaccacatcatcatccccagctacgccgcctggttcgactacaacagcgtgcacgccatcgagagaagagccctgcccgagttcttcaacggcaagaacaagagcaagacccccgagatctacctggcctacagaaacttcatgatcgacacctacagactgaacccccaggagtacctgaccagcaccgcctgcagaagaaacctggccggcgacgtgtgcgccatcatgagagtgcacgccttcctggagcagtggggcctgatcaactaccaggtggacgccgagagcagacccacccccatgggccccccccccaccagccacttccacgtgctggccgacacccccagcggcctggtgcccctgcagcccaagaccccccagggcagacaggtggacgccgacaccaaggccggcagaaagggcaaggagctggacgacctggtgcccgagaccgccaagggcaagcccgagctgcagaccagcgccagccagcagatgctgaacttccccgacaagggcaaggagaagcccaccgacatgcagaacttcggcctgagaaccgacatgtacaccaagaagaacgtgcccagcaagagcaaggccgccgccagcgccaccagagagtggaccgagcaggagaccctgctgctgctggaggccctggagatgtacaaggacgactggaacaaggtgagcgagcacgtgggcagcagaacccaggacgagtgcatcctgcacttcctgagactgcccatcgaggacccctacctggaggacagcgaggccagcctgggccccctggcctaccagcccatccccttcagccagagcggcaaccccgtgatgagcaccgtggccttcctggccagcgtggtggaccccagagtggccagcgccgccgccaagagcgccctggaggagttcagcaagatgaaggaggaggtgcccaccgccctggtggaggcccacgtgagaaaggtggaggaggccgccaaggtgaccggcaaggccgaccccgccttcggcctggagagcagcggcatcgccggcaccaccagcgacgagcccgagagaatcgaggagagcggcaacgacgaggccagagtggagggccaggccaccgacgagaagaaggagcccaaggagcccagagagggcggcggcgccatcgaggaggaggccaaggagaagaccagcgaggcccccaagaaggacgaggagaagggcaaggagggcgacagcgagaaggagagcgagaagagcgacggcgaccccatcgtggaccccgagaaggagaaggagcccaaggagggccaggaggaggtgctgaaggaggtggtggagagcgagggcgagagaaagaccaaggtggagagagacatcggcgagggcaacctgagcaccgccgccgccgccgccctggccgccgccgccgtgaaggccaagcacctggccgccgtggaggagagaaagatcaagagcctggtggccctgctggtggagacccagatgaagaagctggagatcaagctgagacacttcgaggagctggagaccatcatggacagagagagagaggccctggagtaccagagacagcagctgctggccgacagacaggccttccacatggagcagctgaagtacgccgagatgagagccagacagcagcacttccagcagatgcaccagcagcagcagcagcccccccccgccctgccccccggcagccagcccatcccccccaccggcgccgccggcccccccgccgtgcacggcctggccgtggcccccgccagcgtggtgcccgcccccgccggcagcggcgccccccccggcagcctgggccccagcgagcagatcggccaggccggcagcaccgccggcccccagcagcagcagcccgccggcgccccccagcccggcgccgtgccccccggcgtgcccccccccggcccccacggccccagccccttccccaaccagcagaccccccccagcatgatgcccggcgccgtgcccggcagcggccaccccggcgtggccgaccccggcacccccctgccccccgaccccaccgcccccagccccggcaccgtgacccccgtgccccccccccagtag

SEQ ID NO: 101387 - DNA, 3459 bp, synthetic construct
  misc_feature 1..3459: note = Description of Artificial Sequence: Synthetic coding sequence
  source 1..3459: mol_type = other DNA
atggccgtgagaaagaaggacggcggccccaacgtgaagtactacgaggccgccgacaccgtgacccagttcgacaacgtgagactgtggctgggcaagaactacaagaagtacatccaggccgagccccccaccaacaagagcctgagcagcctggtggtgcagctgctgcagttccaggaggaggtgttcggcaagcacgtgagcaacgcccccctgaccaagctgcccatcaagtgcttcctggacttcaaggccggcggcagcctgtgccacatcctggccgccgcctacaagttcaagagcgaccagggctggagaagatacgacttccagaaccccagcagaatggacagaaacgtggagatgttcatgaccatcgagaagagcctggtgcagaacaactgcctgagcagacccaacatcttcctgtgccccgagatcgagcccaagctgctgggcaagctgaaggacatcatcaagagacaccagggcaccgtgaccgaggacaagaacaacgccagccacgtggtgtaccccgtgcccggcaacctggaggaggaggagtgggtgagacccgtgatgaagagagacaagcaggtgctgctgcactggggctactaccccgacagctacgacacctggatccccgccagcgagatcgaggccagcgtggaggacgcccccacccccgagaagcccagaaaggtgcacgccaagtggatcctggacaccgacaccttcaacgagtggatgaacgaggaggactacgaggtgaacgacgacaagaaccccgtgagcagaagaaagaagatcagcgccaagaccctgaccgacgaggtgaacagccccgacagcgacagaagagacaagaagggcggcaactacaagaagagaaagagaagccccagccccagccccacccccgaggccaagaagaagaacgccaagaagggccccagcaccccctacaccaagagcaagagaggccacagagaggaggagcaggaggacctgaccaaggacatggacgagcccagccccgtgcccaacgtggaggaggtgaccctgcccaagaccgtgaacaccaagaaggacagcgagagcgcccccgtgaagggcggcaccatgaccgacctggacgagcaggaggacgagagcatggagaccaccggcaaggacgaggacgagaacagcaccggcaacaagggcgagcagaccaagaaccccgacctgcacgaggacaacgtgaccgagcagacccaccacatcatcatccccagctacgccgcctggttcgactacaacagcgtgcacgccatcgagagaagagccctgcccgagttcttcaacggcaagaacaagagcaagacccccgagatctacctggcctacagaaacttcatgatcgacacctacagactgaacccccaggagtacctgaccagcaccgcctgcagaagaaacctggccggcgacgtgtgcgccatcatgagagtgcacgccttcctggagcagtggggcctgatcaactaccaggtggacgccgagagcagacccacccccatgggccccccccccaccagccacttccacgtgctggccgacacccccagcggcctggtgcccctgcagcccaagaccccccagggcagacaggtggacgccgacaccaaggccggcagaaagggcaaggagctggacgacctggtgcccgagaccgccaagggcaagcccgagctgcagaccagcgccagccagcagatgctgaacttccccgacaagggcaaggagaagcccaccgacatgcagaacttcggcctgagaaccgacatgtacaccaagaagaacgtgcccagcaagagcaaggccgccgccagcgccaccagagagtggaccgagcaggagaccctgctgctgctggaggccctggagatgtacaaggacgactggaacaaggtgagcgagcacgtgggcagcagaacccaggacgagtgcatcctgcacttcctgagactgcccatcgaggacccctacctggaggacagcgaggccagcctgggccccctggcctaccagcccatccccttcagccagagcggcaaccccgtgatgagcaccgtggccttcctggccagcgtggtggaccccagagtggccagcgccgccgccaagagcgccctggaggagttcagcaagatgaaggaggaggtgcccaccgccctggtggaggcccacgtgagaaaggtggaggaggccgccaaggtgaccggcaaggccgaccccgccttcggcctggagagcagcggcatcgccggcaccaccagcgacgagcccgagagaatcgaggagagcggcaacgacgaggccagagtggagggccaggccaccgacgagaagaaggagcccaaggagcccagagagggcggcggcgccatcgaggaggaggccaaggagaagaccagcgaggcccccaagaaggacgaggagaagggcaaggagggcgacagcgagaaggagagcgagaagagcgacggcgaccccatcgtggaccccgagaaggagaaggagcccaaggagggccaggaggaggtgctgaaggaggtggtggagagcgagggcgagagaaagaccaaggtggagagagacatcggcgagggcaacctgagcaccgccgccgccgccgccctggccgccgccgccgtgaaggccaagcacctggccgccgtggaggagagaaagatcaagagcctggtggccctgctggtggagacccagatgaagaagctggagatcaagctgagacacttcgaggagctggagaccatcatggacagagagagagaggccctggagtaccagagacagcagctgctggccgacagacaggccttccacatggagcagctgaagtacgccgagatgagagccagacagcagcacttccagcagatgcaccagcagcagcagcagcccccccccgccctgccccccggcagccagcccatcccccccaccggcgccgccggcccccccgccgtgcacggcctggccgtggcccccgccagcgtggtgcccgcccccgccggcagcggcgccccccccggcagcctgggccccagcgagcagatcggccaggccggcagcaccgccggcccccagcagcagcagcccgccggcgccccccagcccggcgccgtgccccccggcgtgcccccccccggcccccacggccccagccccttccccaaccagcagaccccccccagcatgatgcccggcgccgtgcccggcagcggccaccccggcgtggccgcccagagccccgccatcgtggccgccgtgcagggcaacctgctgcccagcgccagccccctgcccgaccccggcacccccctgccccccgaccccaccgcccccagccccggcaccgtgacccccgtgccccccccccagtag

SEQ ID NO: 101388 - DNA, 1425 bp, synthetic construct
  misc_feature 1..1425: note = Description of Artificial Sequence: Synthetic coding sequence
  source 1..1425: mol_type = other DNA
atggccgccagagccggcttccagagcgtggcccccagcggcggcgccggcgccagcggcggcgccggcgccgccgccgccctgggccccggcggcacccccggcccccccgtgagaatgggccccgcccccggccagggcctgtacagaagccccatgcccggcgccgcctaccccagacccggcatgctgcccggcagcagaatgaccccccagggccccagcatgggcccccccggctacggcggcaaccccagcgtgagacccggcctggcccagagcggcatggaccagagcagaaagagacccgccccccagcagatccagcaggtgcagcagcaggccgtgcagaacagaaaccacaacgccaagaagaagaagatggccgacaagatcctgccccagagaatcagagagctggtgcccgagagccaggcctacatggacctgctggccttcgagagaaagctggaccagaccatcatgagaaagagactggacatccaggaggccctgaagagacccatcaagcagaagagaaagctgagaatcttcatcagcaacaccttcaaccccgccaagagcgacgccgaggacggcgagggcaccgtggccagctgggagctgagagtggagggcagactgctggaggacagcgccctgagcaagtacgacgccaccaagcagaagagaaagttcagcagcttcttcaagagcctggtgatcgagctggacaaggacctgtacggccccgacaaccacctggtggagtggcacagaaccgccaccacccaggagaccgacggcttccaggtgaagagacccggcgacgtgaacgtgagatgcaccgtgctgctgatgctggactaccagcccccccagttcaagctggaccccagactggccagactgctgggcatccacacccagaccagacccgtgatcatccaggccctgtggcagtacatcaagacccacaagctgcaggacccccacgagagagagttcgtgatctgcgacaagtacctgcagcagatcttcgagagccagagaatgaagttcagcgagatcccccagagactgcacgccctgctgatgccccccgagcccatcatcatcaaccacgtgatcagcgtggaccccaacgaccagaagaagaccgcctgctacgacatcgacgtggaggtggacgacaccctgaagacccagatgaacagcttcctgctgagcaccgccagccagcaggagatcgccaccctggacaacaagaccatgaccgacgtggtgggcaaccccgaggaggagagaagagccgagttctacttccagccctgggcccaggaggccgtgtgcagatacttctacagcaaggtgcagcagagaagacaggagctggagcaggccctgggcatcagaaacacctag

SEQ ID NO: 101389 - DNA, 1548 bp, synthetic construct
  misc_feature 1..1548: note = Description of Artificial Sequence: Synthetic coding sequence
  source 1..1548: mol_type = other DNA
atggccgccagagccggcttccagagcgtggcccccagcggcggcgccggcgccagcggcggcgccggcgccgccgccgccctgggccccggcggcacccccggcccccccgtgagaatgggccccgcccccggccagggcctgtacagaagccccatgcccggcgccgcctaccccagacccggcatgctgcccggcagcagaatgaccccccagggccccagcatgggcccccccggctacggcggcaaccccagcgtgagacccggcctggcccagagcggcatggaccagagcagaaagagacccgccccccagcagatccagcaggtgcagcagcaggccgtgcagaacagaaaccacaacgccaagaagaagaagatggccgacaagatcctgccccagagaatcagagagctggtgcccgagagccaggcctacatggacctgctggccttcgagagaaagctggaccagaccatcatgagaaagagactggacatccaggaggccctgaagagacccatcaagcagaagagaaagctgagaatcttcatcagcaacaccttcaaccccgccaagagcgacgccgaggacggcgagggcaccgtggccagctgggagctgagagtggagggcagactgctggaggacagcgccctgagcaagtacgacgccaccaagcagaagagaaagttcagcagcttcttcaagagcctggtgatcgagctggacaaggacctgtacggccccgacaaccacctggtggagtggcacagaaccgccaccacccaggagaccgacggcttccaggtgaagagacccggcgacgtgaacgtgagatgcaccgtgctgctgatgctggactaccagcccccccagttcaagctggaccccagactggccagactgctgggcatccacacccagaccagacccgtgatcatccaggccctgtggcagtacatcaagacccacaagctgcaggacccccacgagagagagttcgtgatctgcgacaagtacctgcagcagatcttcgagagccagagaatgaagttcagcgagatcccccagagactgcacgccctgctgatgccccccgagcccatcatcatcaaccacgtgatcagcgtggaccccaacgaccagaagaagaccgcctgctacgacatcgacgtggaggtggacgacaccctgaagacccagatgaacagcttcctgctgagcaccgccagccagcaggagatcgccaccctggacaacaagatccacgagaccatcgagaccatcaaccagctgaagacccagagagagttcatgctgagcttcgccagagacccccagggcttcatcaacgactggctgcagagccagtgcagagacctgaagaccatgaccgacgtggtgggcaaccccgaggaggagagaagagccgagttctacttccagccctgggcccaggaggccgtgtgcagatacttctacagcaaggtgcagcagagaagacaggagctggagcaggccctgggcatcagaaacacctag

SEQ ID NO: 101390 - DNA, 876 bp, synthetic construct
  misc_feature 1..876: note = Description of Artificial Sequence: Synthetic coding sequence
  source 1..876: mol_type = other DNA
atgatgcccctgaacaagagaggcagcagcctgcccttcaagagcctggtgatcgagctggacaaggacctgtacggccccgacaaccacctggtggagtggcacagaaccgccaccacccaggagaccgacggcttccaggtgaagagacccggcgacgtgaacgtgagatgcaccgtgctgctgatgctggactaccagcccccccagttcaagctggaccccagactggccagactgctgggcatccacacccagaccagacccgtgatcatccaggccctgtggcagtacatcaagacccacaagctgcaggacccccacgagagagagttcgtgatctgcgacaagtacctgcagcagatcttcgagagccagagaatgaagttcagcgagatcccccagagactgcacgccctgctgatgccccccgagcccatcatcatcaaccacgtgatcagcgtggaccccaacgaccagaagaagaccgcctgctacgacatcgacgtggaggtggacgacaccctgaagacccagatgaacagcttcctgctgagcaccgccagccagcaggagatcgccaccctggacaacaagatccacgagaccatcgagaccatcaaccagctgaagacccagagagagttcatgctgagcttcgccagagacccccagggcttcatcaacgactggctgcagagccagtgcagagacctgaagaccatgaccgacgtggtgggcaaccccgaggaggagagaagagccgagttctacttccagccctgggcccaggaggccgtgtgcagatacttctacagcaaggtgcagcagagaagacaggagctggagcaggccctgggcatcagaaacacctag

SEQ ID NO: 101391 - DNA, 1362 bp, synthetic construct; identical to SEQ ID NO: 72420
  misc_feature 1..1362: note = Description of Artificial Sequence: Synthetic coding sequence
  source 1..1362: mol_type = other DNA

SEQ ID NO: 101392 - DNA, 1452 bp, synthetic construct
  misc_feature 1..1452: note = Description of Artificial Sequence: Synthetic coding sequence
  source 1..1452: mol_type = other DNA
atgggcagaagagtgggcgtggaggtgacccccagatgggccccccagaagtgccagggcgccagaccccagagacccggcatgagccccggcaacagaatgcccatggccggcctgcaggtgggcccccccgccggcagccccttcggcgccgccgcccccctgagacccggcatgccccccaccatgatggaccccttcagaaagagactgctggtgccccaggcccagccccccatgcccgcccagagaagaggcctgaagagaagaaagatggccgacaaggtgctgccccagagaatcagagagctggtgcccgagagccaggcctacatggacctgctggccttcgagagaaagctggaccagaccatcgccagaaagagaatggagatccaggaggccatcaagaagcccctgacccagaagagaaagctgagaatctacatcagcaacaccttcagccccagcaaggccgagggcgacagcgccggcaccgccggcacccccggcggcacccccgccggcgacaaggtggccagctgggagctgagagtggagggcaagctgctggacgaccccagcaagcagaagagaaagttcagcagcttcttcaagagcctggtgatcgagctggacaaggagctgtacggccccgacaaccacctggtggagtggcacagaatgcccaccacccaggagaccgacggcttccaggtgaagagacccggcgacctgaacgtgaagtgcaccctgctgctgatgctggaccaccagcccccccagtacaagctggaccccagactggccagactgctgggcgtgcacacccagaccagagccgccatcatgcaggccctgtggctgtacatcaagcacaaccagctgcaggacggccacgagagagagtacatcaactgcaacagatacttcagacagatcttcagctgcggcagactgagattcagcgagatccccatgaagctggccggcctgctgcagcaccccgaccccatcgtgatcaaccacgtgatcagcgtggaccccaacgaccagaagaagaccgcctgctacgacatcgacgtggaggtggacgaccccctgaaggcccagatgagcaacttcctggccagcaccaccaaccagcaggagatcgccagcctggacgtgaagatccacgagaccatcgagagcatcaaccagctgaagacccagagagacttcatgctgagcttcagcaccgacccccaggacttcatccaggagtggctgagaagccagagaagagacctgaagatcatcaccgacgtgatcggcaaccccgaggaggagagaagagccgccttctaccaccagccctgggcccaggaggccgtgggcagacacatcttcgccaaggtgcagcagagaagacaggagctggagcaggtgctgggcatcagactgacctag

SEQ ID NO: 101393 - DNA, 1596 bp, synthetic construct
  misc_feature 1..1596: note = Description of Artificial Sequence: Synthetic coding sequence
  source 1..1596: mol_type = other DNA
atgagcggcagaggcgccggcggcttccccctgccccccctgagccccggcggcggcgccgtggccgccgccctgggcgccccccccccccccgccggccccggcatgctgcccggccccgccctgagaggccccggccccgccggcggcgtgggcggccccggcgccgccgccttcagacccatgggccccgccggccccgccgcccagtaccagagacccggcatgagccccggcaacagaatgcccatggccggcctgcaggtgggcccccccgccggcagccccttcggcgccgccgcccccctgagacccggcatgccccccaccatgatggaccccttcagaaagagactgctggtgccccaggcccagccccccatgcccgcccagagaagaggcctgaagagaagaaagatggccgacaaggtgctgccccagagaatcagagagctggtgcccgagagccaggcctacatggacctgctggccttcgagagaaagctggaccagaccatcgccagaaagagaatggagatccaggaggccatcaagaagcccctgacccagaagagaaagctgagaatctacatcagcaacaccttcagccccagcaaggccgagggcgacagcgccggcaccgccggcacccccggcggcacccccgccggcgacaaggtggccagctgggagctgagagtggagggcaagctgctggacgaccccagcaagcagaagagaaagttcagcagcttcttcaagagcctggtgatcgagctggacaaggagctgtacggccccgacaaccacctggtggagtggcacagaatgcccaccacccaggagaccgacggcttccaggtgaagagacccggcgacctgaacgtgaagtgcaccctgctgctgatgctggaccaccagcccccccagtacaagctggaccccagactggccagactgctgggcgtgcacacccagaccagagccgccatcatgcaggccctgtggctgtacatcaagcacaaccagctgcaggacggccacgagagagagtacatcaactgcaacagatacttcagacagatcttcagctgcggcagactgagattcagcgagatccccatgaagctggccggcctgctgcagcaccccgaccccatcgtgatcaaccacgtgatcagcgtggaccccaacgaccagaagaagaccgcctgctacgacatcgacgtggaggtggacgaccccctgaaggcccagatgagcaacttcctggccagcaccaccaaccagcaggagatcgccagcctggacgtgaagatccacgagaccatcgagagcatcaaccagctgaagacccagagagacttcatgctgagcttcagcaccgacccccaggacttcatccaggagtggctgagaagccagagaagagacctgaagatcatcaccgacgtgatcggcaaccccgaggaggagagaagagccgccttctaccaccagccctgggcccaggaggccgtgggcagacacatcttcgccaaggtgcagcagagaagacaggagctggagcaggtgctgggcatcagactgacctag

SEQ ID NO: 101394 - DNA, 1485 bp, synthetic construct
  misc_feature 1..1485: note = Description of Artificial Sequence: Synthetic coding sequence
  source 1..1485: mol_type = other DNA
atgagcggcagaggcgccggcggcttccccctgccccccctgagccccggcggcggcgccgccttcagacccatgggccccgccggccccgccgcccagtaccagagacccggcatgagccccggcaacagaatgcccatggccggcctgcaggtgggcccccccgccggcagccccttcggcgccgccgcccccctgagacccggcatgccccccaccatgatggaccccttcagaaagagactgctggtgccccaggcccagccccccatgcccgcccagagaagaggcctgaagagaagaaagatggccgacaaggtgctgccccagagaatcagagagctggtgcccgagagccaggcctacatggacctgctggccttcgagagaaagctggaccagaccatcgccagaaagagaatggagatccaggaggccatcaagaagcccctgacccagaagagaaagctgagaatctacatcagcaacaccttcagccccagcaaggccgagggcgacagcgccggcaccgccggcacccccggcggcacccccgccggcgacaaggtggccagctgggagctgagagtggagggcaagctgctggacgaccccagcaagcagaagagaaagttcagcagcttcttcaagagcctggtgatcgagctggacaaggagctgtacggccccgacaaccacctggtggagtggcacagaatgcccaccacccaggagaccgacggcttccaggtgaagagacccggcgacctgaacgtgaagtgcaccctgctgctgatgctggaccaccagcccccccagtacaagctggaccccagactggccagactgctgggcgtgcacacccagaccagagccgccatcatgcaggccctgtggctgtacatcaagcacaaccagctgcaggacggccacgagagagagtacatcaactgcaacagatacttcagacagatcttcagctgcggcagactgagattcagcgagatccccatgaagctggccggcctgctgcagcaccccgaccccatcgtgatcaaccacgtgatcagcgtggaccccaacgaccagaagaagaccgcctgctacgacatcgacgtggaggtggacgaccccctgaaggcccagatgagcaacttcctggccagcaccaccaaccagcaggagatcgccagcctggacgtgaagatccacgagaccatcgagagcatcaaccagctgaagacccagagagacttcatgctgagcttcagcaccgacccccaggacttcatccaggagtggctgagaagccagagaagagacctgaagatcatcaccgacgtgatcggcaaccccgaggaggagagaagagccgccttctaccaccagccctgggcccaggaggccgtgggcagacacatcttcgccaaggtgcagcagagaagacaggagctggagcaggtgctgggcatcagactgacctag

SEQ ID NO: 101395 - DNA, 1452 bp, synthetic construct
  misc_feature 1..1452: note = Description of Artificial Sequence: Synthetic coding sequence
  source 1..1452: mol_type = other DNA
atggccgccgacgaggtggccggcggcgccagaaaggccaccaagagcaagctgttcgagttcctggtgcacggcgtgagacccggcatgcccagcggcgccagaatgccccaccagggcgcccccatgggcccccccggcagcccctacatgggcagccccgccgtgagacccggcctggcccccgccggcatggagcccgccagaaagagagccgcccccccccccggccagagccaggcccagagccagggccagcccgtgcccaccgcccccgccagaagcagaagcgccaagagaagaaagatggccgacaagatcctgccccagagaatcagagagctggtgcccgagagccaggcctacatggacctgctggccttcgagagaaagctggaccagaccatcatgagaaagagagtggacatccaggaggccctgaagagacccatgaagcagaagagaaagctgagactgtacatcagcaacaccttcaaccccgccaagcccgacgccgaggacagcgacggcagcatcgccagctgggagctgagagtggagggcaagctgctggacgaccccagcaagcagaagagaaagttcagcagcttcttcaagagcctggtgatcgagctggacaaggacctgtacggccccgacaaccacctggtggagtggcacagaacccccaccacccaggagaccgacggcttccaggtgaagagacccggcgacctgagcgtgagatgcaccctgctgctgatgctggactaccagcccccccagttcaagctggaccccagactggccagactgctgggcctgcacacccagagcagaagcgccatcgtgcaggccctgtggcagtacgtgaagaccaacagactgcaggacagccacgacaaggagtacatcaacggcgacaagtacttccagcagatcttcgactgccccagactgaagttcagcgagatcccccagagactgaccgccctgctgctgccccccgaccccatcgtgatcaaccacgtgatcagcgtggaccccagcgaccagaagaagaccgcctgctacgacatcgacgtggaggtggaggagcccctgaagggccagatgagcagcttcctgctgagcaccgccaaccagcaggagatcagcgccctggacagcaagatccacgagaccatcgagagcatcaaccagctgaagatccagagagacttcatgctgagcttcagcagagaccccaagggctacgtgcaggacctgctgagaagccagagcagagacctgaaggtgatgaccgacgtggccggcaaccccgaggaggagagaagagccgagttctaccaccagccctggagccaggaggccgtgagcagatacttctactgcaagatccagcagagaagacaggagctggagcagagcctggtggtgagaaacacctag

SEQ ID NO: 101396 - DNA, 1308 bp, synthetic construct
  misc_feature 1..1308: note = Description of Artificial Sequence: Synthetic coding sequence
  source 1..1308: mol_type = other DNA
atgacccccggcctgcagcacccccccaccgtggtgcagagacccggcatgcccagcggcgccagaatgccccaccagggcgcccccatgggcccccccggcagcccctacatgggcagccccgccgcccccgccagaagcagaagcgccaagagaagaaagatggccgacaagatcctgccccagagaatcagagagctggtgcccgagagccaggcctacatggacctgctggccttcgagagaaagctggaccagaccatcatgagaaagagagtggacatccaggaggccctgaagagacccatgaagcagaagagaaagctgagactgtacatcagcaacaccttcaaccccgccaagcccgacgccgaggacagcgacggcagcatcgccagctgggagctgagagtggagggcaagctgctggacgaccccagcaagcagaagagaaagttcagcagcttcttcaagagcctggtgatcgagctggacaaggacctgtacggccccgacaaccacctggtggagtggcacagaacccccaccacccaggagaccgacggcttccaggtgaagagacccggcgacctgagcgtgagatgcaccctgctgctgatgctggactaccagcccccccagttcaagctggaccccagactggccagactgctgggcctgcacacccagagcagaagcgccatcgtgcaggccctgtggcagtacgtgaagaccaacagactgcaggacagccacgacaaggagtacatcaacggcgacaagtacttccagcagatcttcgactgccccagactgaagttcagcgagatcccccagagactgaccgccctgctgctgccccccgaccccatcgtgatcaaccacgtgatcagcgtggaccccagcgaccagaagaagaccgcctgctacgacatcgacgtggaggtggaggagcccctgaagggccagatgagcagcttcctgctgagcaccgccaaccagcaggagatcagcgccctggacagcaagatccacgagaccatcgagagcatcaaccagctgaagatccagagagacttcatgctgagcttcagcagagaccccaagggctacgtgcaggacctgctgagaagccagagcagagacctgaaggtgatgaccgacgtggccggcaaccccgaggaggagagaagagccgagttctaccaccagccctggagccaggaggccgtgagcagatacttctactgcaagatccagcagagaagacaggagctggagcagagcctggtggtgagaaacacctag

SEQ ID NO: 101397 - DNA, 1413 bp, synthetic construct
  misc_feature 1..1413: note = Description of Artificial Sequence: Synthetic coding sequence
  source 1..1413: mol_type = other DNA
atgacccccggcctgcagcacccccccaccgtggtgcagagacccggcatgcccagcggcgccagaatgccccaccagggcgcccccatgggcccccccggcagcccctacatgggcagccccgccgtgagacccggcctggcccccgccggcatggagcccgccagaaagagagccgcccccccccccggccagagccaggcccagagccagggccagcccgtgcccaccgcccccgccagaagcagaagcgccaagagaagaaagatggccgacaagatcctgccccagagaatcagagagctggtgcccgagagccaggcctacatggacctgctggccttcgagagaaagctggaccagaccatcatgagaaagagagtggacatccaggaggccctgaagagacccatgaagcagaagagaaagctgagactgtacatcagcaacaccttcaaccccgccaagcccgacgccgaggacagcgacggcagcatcgccagctgggagctgagagtggagggcaagctgctggacgaccccagcaagcagaagagaaagttcagcagcttcttcaagagcctggtgatcgagctggacaaggacctgtacggccccgacaaccacctggtggagtggcacagaacccccaccacccaggagaccgacggcttccaggtgaagagacccggcgacctgagcgtgagatgcaccctgctgctgatgctggactaccagcccccccagttcaagctggaccccagactggccagactgctgggcctgcacacccagagcagaagcgccatcgtgcaggccctgtggcagtacgtgaagaccaacagactgcaggacagccacgacaaggagtacatcaacggcgacaagtacttccagcagatcttcgactgccccagactgaagttcagcgagatcccccagagactgaccgccctgctgctgccccccgaccccatcgtgatcaaccacgtgatcagcgtggaccccagcgaccagaagaagaccgcctgctacgacatcgacgtggaggtggaggagcccctgaagggccagatgagcagcttcctgctgagcaccgccaaccagcaggagatcagcgccctggacagcaagatccacgagaccatcgagagcatcaaccagctgaagatccagagagacttcatgctgagcttcagcagagaccccaagggctacgtgcaggacctgctgagaagccagagcagagacctgaaggtgatgaccgacgtggccggcaaccccgaggaggagagaagagccgagttctaccaccagccctggagccaggaggccgtgagcagatacttctactgcaagatccagcagagaagacaggagctggagcagagcctggtggtgagaaacacctag

SEQ ID NO: 101398 - DNA, 1413 bp, synthetic construct; identical to SEQ ID NO: 101397
  misc_feature 1..1413: note = Description of Artificial Sequence: Synthetic coding sequence
  source 1..1413: mol_type = other DNA

SEQ ID NO: 101399 - DNA, 420 bp, synthetic construct
  misc_feature 1..420: note = Description of Artificial Sequence: Synthetic coding sequence
  source 1..420: mol_type = other DNA
atgacccccggcctgcagcacccccccaccgtggtgcagagacccggcatgcccagcggcgccagaatgccccaccagggcgcccccatgggcccccccggcagcccctacatgggcagccccgccgtgagacccggcctggcccccgccggcatggagcccgccagaaagagagccgcccccccccccggccagagccaggcccagagccagggccagcccgtgcccaccgcccccgccagaagcagaagcgccaagagaagaaagatggccgacaagatcctgccccagagaatcagagagctggtgcccgagagccaggcctacatggacctgctggccttcgagagaaagctggaccagaccatcatgagaaagagagtggacatccaggaggccctgaagagacccatgaagtag

SEQ ID NO: 101400 - DNA, 3081 bp, synthetic construct
  misc_feature 1..3081: note = Description of Artificial Sequence: Synthetic coding sequence
  source 1..3081: mol_type = other DNA
atgaacctgttcaacctggacagattcagattcgagaagagaaacaagatcgaggaggcccccgaggccaccccccagcccagccagcccggccccagcagccccatcagcctgagcgccgaggaggagaacgccgagggcgaggtgagcagagccaacacccccgacagcgacatcaccgagaagaccgaggacagcagcgtgcccgagacccccgacaacgagagaaaggccagcatcagctacttcaagaaccagagaggcatccagtacatcgacctgagcagcgacagcgaggacgtggtgagccccaactgcagcaacaccgtgcaggagaagaccttcaacaaggacaccgtgatcatcgtgagcgagcccagcgaggacgaggagagccagggcctgcccaccatggccagaagaaacgacgacatcagcgagctggaggacctgagcgagctggaggacctgaaggacgccaagctgcagaccctgaaggagctgttcccccagagaagcgacaacgacctgctgaagctgatcgagagcaccagcaccatggacggcgccatcgccgccgccctgctgatgttcggcgacgccggcggcggccccagaaagagaaagctgagcagcagcagcgagccctacgaggaggacgagttcaacgacgaccagagcatcaagaagaccagactggaccacggcgaggagagcaacgagagcgccgagagcagcagcaactgggagaagcaggagagcatcgtgctgaagctgcagaaggagttccccaacttcgacaagcaggagctgagagaggtgctgaaggagcacgagtggatgtacaccgaggccctggagagcctgaaggtgttcgccgaggaccaggacatgcagtacgtgagccagagcgaggtgcccaacggcaaggaggtgagcagcagaagccagaactaccccaagaacgccaccaagaccaagctgaagcagaagttcagcatgaaggcccagaacggcttcaacaagaagagaaagaagaacgtgttcaaccccaagagagtggtggaggacagcgagtacgacagcggcagcgacgtgggcagcagcctggacgaggactacagcagcggcgaggaggtgatggaggacggctacaagggcaagatcctgcacttcctgcaggacgccagcatcggcgagctgaccctgatcccccagtgcagccagaagaaggcccagaagatcaccgagctgagacccttcaacagctgggaggccctgttcaccaagatgagcaagaccaacggcctgagcgaggacctgatctggcactgcaagaccctgatccaggagagagacgtggtgatcagactgatgaacaagtgcgaggacatcagcaacaagctgaccaagcaggtgaccatgctgaccggcaacggcggcggctggaacatcgagcagcccagcatcctgaaccagagcctgagcctgaagccctaccagaaggtgggcctgaactggctggccctggtgcacaagcacggcctgaacggcatcctggccgacgagatgggcctgggcaagaccatccaggccatcgccttcctggcctacctgtaccaggagggcaacaacggcccccacctgatcgtggtgcccgccagcaccatcgacaactggctgagagaggtgaacctgtggtgccccaccctgaaggtgctgtgctactacggcagccaggaggagagaaagcagatcagattcaacatccacagcagatacgaggactacaacgtgatcgtgaccacctacaactgcgccatcagcagcagcgacgacagaagcctgttcagaagactgaagctgaactacgccatcttcgacgagggccacatgctgaagaacatgggcagcatcagataccagcacctgatgaccatcaacgccaacaacagactgctgctgaccggcacccccgtgcagaacaacctgctggagctgatgagcctgctgaacttcgtgatgccccacatgttcagcagcagcaccagcgagatcagaagaatgttcagcagcaagaccaagagcgccgacgagcagagcatctacgagaaggagagaatcgcccacgccaagcagatcatcaagcccttcatcctgagaagagtgaaggaggaggtgctgaagcagctgccccccaagaaggacagaatcgagctgtgcgccatgagcgagaagcaggagcagctgtacctgggcctgttcaacagactgaagaagagcatcaacaacctggagaagaacaccgagatgtgcaacgtgatgatgcagctgagaaagatggccaaccaccccctgctgcacagacagtactacaccgccgagaagctgaaggagatgagccagctgatgctgaaggagcccacccactgcgaggccaaccccgacctgatcttcgaggacatggaggtgatgaccgacttcgagctgcacgtgctgtgcaagcagtacagacacatcaacaacttccagctggacatggacctgatcctggacagcggcaagttcagagtgctgggctgcatcctgagcgagctgaagcagaagggcgacagagtggtgctgttcagccagttcaccatgatgctggacatcctggaggtgctgctgaagcaccaccagcacagatacctgagactggacggcaagacccagatcagcgagagaatccacctgatcgacgagttcaacaccgacatggacatcttcgtgttcctgctgagcaccaaggccggcggcctgggcatcaacctgaccagcgccaacgtggtgatcctgcacgacatcgactgcaacccctacaacgacaagcaggccgaggacagatgccacagagtgggccagaccaaggaggtgctggtgatcaagctgatcagccagggcaccatcgaggagagcatgctgaagatcaaccagcagaagctgaagctggagcaggacatgaccaccgtggacgagggcgacgagggcagcatgcccgccgacatcgccaccctgctgaagaccagcatgggcctgtag

SEQ ID NO: 101401 - DNA, 3087 bp, synthetic construct
  misc_feature 1..3087: note = Description of Artificial Sequence: Synthetic coding sequence
  source 1..3087: mol_type = other DNA
atgaacctgttcaacctggacagattcagattcgagaagagaaacaagatcgaggaggcccccgaggccaccccccagcccagccagcccggccccagcagccccatcagcctgagcgccgaggaggagaacgccgagggcgaggtgagcagagccaacacccccgacagcgacatcaccgagaagaccgaggacagcagcgtgcccgagacccccgacaacgagagaaaggccagcatcagctacttcaagaaccagagaggcatccagtacatcgacctgagcagcgacagcgaggacgtggtgagccccaactgcagcaacaccgtgcaggagaagaccttcaacaaggacaccgtgatcatcgtgagcgagcccagcgaggacgaggagagccagggcctgcccaccatggccagaagaaacgacgacatcagcgagctggaggacctgagcgagctggaggacctgaaggacgccaagctgcagaccctgaaggagctgttcccccagagaagcgacaacgacctgctgaagctgatcgagagcaccagcaccatggacggcgccatcgccgccgccctgctgatgttcggcgacgccggcggcggccccagaaagagaaagctgagcagcagcagcgagccctacgaggaggacgagttcaacgacgaccagagcatcaagaagaccagactggaccacggcgaggagagcaacgagagcgccgagagcagcagcaactgggagaagcaggagagcatcgtgctgaagctgcagaaggagttccccaacttcgacaagcaggagctgagagaggtgctgaaggagcacgagtggatgtacaccgaggccctggagagcctgaaggtgttcgccgaggaccaggacatgcagtacgtgagccagagcgaggtgcccaacggcaaggaggtgagcagcagaagccagaactaccccaagaacgccaccaagaccaagctgaagcagaagttcagcatgaaggcccagaacggcttcaacaagaagagaaagaagaacgtgttcaaccccaagagagtggtggaggacagcgagtacgacagcggcagcgacgtgggcagcagcctggacgaggactacagcagcggcgaggaggtgatggaggacggctacaagggcaagatcctgcacttcctgcaggacgccagcatcggcgagctgaccctgatcccccagtgcagccagaagaaggcccagaagatcaccgagctgagacccttcaacagctgggaggccctgttcaccaagatgagcaagaccaacggcctgagcgaggacctgatctggcactgcaagaccctgatccaggagagagacgtggtgatcagactgatgaacaagtgcgaggacatcagcaacaagctgaccaagcaggtgaccatgctgaccggcaacggcggcggctggaacatcgagcagcccagcatcctgaaccagagcctgagcctgaagccctaccagaaggtgggcctgaactggctggccctggtgcacaagcacggcctgaacggcatcctggccgacgagatgggcctgggcaagaccatccaggccatcgccttcctggcctacctgtaccaggagggcaacaacggcccccacctgatcgtggtgcccgccagcaccatcgacaactggctgagagaggtgaacctgtggtgccccaccctgaaggtgctgtgctactacggcagccaggaggagagaaagcagatcagattcaacatccacagcagatacgaggactacaacgtgatcgtgaccacctacaactgcgccatcagcagcagcgacgacagaagcctgttcagaagactgaagctgaactacgccatcttcgacgagggccacatgctgaagaacatgggcagcatcagataccagcacctgatgaccatcaacgccaacaacagactgctgctgaccggcacccccgtgcagaacaacctgctggagctgatgagcctgctgaacttcgtgatgccccacatgttcagcagcagcaccagcgagatcagaagaatgttcagcagcaagaccaagagcgccgacgagcagagcatctacgagaaggagagaatcgcccacgccaagcagatcatcaagcccttcatcctgagaagagtgaaggaggaggtgctgaagcagctgccccccaagaaggacagaatcgagctgtgcgccatgagcgagaagcaggagcagctgtacctgggcctgttcaacagactgaagaagagcatcaacaacctggtgaccgagaagaacaccgagatgtgcaacgtgatgatgcagctgagaaagatggccaaccaccccctgctgcacagacagtactacaccgccgagaagctgaaggagatgagccagctgatgctgaaggagcccacccactgcgaggccaaccccgacctgatcttcgaggacatggaggtgatgaccgacttcgagctgcacgtgctgtgcaagcagtacagacacatcaacaacttccagctggacatggacctgatcctggacagcggcaagttcagagtgctgggctgcatcctgagcgagctgaagcagaagggcgacagagtggtgctgttcagccagttcaccatgatgctggacatcctggaggtgctgctgaagcaccaccagcacagatacctgagactggacggcaagacccagatcagcgagagaatccacctgatcgacgagttcaacaccgacatggacatcttcgtgttcctgctgagcaccaaggccggcggcctgggcatcaacctgaccagcgccaacgtggtgatcctgcacgacatcgactgcaacccctacaacgacaagcaggccgaggacagatgccacagagtgggccagaccaaggaggtgctggtgatcaagctgatcagccagggcaccatcgaggagagcatgctgaagatcaaccagcagaagctgaagctggagcaggacatgaccaccgtggacgagggcgacgagggcagcatgcccgccgacatcgccaccctgctgaagaccagcatgggcctgtag

SEQ ID NO: 101402 - DNA, 3087 bp, synthetic construct; identical to SEQ ID NO: 101401
  misc_feature 1..3087: note = Description of Artificial Sequence: Synthetic coding sequence
  source 1..3087: mol_type = other DNA

SEQ ID NO: 101403 - DNA, 957 bp, synthetic construct
  misc_feature 1..957: note = Description of Artificial Sequence: Synthetic coding sequence
  source 1..957: mol_type = other DNA
atgaacctgttcaacctggacagattcagattcgagaagagaaacaagatcgaggaggcccccgaggccaccccccagcccagccagcccggccccagcagccccatcagcctgagcgccgaggaggagaacgccgagggcgaggtgagcagagccaacacccccgacagcgacatcaccgagaagaccgaggacagcagcgtgcccgagacccccgacaacgagagaaaggccagcatcagctacttcaagaaccagagaggcatccagtacatcgacctgagcagcgacagcgaggacgtggtgagccccaactgcagcaacaccgtgcaggagaagaccttcaacaaggacaccgtgatcatcgtgagcgagcccagcgaggacgaggagagccagggcctgcccaccatggccagaagaaacgacgacatcagcgagctggaggacctgagcgagctggaggacctgaaggacgccaagctgcagaccctgaaggagctgttcccccagagaagcgacaacgacctgctgaagctgatcgagagcaccagcaccatggacggcgccatcgccgccgccctgctgatgttcggcgacgccggcggcggccccagaaagagaaagctgagcagcagcagcgagccctacgaggaggacgagttcaacgacgaccagagcatcaagaagaccagactggaccacggcgaggagagcaacgagagcgccgagagcagcagcaactgggagaagcaggagagcatcgtgctgaagctgcagaaggagttccccaacttcgacaagcaggagctgagagaggtgctgaaggagcacgagtggatgtacaccgaggccctggagagcctgaaggtgttcgccgaggaccaggacatgcagtacgtgagccagagcgaggtgcccaacggcaagaagaaggcccagaagaagaagaagtag

SEQ ID NO: 101404 - DNA, 732 bp, synthetic construct
  misc_feature 1..732: note = Description of Artificial Sequence: Synthetic coding sequence
  source 1..732: mol_type = other DNA
atggccgccatcgccgccagcgaggtgctggtggacagcgccgaggagggcagcctggccgccgccgccgagctggccgcccagaagagagagcagagactgagaaagttcagagagctgcacctgatgagaaacgaggccagaaagctgaaccaccaggaggtggtggaggaggacaagagactgaagctgcccgccaactgggaggccaagaaggccagactggagtgggagctgaaggaggaggagaagaagaaggagtgcgccgccagaggcgaggactacgagaaggtgaagctgctggagatcagcgccgaggacgccgagagatgggagagaaagaagaagagaaagaaccccgacctgggcttcagcgactacgccgccgcccagctgagacagtaccacagactgaccaagcagatcaagcccgacatggagacctacgagagactgagagagaagcacggcgaggagttcttccccaccagcaacagcctgctgcacggcacccacgtgcccagcaccgaggagatcgacagaatggtgatcgacctggagaagcagatcgagaagagagacaagtacagcagaagaagaccctacaacgacgacgccgacatcgactacatcaacgagagaaacgccaagttcaacaagaaggccgagagattctacggcaagtacaccgccgagatcaagcagaacctggagagaggcaccgccgtgtag

SEQ ID NO: 101405 - DNA, 606 bp, synthetic construct
  misc_feature 1..606: note = Description of Artificial Sequence: Synthetic coding sequence
  source 1..606: mol_type = other DNA
atggccgccatcgccgccagcgaggtgctggtggacagcgccgaggagggcagcctggccgccgccgccgagctggccgcccagaagagagagcagagactgagaaagttcagagagctgcacctgatgagagagtgcgccgccagaggcgaggactacgagaaggtgaagctgctggagatcagcgccgaggacgccgagagatgggagagaaagaagaagagaaagaaccccgacctgggcttcagcgactacgccgccgcccagctgagacagtaccacagactgaccaagcagatcaagcccgacatggagacctacgagagactgagagagaagcacggcgaggagttcttccccaccagcaacagcctgctgcacggcacccacgtgcccagcaccgaggagatcgacagaatggtgatcgacctggagaagcagatcgagaagagagacaagtacagcagaagaagaccctacaacgacgacgccgacatcgactacatcaacgagagaaacgccaagttcaacaagaaggccgagagattctacggcaagtacaccgccgagatcaagcagaacctggagagaggcaccgccgtgtag

SEQ ID NO: 101406 - DNA, 777 bp, synthetic construct
  misc_feature 1..777: note = Description of Artificial Sequence: Synthetic coding sequence
  source 1..777: mol_type = other DNA
atggacggcatcatcgagcagaagagcatgctggtgcacagcaagatcagcgacgccggcaagagaaacggcctgatcaacaccagaaacctgatggccgagagcagagacggcctggtgagcgtgtaccccgccccccagtaccagagccacagagtgggcgccagcaccgtgcccgccagcctggacagcagcagaagcgagcccatgcagcagctgctggaccccaacaccctgcagcagagcgtggagagcagatacagacccaacatcatcctgtacagcgagggcgtgctgagaagctggggcgacggcgtggccgccgactgctgcgagaccaccttcatcgaggacagaagccccaccaaggacagcctggagtaccccgacggcaagttcatcgacctgagcgccgacgacatcaagatccacaccctgagctacgacgtggaggaggaggaggagttccaggagctggagagcgactacagcagcgacaccgagagcgaggacaacttcctgatgatgccccccagagaccacctgggcctgagcgtgttcagcatgctgtgctgcttctggcccctgggcatcgccgccttctacctgagccacgagaccaacaaggccgtggccaagggcgacctgcaccaggccagcaccagcagcagaagagccctgttcctggccgtgctgagcatcaccatcggcaccggcgtgtacgtgggcgtggccgtggccctgatcgcctacctgagcaagaacaaccacctgtag

SEQ ID NO: 101407 - DNA, 717 bp, synthetic construct
  misc_feature 1..717: note = Description of Artificial Sequence: Synthetic coding sequence
  source 1..717: mol_type = other DNA
atggagagcctgagcgagctgcagaaccccctgctgcccagaagccccgcccacctgcacggcccctacccctaccccgagaccccccccagctggagctgccaggagaagctgtacagctacctgctgggcggcgccggccccgccggcgcccaccagctgctggaccccggcagcctgcagctggccgtggaggcctggtacagacccagctgcctgctgggcagagacaaggtgaaggagcccagagccggcagctgcgagaccagcttcaccgaggacagagagccccaggagggcccccccgagcagcccaccggccccggccaggccgccgagaacgtgaccatccagaccgtgagctacggcgtgcaggaggagctgagagaccaggaggacgaccaggaggaggaggagagcgacgccaccagcaccgagagcgagagcgaggacaacttcctgaccctgccccccagagaccacctgggcctgaccctgttcagcatgctgtgctgcttctggcccctgggcatcgccgccttctacttcagccagggcaccagcaaggccatcagcaagggcgacttcagactggccagcaccaccagcagaagagccctgttcctggccaccctggccatcgccgtgggcgccggcctgtacgtggccgtggtggtggccctggccgcctacatgagccagaacggccacggctag

SEQ ID NO: 101408 - DNA, 717 bp, synthetic construct; identical to SEQ ID NO: 101407
  misc_feature 1..717: note = Description of Artificial Sequence: Synthetic coding sequence
  source 1..717: mol_type = other DNA

SEQ ID NO: 101409 - DNA, 243 bp, synthetic construct
  misc_feature 1..243: note = Description of Artificial Sequence: Synthetic coding sequence
  source 1..243: mol_type = other DNA
atggagagcctgagcgagctgcagaaccccctgctgcccagaagccccgcccacctgcacggcccctacccctaccccgagaccccccccagctggagctgccaggagaagctgtacagctacctgctgggcggcgccggccccgccggcgcccaccagctgctggaccccggcagcctgcagctggccgtggaggcctggtacagacccagctgcctgctgggcagagacaaggtgaagtag

SEQ ID NO: 101410 - DNA, 2118 bp, synthetic construct
  misc_feature 1..2118: note = Description of Artificial Sequence: Synthetic coding sequence
  source 1..2118: mol_type = other DNA
atgaactacctgagaagaagactgagcgacagcaacttcatggccaacctgcccaacggctacatgaccgacctgcagagaccccagccccccccccccccccccggcgcccacagccccggcgccacccccggccccggcaccgccaccgccgagagaagcagcggcgtggcccccgccgccagccccgccgcccccagccccggcagcagcggcggcggcggcttcttcagcagcctgagcaacgccgtgaagcagaccaccgccgccgccgccgccaccttcagcgagcaggtgggcggcggcagcggcggcgccggcagaggcggcgccgccagcagagtgctgctggtgatcgacgagccccacaccgactgggccaagtacttcaagggcaagaagatccacggcgagatcgacatcaaggtggagcaggccgagttcagcgacctgaacctggtggcccacgccaacggcggcttcagcgtggacatggaggtgctgagaaacggcgtgaaggtggtgagaagcctgaagcccgacttcgtgctgatcagacagcacgccttcagcatggccagaaacggcgactacagaagcctggtgatcggcctgcagtacgccggcatccccagcgtgaacagcctgcacagcgtgtacaacttctgcgacaagccctgggtgttcgcccagatggtgagactgcacaagaagctgggcaccgaggagttccccctgatcgaccagaccttctaccccaaccacaaggagatgctgagcagcaccacctaccccgtggtggtgaagatgggccacgcccacagcggcatgggcaaggtgaaggtggacaaccagcacgacttccaggacatcgccagcgtggtggccctgaccaagacctacgccaccgccgagcccttcatcgacgccaagtacgacgtgagagtgcagaagatcggccagaactacaaggcctacatgagaaccagcgtgagcggcaactggaagaccaacaccggcagcgccatgctggagcagatcgccatgagcgacagatacaagctgtgggtggacacctgcagcgagatcttcggcggcctggacatctgcgccgtggaggccctgcacggcaaggacggcagagaccacatcatcgaggtggtgggcagcagcatgcccctgatcggcgaccaccaggacgaggacaagcagctgatcgtggagctggtggtgaacaagatggcccaggccctgcccagacagagacagagagacgccagccccggcagaggcagccacggccagacccccagccccggcgccctgcccctgggcagacagaccagccagcagcccgccggcccccccgcccagcagagaccccccccccagggcggccccccccagcccggccccggcccccagagacagggcccccccctgcagcagagaccccccccccagggccagcagcacctgagcggcctgggcccccccgccggcagccccctgccccagagactgcccagccccaccagcgccccccagcagcccgccagccaggccgccccccccacccagggccagggcagacagagcagacccgtggccggcggccccggcgccccccccgccgccagaccccccgccagccccagcccccagagacaggccggccccccccaggccaccagacagaccagcgtgagcggccccgccccccccaaggccagcggcgccccccccggcggccagcagagacagggccccccccagaagccccccggccccgccggccccaccagacaggccagccaggccggccccgtgcccagaaccggcccccccaccacccagcagcccagacccagcggccccggccccgccggcagacccaagccccagctggcccagaagcccagccaggacgtgcccccccccgccaccgccgccgccggcggccccccccacccccagctgaacaagagccagagcctgaccaacgccttcaacctgcccgagcccgccccccccagacccagcctgagccaggacgaggtgaaggccgagaccatcagaagcctgagaaagagcttcgccagcctgttcagcgactag

SEQ ID NO: 101411 - DNA, 2010 bp, synthetic construct
  misc_feature 1..2010: note = Description of Artificial Sequence: Synthetic coding sequence
  source 1..2010: mol_type = other DNA
atgaactacctgagaagaagactgagcgacagcaacttcatggccaacctgcccaacggctacatgaccgacctgcagagaccccagccccccccccccccccccggcgcccacagccccggcgccacccccggccccggcaccgccaccgccgagagaagcagcggcgtggcccccgccgccagccccgccgcccccagccccggcagcagcggcggcggcggcttcttcagcagcctgagcaacgccgtgaagcagaccaccgccgccgccgccgccaccttcagcgagcaggtgggcggcggcagcggcggcgccggcagaggcggcgccgccagcagagtgctgctggtgatcgacgagccccacaccgactgggccaagtacttcaagggcaagaagatccacggcgagatcgacatcaaggtggagcaggccgagttcagcgacctgaacctggtggcccacgccaacggcggcttcagcgtggacatggaggtgctgagaaacggcgtgaaggtggtgagaagcctgaagcccgacttcgtgctgatcagacagcacgccttcagcatggccagaaacggcgactacagaagcctggtgatcggcctgcagtacgccggcatccccagcgtgaacagcctgcacagcgtgtacaacttctgcgacaagccctgggtgttcgcccagatggtgagactgcacaagaagctgggcaccgaggagttccccctgatcgaccagaccttctaccccaaccacaaggagatgctgagcagcaccacctaccccgtggtggtgaagatgggccacgcccacagcggcatgggcaaggtgaaggtggacaaccagcacgacttccaggacatcgccagcgtggtggccctgaccaagacctacgccaccgccgagcccttcatcgacgccaagtacgacgtgagagtgcagaagatcggccagaactacaaggcctacatgagaaccagcgtgagcggcaactggaagaccaacaccggcagcgccatgctggagcagatcgccatgagcgacagatacaagctgtgggtggacacctgcagcgagatcttcggcggcctggacatctgcgccgtggaggccctgcacggcaaggacggcagagaccacatcatcgaggtggtgggcagcagcatgcccctgatcggcgaccaccaggacgaggacaagcagctgatcgtggagctggtggtgaacaagatggcccaggccctgcccagacagagacagagagacgccagccccggcagaggcagccacggccagacccccagccccggcgccctgcccctgggcagacagaccagccagcagcccgccggcccccccgcccagcagagaccccccccccagggcggccccccccagcccggccccggcccccagagacagggcccccccctgcagcagagaccccccccccagggccagcagcacctgagcggcctgggcccccccgccggcagccccctgccccagagactgcccagccccaccagcgccccccagcagcccgccagccaggccgccccccccacccagggccagggcagacagagcagacccgtggccggcggccccggcgccccccccgccgccagaccccccgccagccccagcccccagagacaggccggccccccccaggccaccagacagaccagcgtgagcggccccgccccccccaaggccagcggcgccccccccggcggccagcagagacagggccccccccagaagccccccggccccgccggccccaccagacaggccagccaggccggccccgtgcccagaaccggcccccccaccacccagcagcccagacccagcggccccggccccgccggcagacccaagccccagctggcccagaagcccagccaggacgtgcccccccccgccaccgccgccgccggcggccccccccacccccagctgaaggccagccccgcccaggcccagccctag

SEQ ID NO: 101412 - DNA, 1743 bp, synthetic construct
  misc_feature 1..1743: note = Description of Artificial Sequence: Synthetic coding sequence
  source 1..1743: mol_type = other DNA
atgaacttcctgagaagaagactgagcgacagcagcttcatggccaacctgcccaacggctacatgaccgacctgcagagacccgacagcagcaccagcagccccgccagccccgccatggagagaagacacccccagcccctggccgccagcttcagcagccccggcagcagcctgttcagcagcctgagcagcgccatgaagcaggccccccaggccaccagcggcctgatggagccccccggccccagcacccccatcgtgcagagacccagaatcctgctggtgatcgacgacgcccacaccgactggagcaagtacttccacggcaagaaggtgaacggcgagatcgagatcagagtggagcaggccgagttcagcgagctgaacctggccgcctacgtgaccggcggctgcatggtggacatgcaggtggtgagaaacggcaccaaggtggtgagcagaagcttcaagcccgacttcatcctggtgagacagcacgcctacagcatggccctgggcgaggactacagaagcctggtgatcggcctgcagtacggcggcctgcccgccgtgaacagcctgtacagcgtgtacaacttctgcagcaagccctgggtgttcagccagctgatcaagatcttccacagcctgggccccgagaagttccccctggtggagcagaccttcttccccaaccacaagcccatggtgaccgccccccacttccccgtggtggtgaagctgggccacgcccacgccggcatgggcaagatcaaggtggagaaccagctggacttccaggacatcaccagcgtggtggccatggccaagacctacgccaccaccgaggccttcatcgacagcaagtacgacatcagaatccagaagatcggcagcaactacaaggcctacatgagaaccagcatcagcggcaactggaaggccaacaccggcagcgccatgctggagcaggtggccatgaccgagagatacagactgtgggtggacagctgcagcgagatgttcggcggcctggacatctgcgccgtgaaggccgtgcacagcaaggacggcagagactacatcatcgaggtgatggacagcagcatgcccctgatcggcgagcacgtggaggaggacagacagctgatggccgacctggtggtgagcaagatgagccagctgcccatgcccggcggcaccgcccccagccccctgagaccctgggccccccagatcaagagcgccaagagccccggccaggcccagctgggcccccagctgggccagccccagcccagaccccccccccagggcggccccagacaggcccagagcccccagccccagagaagcggcagccccagccagcagagactgagcccccagggccagcagcccctgagcccccagagcggcagcccccagcagcagagaagccccggcagcccccagctgagcagagccagcagcggcagcagccccaaccaggccagcaagcccggcgccaccctggccagccagcccagaccccccgtgcagggcagaagcaccagccagcagggcgaggagagcaagaagcccgcccccccccacccccacctgaacaagagccagagcctgaccaacagcctgagcaccagcgacaccagccagagaggcacccccagcgaggacgaggccaaggccgagaccatcagaaacctgagaaagagcttcgccagcctgttcagcgactag

SEQ ID NO: 101413 - DNA, 1743 bp, synthetic construct; identical to SEQ ID NO: 101412
  misc_feature 1..1743: note = Description of Artificial Sequence: Synthetic coding sequence
  source 1..1743: mol_type = other DNA

SEQ ID NO: 101414 - DNA, 1335 bp, synthetic construct
  misc_feature 1..1335: note = Description of Artificial Sequence: Synthetic coding sequence
  source 1..1335: mol_type = other DNA
atgaacttcctgagaagaagactgagcgacagcagcttcatggccaacctgcccaacggctacatgaccgacctgcagagacccgacagcagcaccagcagccccgccagccccgccatggagagaagacacccccagcccctggccgccagcttcagcagccccggcagcagcctgttcagcagcctgagcagcgccatgaagcaggccccccaggccaccagcggcctgatggagccccccggccccagcacccccatcgtgcagagacccagaatcctgctggtgatcgacgacgcccacaccgactggagcaagtacttccacggcaagaaggtgaacggcgagatcgagatcagagtggagcaggccgagttcagcgagctgaacctggccgcctacgtgaccggcggctgcatggtggacatgcaggtggtgagaaacggcaccaaggtggtgagcagaagcttcaagcccgacttcatcctggtgagacagcacgcctacagcatggccctgggcgaggactacagaagcctggtgatcggcctgcagtacggcggcctgcccgccgtgaacagcctgtacagcgtgtacaacttctgcagcaagccctgggtgttcagccagctgatcaagatcttccacagcctgggccccgagaagttccccctggtggagcagaccttcttccccaaccacaagcccatggtgaccgccccccacttccccgtggtggtgaagctgggccacgcccacgccggcatgggcaagatcaaggtggagaaccagctggacttccaggacatcaccagcgtggtggccatggccaagacctacgccaccaccgaggccttcatcgacagcaagtacgacatcagaatccagaagatcggcagcaactacaaggcctacatgagaaccagcatcagcggcaactggaaggccaacaccggcagcgccatgctggagcaggtggccatgaccgagagatacagactgtgggtggacagctgcagcgagatgttcggcggcctggacatctgcgccgtgaaggccgtgcacagcaaggacggcagagactacatcatcgaggtgatggacagcagcatgcccctgatcggcgagcacgtggaggaggacagacagctgatggccgacctggtggtgagcaagatgagccagctgcccatgcccggcggcaccgcccccagccccctgagaccctgggccccccagatcaagagcgccaagagccccggccaggcccagctgggcccccagctgggccagccccagcccagaccccccccccaggtgagcttcagcccctag

SEQ ID NO: 101415 - DNA, 342 bp, synthetic construct
  misc_feature 1..342: note = Description of Artificial Sequence: Synthetic coding sequence
  source 1..342: mol_type = other DNA
atgaacttcctgagaagaagactgagcgacagcagcttcatggccaacctgcccaacggctacatgaccgacctgcagagacccgacagcagcaccagcagccccgccagccccgccatggagagaagacacccccagcccctggccgccagcttcagcagccccggcagcagcctgttcagcagcctgagcagcgccatgaagcaggccccccaggccaccagcggcctgatggagccccccggccccagcacccccatcgtgcagagacccagaatcctgctggtgatcgacgacgcccacaccgactggagcaagtacttccacggcaagaaggtgtag

SEQ ID NO: 101416 - DNA, 372 bp, synthetic construct
  misc_feature 1..372: note = Description of Artificial Sequence: Synthetic coding sequence
  source 1..372: mol_type = other DNA
atgaacttcctgagaagaagactgagcgacagcagcttcatggccaacctgcccaacggctacatgaccgacctgcagagacccgacagcagcaccagcagccccgccagccccgccatggagagaagacacccccagcccctggccgccagcttcagcagccccggcagcagcctgttcagcagcctgagcagcgccatgaagcaggccccccaggccaccagcggcctgatggagccccccggccccagcacccccatcgtgcagagacccagaatcctgctggtgatcgacgacgcccacaccgactggagcaagtacttccacggcaagaaggtgaacggcgagatcgagatcagagtggagcagtag

SEQ ID NO: 101417 - DNA, 561 bp, synthetic construct
  misc_feature 1..561: note = Description of Artificial Sequence: Synthetic coding sequence
  source 1..561: mol_type = other DNA
atggacagcagcatgcccctgatcggcgagcacgtggaggaggacagacagctgatggccgacctggtggtgagcaagatgagccagctgcccatgcccggcggcaccgcccccagccccctgagaccctgggccccccagatcaagagcgccaagagccccggccaggcccagctgggcccccagctgggccagccccagcccagaccccccccccagggcggccccagacaggcccagagcccccagcagcagagaagccccggcagcccccagctgagcagagccagcagcggcagcagccccaaccaggccagcaagcccggcgccaccctggccagccagcccagaccccccgtgcagggcagaagcaccagccagcagggcgaggagagcaagaagcccgcccccccccacccccacctgaacaagagccagagcctgaccaacagcctgagcaccagcgacaccagccagagaggcacccccagcgaggacgaggccaaggccgagaccatcagaaacctgagaaagagcttcgccagcctgttcagcgactag

SEQ ID NO: 101418 - DNA, 1212 bp, synthetic construct
  misc_feature 1..1212: note = Description of Artificial Sequence: Synthetic coding sequence
  source 1..1212: mol_type = other DNA
atgagccacagaaagttcagcgcccccagacacggcagcctgggcttcctgcccagaaagagaagcagcagacacagaggcaaggtgaagagcttccccaaggacgaccccagcaagcccgtgcacctgaccgccttcctgggctacaaggccggcatgacccacatcgtgagagaggtggacagacccggcagcaaggtgaacaagaaggaggtggtggaggccgtgaccatcgtggagaccccccccatggtggtggtgggcatcgtgggctacgtggagacccccagaggcctgagaaccttcaagaccgtgttcgccgagcacatcagcgacgagtgcaagagaagattctacaagaactggcacaagagcaagaagaaggccttcaccaagtactgcaagaagtggcaggacgaggacggcaagaagcagctggagaaggacttcagcagcatgaagaagtactgccaggtgatcagagtgatcgcccacacccagatgagactgctgcccctgagacagaagaaggcccacctgatggagatccaggtgaacggcggcaccgtggccgagaagctggactgggccagagagagactggagcagcaggtgcccgtgaaccaggtgttcggccaggacgagatgatcgacgtgatcggcgtgaccaagggcaagggctacaagggcgtgaccagcagatggcacaccaagaagctgcccagaaagacccacagaggcctgagaaaggtggcctgcatcggcgcctggcaccccgccagagtggccttcagcgtggccagagccggccagaagggctaccaccacagaaccgagatcaacaagaagatctacaagatcggccagggctacctgatcaaggacggcaagctgatcaagaacaacgccagcaccgactacgacctgagcgacaagagcatcaaccccctgggcggcttcgtgcactacggcgaggtgaccaacgacttcgtgatgctgaagggctgcgtggtgggcaccaagaagagagtgctgaccctgagaaagagcctgctggtgcagaccaagagaagagccctggagaagatcgacctgaagttcatcgacaccaccagcaagttcggccacggcagattccagaccatggaggagaagaaggccttcatgggccccctgaagaaggacagaatcgccaaggaggagggcgcctag

SEQ ID NO: 101419 - DNA, 576 bp, synthetic construct
  misc_feature 1..576: note = Description of Artificial Sequence: Synthetic coding sequence
  source 1..576: mol_type = other DNA
atggagggcggcgcctacggcgccggcaaggccggcggcgccttcgacccctacaccctggtgagacagccccacaccatcctgagagtggtgagctggctgttcagcatcgtggtgttcggcagcatcgtgaacgagggctacctgaacagcgccagcgagggcgaggagttctgcatctacaacagaaaccccaacgcctgcagctacggcgtggccgtgggcgtgctggccttcctgacctgcctgctgtacctggccctggacgtgtacttcccccagatcagcagcgtgaaggacagaaagaaggccgtgctgagcgacatcggcgtgagcgccttctgggccttcctgtggttcgtgggcttctgctacctggccaaccagtggcaggtgagcaagcccaaggacaaccccctgaacgagggcaccgacgccgccagagccgccatcgccttcagcttcttcagcatcttcacctggagcctgaccgccgccctggccgtgagaagattcaaggacctgagcttccaggaggagtacagcaccctgttccccgccagcgcccagccctag

SEQ ID NO: 101420 - DNA, 702 bp, synthetic construct
  misc_feature 1..702: note = Description of Artificial Sequence: Synthetic coding sequence
  source 1..702: mol_type = other DNA
atggagggcggcgcctacggcgccggcaaggccggcggcgccttcgacccctacaccctggtgagacagccccacaccatcctgagagtggtgagctggctgttcagcatcgtggtgttcggcagcatcgtgaacgagggctacctgaacagcgccagcgagggcgaggagttctgcatctacaacagaaaccccaacgcctgcagctacggcgtggccgtgggcgtgctggccttcctgacctgcctgctgtacctggccctggacgtgtacttcccccagatcagcagcgtgaaggacagaaagaaggccgtgctgagcgacatcggcgtgagcgccttctgggccttcctgtggttcgtgggcttctgctacctggccaaccagtggcaggtgagcaagcccaaggacaaccccctgaacgagggcaccgacgccgccagagccgccatcgccttcagcttcttcagcatcttcacctgggccggccaggccgtgctggccttccagagataccagatcggcgccgacagcgccctgttcagccaggactacatggaccccagccaggacagcagcatgccctacgccccctacgtggagcccaccggccccgaccccgccggcatgggcggcacctaccagcagcccgccaacaccttcgacaccgagccccagggctaccagagccagggctactag

SEQ ID NO: 101421 - DNA, 579 bp, synthetic construct
  misc_feature 1..579: note = Description of Artificial Sequence: Synthetic coding sequence
  source 1..579: mol_type = other DNA
atgctgaccctggagttcggcatcctggagttcgaccccagctggatcggcagctggacccagagaagctgggtgagctggagaagcagacccggctgcgagctgttcagcatcgtggtgttcggcagcatcgtgaacgagggctacctgaacagcgccagcgagggcgaggagttctgcatctacaacagaaaccccaacgcctgcagctacggcgtggccgtgggcgtgctggccttcctgacctgcctgctgtacctggccctggacgtgtacttcccccagatcagcagcgtgaaggacagaaagaaggccgtgctgagcgacatcggcgtgagcgccttctgggccttcctgtggttcgtgggcttctgctacctggccaaccagtggcaggtgagcaagcccaaggacaaccccctgaacgagggcaccgacgccgccagagccgccatcgccttcagcttcttcagcatcttcacctggagcctgaccgccgccctggccgtgagaagattcaaggacctgagcttccaggaggagtacagcaccctgttccccgccagcgcccagccctag

SEQ ID NO: 101422 - DNA, 510 bp, synthetic construct
  misc_feature 1..510: note = Description of Artificial Sequence: Synthetic coding sequence
  source 1..510: mol_type = other DNA
atggagggcggcgcctacggcgccggcaaggccggcggcgccttcgacccctacaccctggtgagacagccccacaccatcctgagagtggtgagctggctgttcagcatcgtggtgttcggcagcatcgtgaacgagggctacctgaacagcgccagcgagggcgaggagttctgcatctacaacagaaaccccaacgcctgcagctacggcgtggccgtgggcgtgctggccttcctgacctgcctgctgtacctggccctggacgtgtacttcccccagatcagcagcgtgaaggacagaaagaaggccgtgctgagcgacatcggcgtgagcgccttctgggccttcctgtggttcgtgggcttctgctacctggccaaccagtggcaggtgagcaagcccaaggacaaccccctgaacgagggcaccgacgccgccagagccgccatcgccttcagcttcttcagcatcttcacctggagaagcggcgccaccagccccccctag

SEQ ID NO: 101423 - DNA, 297 bp, synthetic construct
  misc_feature 1..297: note = Description of Artificial Sequence: Synthetic coding sequence
  source 1..297: mol_type = other DNA
atggccagcggcgccggcggcagctggggcagaagccccccccagagcgccgtgcccaccccctgggtgaccttcctgcagcccctgagctgggccgtgccccccgcccccccccagcccggcagagtgaaggaggacctgctggagctgatgatgctgcagaacgcccagatgcaccagctgctgctgagcagactggtggccggcgccctgcagcccagacccgccagcccctgcccccaggagagctgcgcccccacccccaccccccagtgccacagagactgcggctgctag

SEQ ID NO: 101424 - DNA, 690 bp, synthetic construct
  misc_feature 1..690: note = Description of Artificial Sequence: Synthetic coding sequence
  source 1..690: mol_type = other DNA
atggagggcgccagcttcggcgccggcagagccggcgccgccctggaccccgtgagcttcgccagaagaccccagaccctgctgagagtggccagctgggtgttcagcatcgccgtgttcggccccatcgtgaacgagggctacgtgaacaccgacagcggccccgagctgagatgcgtgttcaacggcaacgccggcgcctgcagattcggcgtggccctgggcctgggcgccttcctggcctgcgccgccttcctgctgctggacgtgagattccagcagatcagcagcgtgagagacagaagaagagccgtgctgctggacctgggcttcagcggcctgtggagcttcctgtggttcgtgggcttctgcttcctgaccaaccagtggcagagaaccgcccccggccccgccaccacccaggccggcgacgccgccagagccgccatcgccttcagcttcttcagcatcctgagctgggtggccctgaccgtgaaggccctgcagagattcagactgggcaccgacatgagcctgttcgccaccgagcagctgagcaccggcgccagccaggcctaccccggctaccccgtgggcagcggcgtggagggcaccgagacctaccagagcccccccttcaccgagaccctggacaccagccccaagggctaccaggtgcccgcctactag

SEQ ID NO: 101425 - DNA, 438 bp, synthetic construct
  misc_feature 1..438: note = Description of Artificial Sequence: Synthetic coding sequence
  source 1..438: mol_type = other DNA
atggagggcgccagcttcggcgccggcagagccggcgccgccctggaccccgtgagcttcgccagaagaccccagaccctgctgagagtggccagctgggtgttcagcatcgccgtgttcggccccatcgtgaacgagggctacgtgaacaccgacagcggccccgagctgagatgcgtgttcaacggcaacgccggcgcctgcagattcggcgtggccctgggcctgggcgccttcctggcctgcgccgccttcctgctgctggacgtgagattccagcagagcggcggcagaggcaagaccccccccagcccccaggactggggcagctggcccctgttccccagccacgtgcccgtgggcagcgactgcctggtgagcgtgatggtggtgagacccgtgagaagccacagccccctgagcctgaccggctgctag

SEQ ID NO: 101426 - DNA, 705 bp, synthetic construct
  misc_feature 1..705: note = Description of Artificial Sequence: Synthetic coding sequence
  source 1..705: mol_type = other DNA
atgcacatccccaagagcctgcaggagctggccaacagcgaggccgtgcagttcctgagaagacccaagaccatcaccagagtgttcgagggcgtgttcagcctgatcgtgttcagcagcctgctgaccgacggctaccagaacaagatggagagcccccagctgcactgcatcctgaacagcaacagcgtggcctgcagcttcgccgtgggcgccggcttcctggccttcctgagctgcctggccttcctggtgctggacacccaggagaccagaatcgccggcaccagattcaagaccgccttccagctgctggacttcatcctggccgtgctgtgggccgtggtgtggttcatgggcttctgcttcctggccaaccagtggcagcacagcccccccaaggagttcctgctgggcagcagcagcgcccaggccgccatcgccttcaccttcttcagcatcctggtgtggatcttccaggcctacctggccttccaggacctgagaaacgacgcccccgtgccctacaagagattcctggacgagggcggcatggtgctgaccaccctgcccctgcccagcgccaacagccccgtgaacatgcccaccaccggccccaacagcctgagctacgccagcagcgccctgagcccctgcctgaccgcccccaagagccccagactggccatgatgcccgacaactag

SEQ ID NO: 101427 - DNA, 4722 bp, synthetic construct
  misc_feature 1..4722: note = Description of Artificial Sequence: Synthetic coding sequence
  source 1..4722: mol_type = other DNA
atggccttcagcaagggcttcagaatctaccacaagctggaccccccccccttcagcctgatcgtggagaccagacacaaggaggagtgcctgatgttcgagagcggcgccgtggccgtgctgagcagcgccgagaaggaggccatcaagggcacctacagcaaggtgctggacgcctacggcctgctgggcgtgctgagactgaacctgggcgacaccatgctgcactacctggtgctggtgaccggctgcatgagcgtgggcaagatccaggagagcgaggtgttcagagtgaccagcaccgagttcatcagcctgagaatcgacagcagcgacgaggacagaatcagcgaggtgagaaaggtgctgaacagcggcaacttctacttcgcctggagcgccagcggcatcagcctggacctgagcctgaacgcccacagaagcatgcaggagcagaccaccgacaacagattcttctggaaccagagcctgcacctgcacctgaagcactacggcgtgaactgcgacgactggctgctgagactgatgtgcggcggcgtggagatcagaaccatctacgccgcccacaagcaggccaaggcctgcctgatcagcagactgagctgcgagagagccggcaccagattcaacgtgagaggcaccaacgacgacggccacgtggccaacttcgtggagaccgagcaggtggtgtacctggacgacagcgtgagcagcttcatccagatcagaggcagcgtgcccctgttctgggagcagcccggcctgcaggtgggcagccacagagtgagaatgagcagaggcttcgaggccaacgcccccgccttcgacagacacttcagaaccctgaagaacctgtacggcaagcagatcatcgtgaacctgctgggcagcaaggagggcgagcacatgctgagcaaggccttccagagccacctgaaggccagcgagcacgccgccgacatccagatggtgaacttcgactaccaccagatggtgaagggcggcaaggccgagaagctgcacagcgtgctgaagccccaggtgcagaagttcctggactacggcttcttctacttcaacggcagcgaggtgcagagatgccagagcggcaccgtgagaaccaactgcctggactgcctggacagaaccaacagcgtgcaggccttcctgggcctggagatgctggccaagcagctggaggccctgggcctggccgagaagccccagctggtgaccagattccaggaggtgttcagaagcatgtggagcgtgaacggcgacagcatcagcaagatctacgccggcaccggcgccctggagggcaaggccaagctgaaggacggcgccagaagcgtgaccagaaccatccagaacaacttcttcgacagcagcaagcaggaggccatcgacgtgctgctgctgggcaacaccctgaacagcgacctggccgacaaggccagagccctgctgaccaccggcagcctgagagtgagcgagcagaccctgcagagcgccagcagcaaggtgctgaagagcatgtgcgagaacttctacaagtacagcaagcccaagaagatcagagtgtgcgtgggcacctggaacgtgaacggcggcaagcagttcagaagcatcgccttcaagaaccagaccctgaccgactggctgctggacgcccccaagctggccggcatccaggagttccaggacaagagaagcaagcccaccgacatcttcgccatcggcttcgaggagatggtggagctgaacgccggcaacatcgtgagcgccagcaccaccaaccagaagctgtgggccgtggagctgcagaagaccatcagcagagacaacaagtacgtgctgctggccagcgagcagctggtgggcgtgtgcctgttcgtgttcatcagaccccagcacgcccccttcatcagagacgtggccgtggacaccgtgaagaccggcatgggcggcgccaccggcaacaagggcgccgtggccatcagaatgctgttccacaccaccagcctgtgcttcgtgtgcagccacttcgccgccggccagagccaggtgaaggagagaaacgaggacttcatcgagatcgccagaaagctgagcttccccatgggcagaatgctgttcagccacgactacgtgttctggtgcggcgacttcaactacagaatcgacctgcccaacgaggaggtgaaggagctgatcagacagcagaactgggacagcctgatcgccggcgaccagctgatcaaccagaagaacgccggccaggtgttcagaggcttcctggagggcaaggtgaccttcgcccccacctacaagtacgacctgttcagcgacgactacgacaccagcgagaagtgcagaacccccgcctggaccgacagagtgctgtggagaagaagaaagtggcccttcgacagaagcgccgaggacctggacctgctgaacgccagcttccaggacgagagcaagatcctgtacacctggacccccggcaccctgctgcactacggcagagccgagctgaagaccagcgaccacagacccgtggtggccctgatcgacatcgacatcttcgaggtggaggccgaggagagacagaacatctacaaggaggtgatcgccgtgcagggcccccccgacggcaccgtgctggtgagcatcaagagcagcctgcccgagaacaacttcttcgacgacgccctgatcgacgagctgctgcagcagttcgccagcttcggcgaggtgatcctgatcagattcgtggaggacaagatgtgggtgaccttcctggagggcagcagcgccctgaacgtgctgagcctgaacggcaaggagctgctgaacagaaccatcaccatcgccctgaagagccccgactggatcaagaacctggaggaggagatgagcctggagaagatcagcatcgccctgcccagcagcaccagcagcaccctgctgggcgaggacgccgaggtggccgccgacttcgacatggagggcgacgtggacgactacagcgccgaggtggaggagctgctgccccagcacctgcagcccagcagcagcagcggcctgggcaccagccccagcagcagccccagaaccagcccctgccagagccccaccatcagcgagggccccgtgcccagcctgcccatcagacccagcagagcccccagcagaacccccggcccccccagcgcccagagcagccccatcgacgcccagcccgccacccccctgccccagaaggaccccgcccagcccctggagcccaagagaccccccccccccagacccgtggccccccccaccagacccgcccccccccagagaccccccccccccagcggcgccagaagccccgcccccaccagaaaggagttcggcggcatcggcgccccccccagccccggcgtggccagaagagagatggaggcccccaagagccccggcaccaccagaaaggacaacatcggcagaagccagcccagcccccaggccggcctggccggccccggccccgccggctacagcaccgccagacccaccatcccccccagagccggcgtgatcagcgccccccagagccacgccagagccagcgccggcagactgacccccgagagccagagcaagaccagcgagaccagcaagggcagcaccttcctgcccgagcccctgaagccccaggccgccttccccccccagagcagcctgcccccccccgcccagagactgcaggagcccctggtgcccgtggccgcccccatgccccagagcggcccccagcccaacctggagacccccccccagcccccccccagaagcagaagcagccacagcctgcccagcgaggccagcagccagccccaggtgaagaccaacggcatcagcgacggcaagagagagagccccctgaagatcgaccccttcgaggacctgagcttcaacctgctggccgtgagcaaggcccagctgagcgtgcagaccagccccgtgcccacccccgaccccaagagactgatccagctgcccagcgccacccagagcaacgtgctgagcagcgtgagctgcatgcccaccatgccccccatccccgccagaagccagagccaggagaacatgagaagcagccccaaccccttcatcaccggcctgaccagaaccaaccccttcagcgacagaaccgccgcccccggcaaccccttcagagccaagagcgaggagagcgaggccaccagctggttcagcaaggaggagcccgtgaccatcagccccttccccagcctgcagcccctgggccacaacaagagcagagccagcagcagcctggacggcttcaaggacagcttcgacctgcagggccagagcaccctgaagatcagcaaccccaagggctgggtgaccttcgaggaggaggaggacttcggcgtgaagggcaagagcaagagcgcctgcagcgacctgctgggcaaccagcccagcagcttcagcggcagcaacctgaccctgaacgacgactggaacaagggcaccaacgtgagcttctgcgtgctgcccagcagaagacccccccccccccccgtgcccctgctgccccccggcaccagcccccccgtggaccccttcaccaccctggccagcaaggccagccccaccctggacttcaccgagagatag

SEQ ID NO: 101428 - DNA, 3888 bp, synthetic construct
  misc_feature 1..3888: note = Description of Artificial Sequence: Synthetic coding sequence
  source 1..3888: mol_type = other DNA
atggccttcagcaagggcttcagaatctaccacaagctggaccccccccccttcagcctgatcgtggagaccagacacaaggaggagtgcctgatgttcgagagcggcgccgtggccgtgctgagcagcgccgagaaggaggccatcaagggcacctacagcaaggtgctggacgcctacggcctgctgggcgtgctgagactgaacctgggcgacaccatgctgcactacctggtgctggtgaccggctgcatgagcgtgggcaagatccaggagagcgaggtgttcagagtgaccagcaccgagttcatcagcctgagaatcgacagcagcgacgaggacagaatcagcgaggtgagaaaggtgctgaacagcggcaacttctacttcgcctggagcgccagcggcatcagcctggacctgagcctgaacgcccacagaagcatgcaggagcagaccaccgacaacagattcttctggaaccagagcctgcacctgcacctgaagcactacggcgtgaactgcgacgactggctgctgagactgatgtgcggcggcgtggagatcagaaccatctacgccgcccacaagcaggccaaggcctgcctgatcagcagactgagctgcgagagagccggcaccagattcaacgtgagaggcaccaacgacgacggccacgtggccaacttcgtggagaccgagcaggtggtgtacctggacgacagcgtgagcagcttcatccagatcagaggcagcgtgcccctgttctgggagcagcccggcctgcaggtgggcagccacagagtgagaatgagcagaggcttcgaggccaacgcccccgccttcgacagacacttcagaaccctgaagaacctgtacggcaagcagatcatcgtgaacctgctgggcagcaaggagggcgagcacatgctgagcaaggccttccagagccacctgaaggccagcgagcacgccgccgacatccagatggtgaacttcgactaccaccagatggtgaagggcggcaaggccgagaagctgcacagcgtgctgaagccccaggtgcagaagttcctggactacggcttcttctacttcaacggcagcgaggtgcagagatgccagagcggcaccgtgagaaccaactgcctggactgcctggacagaaccaacagcgtgcaggccttcctgggcctggagatgctggccaagcagctggaggccctgggcctggccgagaagccccagctggtgaccagattccaggaggtgttcagaagcatgtggagcgtgaacggcgacagcatcagcaagatctacgccggcaccggcgccctggagggcaaggccaagctgaaggacggcgccagaagcgtgaccagaaccatccagaacaacttcttcgacagcagcaagcaggaggccatcgacgtgctgctgctgggcaacaccctgaacagcgacctggccgacaaggccagagccctgctgaccaccggcagcctgagagtgagcgagcagaccctgcagagcgccagcagcaaggtgctgaagagcatgtgcgagaacttctacaagtacagcaagcccaagaagatcagagtgtgcgtgggcacctggaacgtgaacggcggcaagcagttcagaagcatcgccttcaagaaccagaccctgaccgactggctgctggacgcccccaagctggccggcatccaggagttccaggacaagagaagcaagcccaccgacatcttcgccatcggcttcgaggagatggtggagctgaacgccggcaacatcgtgagcgccagcaccaccaaccagaagctgtgggccgtggagctgcagaagaccatcagcagagacaacaagtacgtgctgctggccagcgagcagctggtgggcgtgtgcctgttcgtgttcatcagaccccagcacgcccccttcatcagagacgtggccgtggacaccgtgaagaccggcatgggcggcgccaccggcaacaagggcgccgtggccatcagaatgctgttccacaccaccagcctgtgcttcgtgtgcagccacttcgccgccggccagagccaggtgaaggagagaaacgaggacttcatcgagatcgccagaaagctgagcttccccatgggcagaatgctgttcagccacgactacgtgttctggtgcggcgacttcaactacagaatcgacctgcccaacgaggaggtgaaggagctgatcagacagcagaactgggacagcctgatcgccggcgaccagctgatcaaccagaagaacgccggccaggtgttcagaggcttcctggagggcaaggtgaccttcgcccccacctacaagtacgacctgttcagcgacgactacgacaccagcgagaagtgcagaacccccgcctggaccgacagagtgctgtggagaagaagaaagtggcccttcgacagaagcgccgaggacctggacctgctgaacgccagcttccaggacgagagcaagatcctgtacacctggacccccggcaccctgctgcactacggcagagccgagctgaagaccagcgaccacagacccgtggtggccctgatcgacatcgacatcttcgaggtggaggccgaggagagacagaacatctacaaggaggtgatcgccgtgcagggcccccccgacggcaccgtgctggtgagcatcaagagcagcctgcccgagaacaacttcttcgacgacgccctgatcgacgagctgctgcagcagttcgccagcttcggcgaggtgatcctgatcagattcgtggaggacaagatgtgggtgaccttcctggagggcagcagcgccctgaacgtgctgagcctgaacggcaaggagctgctgaacagaaccatcaccatcgccctgaagagccccgactggatcaagaacctggaggaggagatgagcctggagaagatcagcatcgccctgcccagcagcaccagcagcaccctgctgggcgaggacgccgaggtggccgccgacttcgacatggagggcgacgtggacgactacagcgccgaggtggaggagctgctgccccagcacctgcagcccagcagcagcagcggcctgggcaccagccccagcagcagccccagaaccagcccctgccagagccccaccatcagcgagggccccgtgcccagcctgcccatcagacccagcagagcccccagcagaacccccggcccccccagcgcccagagcagccccatcgacgcccagcccgccacccccctgccccagaaggaccccgcccagcccctggagcccaagagaccccccccccccagacccgtggccccccccaccagacccgcccccccccagagaccccccccccccagcggcgccagaagccccgcccccaccagaaaggagttcggcgcccccaagagccccggcaccaccagaaaggacaacatcggcagaagccagcccagcccccaggccggcctggccggccccggccccgccggctacagcaccgccagacccaccatcccccccagagccggcgtgatcagcgccccccagagccacgccagagccagcgccggcagactgacccccgagagccagagcaagaccagcgagaccagcaagggcagcaccttcctgcccgagcccctgaagccccaggccgccttccccccccagagcagcctgcccccccccgcccagagactgcaggagcccctggtgcccgtggccgcccccatgccccagagcggcccccagcccaacctggagacccccccccagcccccccccagaagcagaagcagccacagcctgcccagcgaggccagcagccagccccagcaggagcagcccagcggctag

SEQ ID NO: 101429 - DNA, 4581 bp, synthetic construct
  misc_feature 1..4581: note = Description of Artificial Sequence: Synthetic coding sequence
  source 1..4581: mol_type = other DNA
atggccttcagcaagggcttcagaatctaccacaagctggaccccccccccttcagcctgatcgtggagaccagacacaaggaggagtgcctgatgttcgagagcggcgccgtggccgtgctgagcagcgccgagaaggaggccatcaagggcacctacagcaaggtgctggacgcctacggcctgctgggcgtgctgagactgaacctgggcgacaccatgctgcactacctggtgctggtgaccggctgcatgagcgtgggcaagatccaggagagcgaggtgttcagagtgaccagcaccgagttcatcagcctgagaatcgacagcagcgacgaggacagaatcagcgaggtgagaaaggtgctgaacagcggcaacttctacttcgcctggagcgccagcggcatcagcctggacctgagcctgaacgcccacagaagcatgcaggagcagaccaccgacaacagattcttctggaaccagagcctgcacctgcacctgaagcactacggcgtgaactgcgacgactggctgctgagactgatgtgcggcggcgtggagatcagaaccatctacgccgcccacaagcaggccaaggcctgcctgatcagcagactgagctgcgagagagccggcaccagattcaacgtgagaggcaccaacgacgacggccacgtggccaacttcgtggagaccgagcaggtggtgtacctggacgacagcgtgagcagcttcatccagatcagaggcagcgtgcccctgttctgggagcagcccggcctgcaggtgggcagccacagagtgagaatgagcagaggcttcgaggccaacgcccccgccttcgacagacacttcagaaccctgaagaacctgtacggcaagcagatcatcgtgaacctgctgggcagcaaggagggcgagcacatgctgagcaaggccttccagagccacctgaaggccagcgagcacgccgccgacatccagatggtgaacttcgactaccaccagatggtgaagggcggcaaggccgagaagctgcacagcgtgctgaagccccaggtgcagaagttcctggactacggcttcttctacttcaacggcagcgaggtgcagagatgccagagcggcaccgtgagaaccaactgcctggactgcctggacagaaccaacagcgtgcaggccttcctgggcctggagatgctggccaagcagctggaggccctgggcctggccgagaagccccagctggtgaccagattccaggaggtgttcagaagcatgtggagcgtgaacggcgacagcatcagcaagatctacgccggcaccggcgccctggagggcaaggccaaggccggcaagctgaaggacggcgccagaagcgtgaccagaaccatccagaacaacttcttcgacagcagcaagcaggaggccatcgacgtgctgctgctgggcaacaccctgaacagcgacctggccgacaaggccagagccctgctgaccaccggcagcctgagagccagcagcaaggtgctgaagagcatgtgcgagaacttctacaagtacagcaagcccaagaagatcagagtgtgcgtgggcacctggaacgtgaacggcggcaagcagttcagaagcatcgccttcaagaaccagaccctgaccgactggctgctggacgcccccaagctggccggcatccaggagttccaggacaagagaagcaagcccaccgacatcttcgccatcggcttcgaggagatggtggagctgaacgccggcaacatcgtgagcgccagcaccaccaaccagaagctgtgggccgtggagctgcagaagaccatcagcagagacaacaagtacgtgctgctggccagcgagcagctggtgggcgtgtgcctgttcgtgttcatcagaccccagcacgcccccttcatcagagacgtggccgtggacaccgtgaagaccggcatgggcggcgccaccggcaacaagggcgccgtggccatcagaatgctgttccacaccaccagcctgtgcttcgtgtgcagccacttcgccgccggccagagccaggtgaaggagagaaacgaggacttcatcgagatcgccagaaagctgagcttccccatgggcagaatgctgttcagccacgactacgtgttctggtgcggcgacttcaactacagaatcgacctgcccaacgaggaggtgaaggagctgatcagacagcagaactgggacagcctgatcgccggcgaccagctgatcaaccagaagaacgccggccaggtgttcagaggcttcctggagggcaaggtgaccttcgcccccacctacaagtacgacctgttcagcgacgactacgacaccagcgagaagtgcagaacccccgcctggaccgacagagtgctgtggagaagaagaaagtggcccttcgacagaagcgccgaggacctggacctgctgaacgccagcttccaggacgagagcaagatcctgtacacctggacccccggcaccctgctgcactacggcagagccgagctgaagaccagcgaccacagacccgtggtggccctgatcgacatcgacatcttcgaggtggaggccgaggagagacagaacatctacaaggaggtgatcgccgtgcagggcccccccgacggcaccgtgctggtgagcatcaagagcagcctgcccgagaacaacttcttcgacgacgccctgatcgacgagctgctgcagcagttcgccagcttcggcgaggtgatcctgatcagattcgtggaggacaagatgtgggtgaccttcctggagggcagcagcgccctgaacgtgctgagcctgaacggcaaggagctgctgaacagaaccatcaccatcgccctgaagagccccgactggatcaagaacctggaggaggagatgagcctggagaagatcagcatcgccctgcccagcagcaccagcagcaccctgctgggcgaggacgccgaggtggccgccgacttcgacatggagggcgacgtggacgactacagcgccgaggtggaggagctgctgccccagcacctgcagcccagcagcagcagcggcctgggcaccagccccagcagcagccccagaaccagcccctgccagagccccaccatcagcgagggccccgtgcccagcctgcccatcagacccagcagagcccccagcagaacccccggcccccccagcgcccagagcagccccatcgacgcccagcccgccacccccctgccccagaaggaccccgcccagcccctggagcccaagagaccccccccccccagacccgtggccccccccaccagacccgcccccccccagagaccccccccccccagcggcagaagccagcccagcccccaggccggcctggccggccccggccccgccggctacagcaccgccagacccaccatcccccccagagccggcgtgatcagcgccccccagagccacgccagagccagcgccggcagactgacccccgagagccagagcaagaccagcgagaccagcaagggcagcaccttcctgcccgagcccctgaagccccaggccgccttccccccccagagcagcctgcccccccccgcccagagactgcaggagcccctggtgcccgtggccgcccccatgccccagagcggcccccagcccaacctggagacccccccccagcccccccccagaagcagaagcagccacagcctgcccagcgaggccagcagccagccccaggtgaagaccaacggcatcagcgacggcaagagagagagccccctgaagatcgaccccttcgaggacctgagcttcaacctgctggccgtgagcaaggcccagctgagcgtgcagaccagccccgtgcccacccccgaccccaagagactgatccagctgcccagcgccacccagagcaacgtgctgagcagcgtgagctgcatgcccaccatgccccccatccccgccagaagccagagccaggagaacatgagaagcagccccaaccccttcatcaccggcctgaccagaaccaaccccttcagcgacagaaccgccgcccccggcaaccccttcagagccaagagcgaggagagcgaggccaccagctggttcagcaaggaggagcccgtgaccatcagccccttccccagcctgcagcccctgggccacaacaagagcagagccagcagcagcctggacggcttcaaggacagcttcgacctgcagggccagagcaccctgaagatcagcaaccccaagggctgggtgaccttcgaggaggaggaggacttcggcgtgaagggcaagagcaagagcgcctgcagcgacctgctgggcaaccagcccagcagcttcagcggcagcaacctgaccctgaacgacgactggaacaagggcaccaacgtgagcttctgcgtgctgcccagcagaagacccccccccccccccgtgcccctgctgccccccggcaccagcccccccgtggaccccttcaccaccctggccagcaaggccagccccaccctggacttcaccgagagatag

SEQ ID NO: 101430 - DNA, 4053 bp, synthetic construct
  misc_feature 1..4053: note = Description of Artificial Sequence: Synthetic coding sequence
  source 1..4053: mol_type = other DNA
atgagaaagagatgggcctgctggagcggcagcgacgcccccggcggctgcggcggcggctgcggcagaagaagaagaagaagcagaagaaagagagccgccagcgaggagagaagaatggccttcagcaagggcttcagaatctaccacaagctggaccccccccccttcagcctgatcgtggagaccagacacaaggaggagtgcctgatgttcgagagcggcgccgtggccgtgctgagcagcgccgagaaggaggccatcaagggcacctacagcaaggtgctggacgcctacggcctgctgggcgtgctgagactgaacctgggcgacaccatgctgcactacctggtgctggtgaccggctgcatgagcgtgggcaagatccaggagagcgaggtgttcagagtgaccagcaccgagttcatcagcctgagaatcgacagcagcgacgaggacagaatcagcgaggtgagaaaggtgctgaacagcggcaacttctacttcgcctggagcgccagcggcatcagcctggacctgagcctgaacgcccacagaagcatgcaggagcagaccaccgacaacagattcttctggaaccagagcctgcacctgcacctgaagcactacggcgtgaactgcgacgactggctgctgagactgatgtgcggcggcgtggagatcagaaccatctacgccgcccacaagcaggccaaggcctgcctgatcagcagactgagctgcgagagagccggcaccagattcaacgtgagaggcaccaacgacgacggccacgtggccaacttcgtggagaccgagcaggtggtgtacctggacgacagcgtgagcagcttcatccagatcagaggcagcgtgcccctgttctgggagcagcccggcctgcaggtgggcagccacagagtgagaatgagcagaggcttcgaggccaacgcccccgccttcgacagacacttcagaaccctgaagaacctgtacggcaagcagatcatcgtgaacctgctgggcagcaaggagggcgagcacatgctgagcaaggccttccagagccacctgaaggccagcgagcacgccgccgacatccagatggtgaacttcgactaccaccagatggtgaagggcggcaaggccgagaagctgcacagcgtgctgaagccccaggtgcagaagttcctggactacggcttcttctacttcaacggcagcgaggtgcagagatgccagagcggcaccgtgagaaccaactgcctggactgcctggacagaaccaacagcgtgcaggccttcctgggcctggagatgctggccaagcagctggaggccctgggcctggccgagaagccccagctggtgaccagattccaggaggtgttcagaagcatgtggagcgtgaacggcgacagcatcagcaagatctacgccggcaccggcgccctggagggcaaggccaagctgaaggacggcgccagaagcgtgaccagaaccatccagaacaacttcttcgacagcagcaagcaggaggccatcgacgtgctgctgctgggcaacaccctgaacagcgacctggccgacaaggccagagccctgctgaccaccggcagcctgagagtgagcgagcagaccctgcagagcgccagcagcaaggtgctgaagagcatgtgcgagaacttctacaagtacagcaagcccaagaagatcagagtgtgcgtgggcacctggaacgtgaacggcggcaagcagttcagaagcatcgccttcaagaaccagaccctgaccgactggctgctggacgcccccaagctggccggcatccaggagttccaggacaagagaagcaagcccaccgacatcttcgccatcggcttcgaggagatggtggagctgaacgccggcaacatcgtgagcgccagcaccaccaaccagaagctgtgggccgtggagctgcagaagaccatcagcagagacaacaagtacgtgctgctggccagcgagcagctggtgggcgtgtgcctgttcgtgttcatcagaccccagcacgcccccttcatcagagacgtggccgtggacaccgtgaagaccggcatgggcggcgccaccggcaacaagggcgccgtggccatcagaatgctgttccacaccaccagcctgtgcttcgtgtgcagccacttcgccgccggccagagccaggtgaaggagagaaacgaggacttcatcgagatcgccagaaagctgagcttccccatgggcagaatgctgttcagccacgactacgtgttctggtgcggcgacttcaactacagaatcgacctgcccaacgaggaggtgaaggagctgatcagacagcagaactgggacagcctgatcgccggcgaccagctgatcaaccagaagaacgccggccaggtgttcagaggcttcctggagggcaaggtgaccttcgcccccacctacaagtacgacctgttcagcgacgactacgacaccagcgagaagtgcagaacccccgcctggaccgacagagtgctgtggagaagaagaaagtggcccttcgacagaagcgccgaggacctggacctgctgaacgccagcttccaggacgagagcaagatcctgtacacctggacccccggcaccctgctgcactacggcagagccgagctgaagaccagcgaccacagacccgtggtggccctgatcgacatcgacatcttcgaggtggaggccgaggagagacagaacatctacaaggaggtgatcgccgtgcagggcccccccgacggcaccgtgctggtgagcatcaagagcagcctgcccgagaacaacttcttcgacgacgccctgatcgacgagctgctgcagcagttcgccagcttcggcgaggtgatcctgatcagattcgtggaggacaagatgtgggtgaccttcctggagggcagcagcgccctgaacgtgctgagcctgaacggcaaggagctgctgaacagaaccatcaccatcgccctgaagagccccgactggatcaagaacctggaggaggagatgagcctggagaagatcagcatcgccctgcccagcagcaccagcagcaccctgctgggcgaggacgccgaggtggccgccgacttcgacatggagggcgacgtggacgactacagcgccgaggtggaggagctgctgccccagcacctgcagcccagcagcagcagcggcctgggcaccagccccagcagcagccccagaaccagcccctgccagagccccaccatcagcgagggccccgtgcccagcctgcccatcagacccagcagagcccccagcagaacccccggcccccccagcgcccagagcagccccatcgacgcccagcccgccacccccctgccccagaaggaccccgcccagcccctggagcccaagagaccccccccccccagacccgtggccccccccaccagacccgcccccccccagagaccccccccccccagcggcgccagaagccccgcccccaccagaaaggagttcggcggcatcggcgccccccccagccccggcgtggccagaagagagatggaggcccccaagagccccggcaccaccagaaaggacaacatcggcagaagccagcccagcccccaggccggcctggccggccccggccccgccggctacagcaccgccagacccaccatcccccccagagccggcgtgatcagcgccccccagagccacgccagagccagcgccggcagactgacccccgagagccagagcaagaccagcgagaccagcaagggcagcaccttcctgcccgagcccctgaagccccaggccgccttccccccccagagcagcctgcccccccccgcccagagactgcaggagcccctggtgcccgtggccgcccccatgccccagagcggcccccagcccaacctggagacccccccccagcccccccccagaagcagaagcagccacagcctgcccagcgaggccagcagccagccccagcaggagcagcccagcggctag

SEQ ID NO: 101431 - DNA, 4839 bp, synthetic construct
  misc_feature 1..4839: note = Description of Artificial Sequence: Synthetic coding sequence
  source 1..4839: mol_type = other DNA
atgagaaagagatgggcctgctggagcggcagcgacgcccccggcggctgcggcggcggctgcggcagaagaagaagaagaagcagaagaaagagagccgccagcgaggagagaagaatggccttcagcaagggcttcagaatctaccacaagctggaccccccccccttcagcctgatcgtggagaccagacacaaggaggagtgcctgatgttcgagagcggcgccgtggccgtgctgagcagcgccgagaaggaggccatcaagggcacctacagcaaggtgctggacgcctacggcctgctgggcgtgctgagactgaacctgggcgacaccatgctgcactacctggtgctggtgaccggctgcatgagcgtgggcaagatccaggagagcgaggtgttcagagtgaccagcaccgagttcatcagcctgagaatcgacagcagcgacgaggacagaatcagcgaggtgagaaaggtgctgaacagcggcaacttctacttcgcctggagcgccagcggcatcagcctggacctgagcctgaacgcccacagaagcatgcaggagcagaccaccgacaacagattcttctggaaccagagcctgcacctgcacctgaagcactacggcgtgaactgcgacgactggctgctgagactgatgtgcggcggcgtggagatcagaaccatctacgccgcccacaagcaggccaaggcctgcctgatcagcagactgagctgcgagagagccggcaccagattcaacgtgagaggcaccaacgacgacggccacgtggccaacttcgtggagaccgagcaggtggtgtacctggacgacagcgtgagcagcttcatccagatcagaggcagcgtgcccctgttctgggagcagcccggcctgcaggtgggcagccacagagtgagaatgagcagaggcttcgaggccaacgcccccgccttcgacagacacttcagaaccctgaagaacctgtacggcaagcagatcatcgtgaacctgctgggcagcaaggagggcgagcacatgctgagcaaggccttccagagccacctgaaggccagcgagcacgccgccgacatccagatggtgaacttcgactaccaccagatggtgaagggcggcaaggccgagaagctgcacagcgtgctgaagccccaggtgcagaagttcctggactacggcttcttctacttcaacggcagcgaggtgcagagatgccagagcggcaccgtgagaaccaactgcctggactgcctggacagaaccaacagcgtgcaggccttcctgggcctggagatgctggccaagcagctggaggccctgggcctggccgagaagccccagctggtgaccagattccaggaggtgttcagaagcatgtggagcgtgaacggcgacagcatcagcaagatctacgccggcaccggcgccctggagggcaaggccaagctgaaggacggcgccagaagcgtgaccagaaccatccagaacaacttcttcgacagcagcaagcaggaggccatcgacgtgctgctgctgggcaacaccctgaacagcgacctggccgacaaggccagagccctgctgaccaccggcagcctgagagtgagcgagcagaccctgcagagcgccagcagcaaggtgctgaagagcatgtgcgagaacttctacaagtacagcaagcccaagaagatcagagtgtgcgtgggcacctggaacgtgaacggcggcaagcagttcagaagcatcgccttcaagaaccagaccctgaccgactggctgctggacgcccccaagctggccggcatccaggagttccaggacaagagaagcaagcccaccgacatcttcgccatcggcttcgaggagatggtggagctgaacgccggcaacatcgtgagcgccagcaccaccaaccagaagctgtgggccgtggagctgcagaagaccatcagcagagacaacaagtacgtgctgctggccagcgagcagctggtgggcgtgtgcctgttcgtgttcatcagaccccagcacgcccccttcatcagagacgtggccgtggacaccgtgaagaccggcatgggcggcgccaccggcaacaagggcgccgtggccatcagaatgctgttccacaccaccagcctgtgcttcgtgtgcagccacttcgccgccggccagagccaggtgaaggagagaaacgaggacttcatcgagatcgccagaaagctgagcttccccatgggcagaatgctgttcagccacgactacgtgttctggtgcggcgacttcaactacagaatcgacctgcccaacgaggaggtgaaggagctgatcagacagcagaactgggacagcctgatcgccggcgaccagctgatcaaccagaagaacgccggccaggtgttcagaggcttcctggagggcaaggtgaccttcgcccccacctacaagtacgacctgttcagcgacgactacgacaccagcgagaagtgcagaacccccgcctggaccgacagagtgctgtggagaagaagaaagtggcccttcgacagaagcgccgaggacctggacctgctgaacgccagcttccaggacgagagcaagatcctgtacacctggacccccggcaccctgctgcactacggcagagccgagctgaagaccagcgaccacagacccgtggtggccctgatcgacatcgacatcttcgaggtggaggccgaggagagacagaacatctacaaggaggtgatcgccgtgcagggcccccccgacggcaccgtgctggtgagcatcaagagcagcctgcccgagaacaacttcttcgacgacgccctgatcgacgagctgctgcagcagttcgccagcttcggcgaggtgatcctgatcagattcgtggaggacaagatgtgggtgaccttcctggagggcagcagcgccctgaacgtgctgagcctgaacggcaaggagctgctgaacagaaccatcaccatcgccctgaagagccccgactggatcaagaacctggaggaggagatgagcctggagaagatcagcatcgccctgcccagcagcaccagcagcaccctgctgggcgaggacgccgaggtggccgccgacttcgacatggagggcgacgtggacgactacagcgccgaggtggaggagctgctgccccagcacctgcagcccagcagcagcagcggcctgggcaccagccccagcagcagccccagaaccagcccctgccagagccccaccatcagcgagggccccgtgcccagcctgcccatcagacccagcagagcccccagcagaacccccggcccccccagcgcccagagcagccccatcgacgcccagcccgccacccccctgccccagaaggaccccgcccagcccctggagcccaagagaccccccccccccagacccgtggccccccccaccagacccgcccccccccagagaccccccccccccagcggcgccagaagccccgcccccaccagaaaggagttcggcggcatcggcgccccccccagccccggcgtggccagaagagagatggaggcccccaagagccccggcaccaccagaaaggacaacatcggcagaagccagcccagcccccaggccggcctggccggccccggccccgccggctacagcaccgccagacccaccatcccccccagagccggcgtgatcagcgccccccagagccacgccagagccagcgccggcagactgacccccgagagccagagcaagaccagcgagaccagcaagggcagcaccttcctgcccgagcccctgaagccccaggccgccttccccccccagagcagcctgcccccccccgcccagagactgcaggagcccctggtgcccgtggccgcccccatgccccagagcggcccccagcccaacctggagacccccccccagcccccccccagaagcagaagcagccacagcctgcccagcgaggccagcagccagccccaggtgaagaccaacggcatcagcgacggcaagagagagagccccctgaagatcgaccccttcgaggacctgagcttcaacctgctggccgtgagcaaggcccagctgagcgtgcagaccagccccgtgcccacccccgaccccaagagactgatccagctgcccagcgccacccagagcaacgtgctgagcagcgtgagctgcatgcccaccatgccccccatccccgccagaagccagagccaggagaacatgagaagcagccccaaccccttcatcaccggcctgaccagaaccaaccccttcagcgacagaaccgccgcccccggcaaccccttcagagccaagagcgaggagagcgaggccaccagctggttcagcaaggaggagcccgtgaccatcagccccttccccagcctgcagcccctgggccacaacaagagcagagccagcagcagcctggacggcttcaaggacagcttcgacctgcagggccagagcaccctgaagatcagcaaccccaagggctgggtgaccttcgaggaggaggaggacttcggcgtgaagggcaagagcaagagcgcctgcagcgacctgctgggcaaccagcccagcagcttcagcggcagcaacctgaccctgaacgacgactggaacaagggcaccaacgtgagcttctgcgtgctgcccagcagaagacccccccccccccccgtgcccctgctgccccccggcaccagcccccccgtggaccccttcaccaccctggccagcaaggccagccccaccctggacttcaccgagagatag

SEQ ID NO: 101432 - DNA, 4491 bp, synthetic construct
  misc_feature 1..4491: note = Description of Artificial Sequence: Synthetic coding sequence
  source 1..4491: mol_type = other DNA
atggccctgagcaagggcctgagactgctgggcagactgggcgccgagggcgactgcagcgtgctgctggaggccagaggcagagacgactgcctgctgttcgaggccggcaccgtggccaccctggcccccgaggagaaggaggtgatcaagggccagtacggcaagctgaccgacgcctacggctgcctgggcgagctgagactgaagagcggcggcaccagcctgagcttcctggtgctggtgaccggctgcaccagcgtgggcagaatccccgacgccgagatctacaagatcaccgccaccgacttctaccccctgcaggaggaggccaaggaggaggagagactgatcgccctgaagaagatcctgagcagcggcgtgttctacttcagctggcccaacgacggcagcagattcgacctgaccgtgagaacccagaagcagggcgacgacagcagcgagtggggcaacagcttcttctggaaccagctgctgcacgtgcccctgagacagcaccaggtgagctgctgcgactggctgctgaagatcatctgcggcgtggtgaccatcagaaccgtgtacgccagccacaagcaggccaaggcctgcctggtgagcagagtgagctgcgagagaaccggcaccagattccacaccagaggcgtgaacgacgacggccacgtgagcaacttcgtggagaccgagcagatgatctacatggacgacggcgtgagcagcttcgtgcagatcagaggcagcgtgcccctgttctgggagcagcccggcctgcaggtgggcagccaccacctgagactgcacagaggcctggaggccaacgcccccgccttcgacagacacatggtgctgctgaaggagcagtacggccagcaggtggtggtgaacctgctgggcagcagaggcggcgaggaggtgctgaacagagccttcaagaagctgctgtgggccagctgccacgccggcgacacccccatgatcaacttcgacttccaccagttcgccaagggcggcaagctggagaagctggagaccctgctgagaccccagctgaagctgcactgggaggacttcgacgtgttcaccaagggcgagaacgtgagccccagattccagaagggcaccctgagaatgaactgcctggactgcctggacagaaccaacaccgtgcagagcttcatcgccctggaggtgctgcacctgcagctgaagaccctgggcctgagcagcaagcccatcgtggacagattcgtggagagcttcaaggccatgtggagcctgaacggccacagcctgagcaaggtgttcaccggcagcagagccctggagggcaaggccaaggtgggcaagctgaaggacggcgccagaagcatgagcagaaccatccagagcaacttcttcgacggcgtgaagcaggaggccatcaagctgctgctggtgggcgacgtgtacggcgaggaggtggccgacaagggcggcatgctgctggacagcaccgccctgctggtgacccccagaatcctgaaggccatgaccgagagacagagcgagttcaccaacttcaagagaatcagaatcgccatgggcacctggaacgtgaacggcggcaagcagttcagaagcaacgtgctgagaaccgccgagctgaccgactggctgctggacagcccccagctgagcggcgccaccgacagccaggacgacagcagccccgccgacatcttcgccgtgggcttcgaggagatggtggagctgagcgccggcaacatcgtgaacgccagcaccaccaacaagaagatgtggggcgagcagctgcagaaggccatcagcagaagccacagatacatcctgctgaccagcgcccagctggtgggcgtgtgcctgtacatcttcgtgagaccctaccacgtgcccttcatcagagacgtggccatcgacaccgtgaagaccggcatgggcggcaaggccggcaacaagggcgccgtgggcatcagattccagttccacagcaccagcttctgcttcatctgcagccacctgaccgccggccagagccaggtgaaggagagaaacgaggactacaaggagatcacccagaagctgtgcttccccatgggcagaaacgtgttcagccacgactacgtgttctggtgcggcgacttcaactacagaatcgacctgacctacgaggaggtgttctacttcgtgaagagacaggactggaagaagctgctggagttcgaccagctgcagctgcagaagagcagcggcaagatcttcaaggacttccacgagggcgccatcaacttcggccccacctacaagtacgacgtgggcagcgccgcctacgacaccagcgacaagtgcagaacccccgcctggaccgacagagtgctgtggtggagaaagaagcaccccttcgacaagaccgccggcgagctgaacctgctggacagcgacctggacgtggacaccaaggtgagacacacctggagccccggcgccctgcagtactacggcagagccgagctgcaggccagcgaccacagacccgtgctggccatcgtggaggtggaggtgcaggaggtggacgtgggcgccagagagagagtgttccaggaggtgagcagcttccagggccccctggacgccaccgtggtggtgaacctgcagagccccaccctggaggagaagaacgagttccccgaggacctgagaaccgagctgatgcagaccctgggcagctacggcaccatcgtgctggtgagaatcaaccagggccagatgctggtgaccttcgccgacagccacagcgccctgagcgtgctggacgtggacggcatgaaggtgaagggcagagccgtgaagatcagacccaagaccaaggactggctgaagggcctgagagaggagatcatcagaaagagagacagcatggcccccgtgagccccaccgccaacagctgcctgctggaggagaacttcgacttcaccagcctggactacgagagcgagggcgacatcctggaggacgacgaggactacctggtggacgagttcaaccagcccggcgtgagcgacagcgagctgggcggcgacgacctgagcgacgtgcccggccccaccgccctggccccccccagcaagagccccgccctgaccaagaagaagcagcaccccacctacaaggacgacgccgacctggtggagctgaagagagagctggaggccgtgggcgagttcagacacagaagccccagcagaagcctgagcgtgcccaacagacccagacccccccagcccccccagagaccccccccccccaccggcctgatggtgaagaagagcgccagcgacgccagcatcagcagcggcacccacggccagtacagcatcctgcagaccgccagactgctgcccggcgccccccagcagccccccaaggccagaaccggcatcagcaagccctacaacgtgaagcagatcaagaccaccaacgcccaggaggccgaggccgccatcagatgcctgctggaggccagaggcggcgccagcgaggaggccctgagcgccgtggcccccagagacctggaggccagcagcgagcccgagcccacccccggcgccgccaagcccgagaccccccaggccccccccctgctgcccagaagacccccccccagagtgcccgccatcaagaagcccaccctgagaagaaccggcaagcccctgagccccgaggagcagttcgagcagcagaccgtgcacttcaccatcggcccccccgagaccagcgtggaggccccccccgtggtgaccgcccccagagtgccccccgtgcccaagcccagaaccttccagcccggcaaggccgccgagagacccagccacagaaagcccgccagcgacgaggccccccccggcgccggcgccagcgtgcccccccccctggaggccccccccctggtgcccaaggtgccccccagaagaaagaagagcgcccccgccgccttccacctgcaggtgctgcagagcaacagccagctgctgcagggcctgacctacaacagcagcgacagccccagcggccacccccccgccgccggcaccgtgttcccccagggcgacttcctgagcaccagcagcgccaccagccccgacagcgacggcaccaaggccatgaagcccgaggccgcccccctgctgggcgactaccaggaccccttctggaacctgctgcaccaccccaagctgctgaacaacacctggctgagcaagagcagcgaccccctggacagcggcaccagaagccccaagagagaccccatcgaccccgtgagcgccggcgccagcgccgccaaggccgagctgccccccgaccacgagcacaagaccctgggccactgggtgaccatcagcgaccaggagaagagaaccgccctgcaggtgttcgaccccctggccaagacctag

SEQ ID NO: 101433 - DNA, 1746 bp, synthetic construct
  misc_feature 1..1746: note = Description of Artificial Sequence: Synthetic coding sequence
  source 1..1746: mol_type = other DNA
atgcagaccctgggcagctacggcaccatcgtgctggtgagaatcaaccagggccagatgctggtgaccttcgccgacagccacagcgccctgagcgtgctggacgtggacggcatgaaggtgaagggcagagccgtgaagatcagacccaagaccaaggactggctgaagggcctgagagaggagatcatcagaaagagagacagcatggcccccgtgagccccaccgccaacagctgcctgctggaggagaacttcgacttcaccagcctggactacgagagcgagggcgacatcctggaggacgacgaggactacctggtggacgagttcaaccagcccggcgtgagcgacagcgagctgggcggcgacgacctgagcgacgtgcccggccccaccgccctggccccccccagcaagagccccgccctgaccaagaagaagcagcaccccacctacaaggacgacgccgacctggtggagctgaagagagagctggaggccgtgggcgagttcagacacagaagccccagcagaagcctgagcgtgcccaacagacccagacccccccagcccccccagagaccccccccccccaccggcctgatggtgaagaagagcgccagcgacgccagcatcagcagcggcacccacggccagtacagcatcctgcagaccgccagactgctgcccggcgccccccagcagccccccaaggccagaaccggcatcagcaagccctacaacgtgaagcagatcaagaccaccaacgcccaggaggccgaggccgccatcagatgcctgctggaggccagaggcggcgccagcgaggaggccctgagcgccgtggcccccagagacctggaggccagcagcgagcccgagcccacccccggcgccgccaagcccgagaccccccaggccccccccctgctgcccagaagacccccccccagagtgcccgccatcaagaagcccaccctgagaagaaccggcaagcccctgagccccgaggagcagttcgagcagcagaccgtgcacttcaccatcggcccccccgagaccagcgtggaggccccccccgtggtgaccgcccccagagtgccccccgtgcccaagcccagaaccttccagcccggcaaggccgccgagagacccagccacagaaagcccgccagcgacgaggccccccccggcgccggcgccagcgtgcccccccccctggaggccccccccctggtgcccaaggtgccccccagaagaaagaagagcgcccccgccgccttccacctgcaggtgctgcagagcaacagccagctgctgcagggcctgacctacaacagcagcgacagccccagcggccacccccccgccgccggcaccgtgttcccccagggcgacttcctgagcaccagcagcgccaccagccccgacagcgacggcaccaaggccatgaagcccgaggccgcccccctgctgggcgactaccaggaccccttctggaacctgctgcaccaccccaagctgctgaacaacacctggctgagcaagagcagcgaccccctggacagcggcaccagaagccccaagagagaccccatcgaccccgtgagcgccggcgccagcgccgccaaggccgagctgccccccgaccacgagcacaagaccctgggccactgggtgaccatcagcgaccaggagaagagaaccgccctgcaggtgttcgaccccctggccaagacctag

SEQ ID NO: 101434 - DNA, 411 bp, synthetic construct
  misc_feature 1..411: note = Description of Artificial Sequence: Synthetic coding sequence
  source 1..411: mol_type = other DNA
tgaggcagagacgactgcctgctgttcgaggccggcaccgtggccaccctggcccccgaggagaaggaggtgatcaagggccagtacggcaagctgaccgacgcctacggctgcctgggcgagctgagactgaagagcggcggcaccagcctgagcttcctggtgctggtgaccggctgcaccagcgtgggcagaatccccgacgccgagatctacaagatcaccgccaccgacttctaccccctgcaggaggaggccaaggaggaggagagactgatcgccctgaagaagatcctgagcagcggcgtgttctacttcagctggcccaacgacggcagcagattcgacctgaccgtgagaacccagaagcagggcgacgacagcagcgagtggggcaacagcttcttctag

SEQ ID NO: 101435 - DNA, 3867 bp, synthetic construct
  misc_feature 1..3867: note = Description of Artificial Sequence: Synthetic coding sequence
  source 1..3867: mol_type = other DNA
atggccctgagcaagggcctgagactgctgggcagactgggcgccgagggcgactgcagcgtgctgctggaggccagaggcagagacgactgcctgctgttcgaggccggcaccgtggccaccctggcccccgaggagaaggaggtgatcaagggccagtacggcaagctgaccgacgcctacggctgcctgggcgagctgagactgaagagcggcggcaccagcctgagcttcctggtgctggtgaccggctgcaccagcgtgggcagaatccccgacgccgagatctacaagatcaccgccaccgacttctaccccctgcaggaggaggccaaggaggaggagagactgatcgccctgaagaagatcctgagcagcggcgtgttctacttcagctggcccaacgacggcagcagattcgacctgaccgtgagaacccagaagcagggcgacgacagcagcgagtggggcaacagcttcttctggaaccagctgctgcacgtgcccctgagacagcaccaggtgagctgctgcgactggctgctgaagatcatctgcggcgtggtgaccatcagaaccgtgtacgccagccacaagcaggccaaggcctgcctggtgagcagagtgagctgcgagagaaccggcaccagattccacaccagaggcgtgaacgacgacggccacgtgagcaacttcgtggagaccgagcagatgatctacatggacgacggcgtgagcagcttcgtgcagatcagaggcagcgtgcccctgttctgggagcagcccggcctgcaggtgggcagccaccacctgagactgcacagaggcctggaggccaacgcccccgccttcgacagacacatggtgctgctgaaggagcagtacggccagcaggtggtggtgaacctgctgggcagcagaggcggcgaggaggtgctgaacagagccttcaagaagctgctgtgggccagctgccacgccggcgacacccccatgatcaacttcgacttccaccagttcgccaagggcggcaagctggagaagctggagaccctgctgagaccccagctgaagctgcactgggaggacttcgacgtgttcaccaagggcgagaacgtgagccccagattccagaagggcaccctgagaatgaactgcctggactgcctggacagaaccaacaccgtgcagagcttcatcgccctggaggtgctgcacctgcagctgaagaccctgggcctgagcagcaagcccatcgtggacagattcgtggagagcttcaaggccatgtggagcctgaacggccacagcctgagcaaggtgttcaccggcagcagagccctggagggcaaggccaaggtgggcaagctgaaggacggcgccagaagcatgagcagaaccatccagagcaacttcttcgacggcgtgaagcaggaggccatcaagctgctgctggtgggcgacgtgtacggcgaggaggtggccgacaagggcggcatgctgctggacagcaccgccctgctggtgacccccagaatcctgaaggccatgaccgagagacagagcgagttcaccaacttcaagagaatcagaatcgccatgggcacctggaacgtgaacggcggcaagcagttcagaagcaacgtgctgagaaccgccgagctgaccgactggctgctggacagcccccagctgagcggcgccaccgacagccaggacgacagcagccccgccgacatcttcgccgtgggcttcgaggagatggtggagctgagcgccggcaacatcgtgaacgccagcaccaccaacaagaagatgtggggcgagcagctgcagaaggccatcagcagaagccacagatacatcctgctgaccagcgcccagctggtgggcgtgtgcctgtacatcttcgtgagaccctaccacgtgcccttcatcagagacgtggccatcgacaccgtgaagaccggcatgggcggcaaggccggcaacaagggcgccgtgggcatcagattccagttccacagcaccagcttctgcttcatctgcagccacctgaccgccggccagagccaggtgaaggagagaaacgaggactacaaggagatcacccagaagctgtgcttccccatgggcagaaacgtgttcagccacgactacgtgttctggtgcggcgacttcaactacagaatcgacctgacctacgaggaggtgttctacttcgtgaagagacaggactggaagaagctgctggagttcgaccagctgcagctgcagaagagcagcggcaagatcttcaaggacttccacgagggcgccatcaacttcggccccacctacaagtacgacgtgggcagcgccgcctacgacaccagcgacaagtgcagaacccccgcctggaccgacagagtgctgtggtggagaaagaagcaccccttcgacaagaccgccggcgagctgaacctgctggacagcgacctggacgtggacaccaaggtgagacacacctggagccccggcgccctgcagtactacggcagagccgagctgcaggccagcgaccacagacccgtgctggccatcgtggaggtggaggtgcaggaggtggacgtgggcgccagagagagagtgttccaggaggtgagcagcttccagggccccctggacgccaccgtggtggtgaacctgcagagccccaccctggaggagaagaacgagttccccgaggacctgagaaccgagctgatgcagaccctgggcagctacggcaccatcgtgctggtgagaatcaaccagggccagatgctggtgaccttcgccgacagccacagcgccctgagcgtgctggacgtggacggcatgaaggtgaagggcagagccgtgaagatcagacccaagaccaaggactggctgaagggcctgagagaggagatcatcagaaagagagacagcatggcccccgtgagccccaccgccaacagctgcctgctggaggagaacttcgacttcaccagcctggactacgagagcgagggcgacatcctggaggacgacgaggactacctggtggacgagttcaaccagcccggcgtgagcgacagcgagctgggcggcgacgacctgagcgacgtgcccggccccaccgccctggccccccccagcaagagccccgccctgaccaagaagaagcagcaccccacctacaaggacgacgccgacctggtggagctgaagagagagctggaggccgtgggcgagttcagacacagaagccccagcagaagcctgagcgtgcccaacagacccagacccccccagcccccccagagaccccccccccccaccggcctgatggtgaagaagagcgccagcgacgccagcatcagcagcggcacccacggccagtacagcatcctgcagaccgccagactgctgcccggcgccccccagcagccccccaaggccagaaccggcatcagcaagccctacaacgtgaagcagatcaagaccaccaacgcccaggaggccgaggccgccatcagatgcctgctggaggccagaggcggcgccagcgaggaggccctgagcgccgtggcccccagagacctggaggccagcagcgagcccgagcccacccccggcgccgccaagcccgagaccccccaggccccccccctgctgcccagaagacccccccccagagtgcccgccatcaagaagcccaccctgagaagaaccggcaagatcgtgttctgcagcagaagccaggccagccagccctgcctgctgctgcagagacacgagttcgtgagaaccgtggccgcccagagactggccagcgtggacaccagcggcagcagcgtgtag

SEQ ID NO: 101436 - DNA, 4356 bp, synthetic construct
  misc_feature 1..4356: note = Description of Artificial Sequence: Synthetic coding sequence
  source 1..4356: mol_type = other DNA
atggccctgagcaagggcctgagactgctgggcagactgggcgccgagggcgactgcagcgtgctgctggaggccagaggcagagacgactgcctgctgttcgaggccggcaccgtggccaccctggcccccgaggagaaggaggtgatcaagggccagtacggcaagctgaccgacgcctacggctgcctgggcgagctgagactgaagagcggcggcaccagcctgagcttcctggtgctggtgaccggctgcaccagcgtgggcagaatccccgacgccgagatctacaagatcaccgccaccgacttctaccccctgcaggaggaggccaaggaggaggagagactgatcgccctgaagaagatcctgagcagcggcgtgttctacttcagctggcccaacgacggcagcagattcgacctgaccgtgagaacccagaagcagggcgacgacagcagcgagtggggcaacagcttcttctggaaccagctgctgcacgtgcccctgagacagcaccaggtgagctgctgcgactggctgctgaagatcatctgcggcgtggtgaccatcagaaccgtgtacgccagccacaagcaggccaaggcctgcctggtgagcagagtgagctgcgagagaaccggcaccagattccacaccagaggcgtgaacgacgacggccacgtgagcaacttcgtggagaccgagcagatgatctacatggacgacggcgtgagcagcttcgtgcagatcagaggcagcgtgcccctgttctgggagcagcccggcctgcaggtgggcagccaccacctgagactgcacagaggcctggaggccaacgcccccgccttcgacagacacatggtgctgctgaaggagcagtacggccagcaggtggtggtgaacctgctgggcagcagaggcggcgaggaggtgctgaacagagccttcaagaagctgctgtgggccagctgccacgccggcgacacccccatgatcaacttcgacttccaccagttcgccaagggcggcaagctggagaagctggagaccctgctgagaccccagctgaagctgcactgggaggacttcgacgtgttcaccaagggcgagaacgtgagccccagattccagaagggcaccctgagaatgaactgcctggactgcctggacagaaccaacaccgtgcagagcttcatcgccctggaggtgctgcacctgcagctgaagaccctgggcctgagcagcaagcccatcgtggacagattcgtggagagcttcaaggccatgtggagcctgaacggccacagcctgagcaaggtgttcaccggcagcagagccctggagggcaaggccaaggtgggcaagctgaaggacggcgccagaagcatgagcagaaccatccagagcaacttcttcgacggcgtgaagcaggaggccatcaagctgctgctggtgggcgacgtgtacggcgaggaggtggccgacaagggcggcatgctgctggacagcaccgccctgctggtgacccccagaatcctgaaggccatgaccgagagacagagcgagttcaccaacttcaagagaatcagaatcgccatgggcacctggaacgtgaacggcggcaagcagttcagaagcaacgtgctgagaaccgccgagctgaccgactggctgctggacagcccccagctgagcggcgccaccgacagccaggacgacagcagccccgccgacatcttcgccgtgggcttcgaggagatggtggagctgagcgccggcaacatcgtgaacgccagcaccaccaacaagaagatgtggggcgagcagctgcagaaggccatcagcagaagccacagatacatcctgctgaccagcgcccagctggtgggcgtgtgcctgtacatcttcgtgagaccctaccacgtgcccttcatcagagacgtggccatcgacaccgtgaagaccggcatgggcggcaaggccggcaacaagggcgccgtgggcatcagattccagttccacagcaccagcttctgcttcatctgcagccacctgaccgccggccagagccaggtgaaggagagaaacgaggactacaaggagatcacccagaagctgtgcttccccatgggcagaaacgtgttcagccacgactacgtgttctggtgcggcgacttcaactacagaatcgacctgacctacgaggaggtgttctacttcgtgaagagacaggactggaagaagctgctggagttcgaccagctgcagctgcagaagagcagcggcaagatcttcaaggacttccacgagggcgccatcaacttcggccccacctacaagtacgacgtgggcagcgccgcctacgacaccagcgacaagtgcagaacccccgcctggaccgacagagtgctgtggtggagaaagaagcaccccttcgacaagaccgccggcgagctgaacctgctggacagcgacctggacgtggacaccaaggtgagacacacctggagccccggcgccctgcagtactacggcagagccgagctgcaggccagcgaccacagacccgtgctggccatcgtggaggtggaggtgcaggaggtggacgtgggcgccagagagagagtgttccaggaggtgagcagcttccagggccccctggacgccaccgtggtggtgaacctgcagagccccaccctggaggagaagaacgagttccccgaggacctgagaaccgagctgatgcagaccctgggcagctacggcaccatcgtgctggtgagaatcaaccagggccagatgctggtgaccttcgccgacagccacagcgccctgagcgtgctggacgtggacggcatgaaggtgaagggcagagccgtgaagatcagacccaagaccaaggactggctgaagggcctgagagaggagatcatcagaaagagagacagcatggcccccgtgagccccaccgccaacagctgcctgctggaggagaacttcgacttcaccagcctggactacgagagcgagggcgacatcctggaggacgacgaggactacctggtggacgagttcaaccagcccggcgtgagcgacagcgagctgggcggcgacgacctgagcgacgtgcccggccccaccgccctggccccccccagcaagagccccgccctgaccaagaagaagcagcaccccacctacaaggccggcctgatggtgaagaagagcgccagcgacgccagcatcagcagcggcacccacggccagtacagcatcctgcagaccgccagactgctgcccggcgccccccagcagccccccaaggccagaaccggcatcagcaagccctacaacgtgaagcagatcaagaccaccaacgcccaggaggccgaggccgccatcagatgcctgctggaggccagaggcggcgccagcgaggaggccctgagcgccgtggcccccagagacctggaggccagcagcgagcccgagcccacccccggcgccgccaagcccgagaccccccaggccccccccctgctgcccagaagacccccccccagagtgcccgccatcaagaagcccaccctgagaagaaccggcaagcccctgagccccgaggagcagttcgagcagcagaccgtgcacttcaccatcggcccccccgagaccagcgtggaggccccccccgtggtgaccgcccccagagtgccccccgtgcccaagcccagaaccttccagcccggcaaggccgccgagagacccagccacagaaagcccgccagcgacgaggccccccccggcgccggcgccagcgtgcccccccccctggaggccccccccctggtgcccaaggtgccccccagaagaaagaagagcgcccccgccgccttccacctgcaggtgctgcagagcaacagccagctgctgcagggcctgacctacaacagcagcgacagccccagcggccacccccccgccgccggcaccgtgttcccccagggcgacttcctgagcaccagcagcgccaccagccccgacagcgacggcaccaaggccatgaagcccgaggccgcccccctgctgggcgactaccaggaccccttctggaacctgctgcaccaccccaagctgctgaacaacacctggctgagcaagagcagcgaccccctggacagcggcaccagaagccccaagagagaccccatcgaccccgtgagcgccggcgccagcgccgccaaggccgagctgccccccgaccacgagcacaagaccctgggccactgggtgaccatcagcgaccaggagaagagaaccgccctgcaggtgttcgaccccctggccaagacctag

SEQ ID NO: 101437 - DNA, 279 bp, synthetic construct
  misc_feature 1..279: note = Description of Artificial Sequence: Synthetic coding sequence
  source 1..279: mol_type = other DNA
atgttcctgtacgccagcggccccgccccccccgccggcacctgcagatggggcggccagggcggcaccagcctgagcttcctggtgctggtgaccggctgcaccagcgtgggcagaatccccgacgccgagatctacaagatcaccgccaccgacttctaccccctgcaggaggaggccaaggaggaggagagactgatcgccctgaagaagatcctgagcagcggcgtgttctacttcagctggcccaacgacggcagcagattcgacctgacctag

SEQ ID NO: 101438 - DNA, 1551 bp, synthetic construct
  misc_feature 1..1551: note = Description of Artificial Sequence: Synthetic coding sequence
  source 1..1551: mol_type = other DNA
atgttcctgtacgccagcggccccgccccccccgccggcacctgcagatggggcggccagggcggcaccagcctgagcttcctggtgctggtgaccggctgcaccagcgtgggcagaatccccgacgccgagatctacaagatcaccgccaccgacttctaccccctgcaggaggaggccaaggaggaggagagactgatcgccctgaagaagatcctgagcagcggcgtgttctacttcagctggcccaacgacggcagcagattcgacctgaccgtgagaacccagaagcagggcgacgacagcagcgagtggggcaacagcttcttctggaaccagctgctgcacgtgcccctgagacagcaccaggtgagctgctgcgactggctgctgaagatcatctgcggcgtggtgaccatcagaaccgtgtacgccagccacaagcaggccaaggcctgcctggtgagcagagtgagctgcgagagaaccggcaccagattccacaccagaggcgtgaacgacgacggccacgtgagcaacttcgtggagaccgagcagatgatctacatggacgacggcgtgagcagcttcgtgcagatcagaggcagcgtgcccctgttctgggagcagcccggcctgcaggtgggcagccaccacctgagactgcacagaggcctggaggccaacgcccccgccttcgacagacacatggtgctgctgaaggagcagtacggccagcaggtggtggtgaacctgctgggcagcagaggcggcgaggaggtgctgaacagagccttcaagttcgccaagggcggcaagctggagaagctggagaccctgctgagaccccagctgaagctgcactgggaggacttcgacgtgttcaccaagggcgagaacgtgagccccagattccagaagggcaccctgagaatgaactgcctggactgcctggacagaaccaacaccgtgcagagcttcatcgccctggaggtgctgcacctgcagctgaagaccctgggcctgagcagcaagcccatcgtggacagattcgtggagagcttcaaggccatgtggagcctgaacggccacagcctgagcaaggtgttcaccggcagcagagccctggagggcaaggccaaggtgggcaagctgaaggacggcgccagaagcatgagcagaaccatccagagcaacttcttcgacggcgtgaagcaggaggccatcaagctgctgctggtgggcgacgtgtacggcgaggaggtggccgacaagggcggcatgctgctggacagcaccgccctgctggtgacccccagaatcctgaaggccatgaccgagagacagagcgagttcaccaacttcaagagaatcagaatcgccatgggcacctggaacgtgaacggcggcaagcagttcagaagcaacgtgctgagaaccgccgagctgaccgactggctgctggacagcccccagctgagcggcgccaccgacagccagggcgagggcagcgacttcggcggcgacaagatccagctgcacctgacctag

SEQ ID NO: 101439 - DNA, 438 bp, synthetic construct
  misc_feature 1..438: note = Description of Artificial Sequence: Synthetic coding sequence
  source 1..438: mol_type = other DNA
atgaacggcagagtggactacctggtgaccgaggaggagatcaacctgaccagaggccccagcggcctgggcttcaacatcgtgggcggcaccgaccagcagtacgtgagcaacgacagcggcatctacgtgagcagaatcaaggagaacggcgccgccgccctggacggcagactgcaggagggcgacaagatcctgagcgtgaacggccaggacctgaagaacctgctgcaccaggacgccgtggacctgttcagaaacgccggctacgccgtgagcctgagagtgcagcacagactgcaggtgcagaacggccccatcggccacagaggcgagggcgaccccagcggcatccccatcttcatggtgctggtgcccgtgttcgccctgaccatggtggccgcctgggccttcatgagatacagacagcagctgtag

SEQ ID NO: 101440 - DNA, 957 bp, synthetic construct
  misc_feature 1..957: note = Description of Artificial Sequence: Synthetic coding sequence
  source 1..957: mol_type = other DNA
atggccggcagaagcctgaccagcaaggccgagcccaccgccggcgccgtggacagagccgagaaggccggcggccaggacaccagcagccagaagatcgaggacctgatggagatggtgcagaagctgcagaaggtgggcagcctggagcccagagtggaggtgctgatcaacagaatcaacgaggtgcagcaggccaagaagaaggccaacaaggacctgggcgaggccagaaccatctgcgaggccctgcagaaggagctggacagcctgcacggcgagaaggtgcacctgaaggagatcctgagcaagaagcaggagaccctgagaatcctgagactgcactgccaggagaaggagagcgaggcccacagaaagcacaccatgctgcaggagtgcaaggagagaatcagcgccctgaacctgcagatcgaggaggagaagaacaagcagagacagctgagactggccttcgaggagcagctggaggacctgatgggccagcacaaggacctgtgggacttccacatgcccgagagactggccaaggagatctgcgccctggacagcagcaaggagcagctgctgaaggaggagaagctggtgaaggccaccctggaggacgtgaagcaccagctgtgcagcctgtgcggcgccgagggccccagcaccctggacgagggcctgttcctgagaagccaggaggccgccgccaccgtgcagctgttccaggaggagcacagaaaggccgaggagctgctggccgccgccgcccagagacaccagcagctgcagcagaagtgccagcagcagcagcagaagagacagagactgaaggaggagctggagaagcacggcatgcaggtgcccgcccaggcccagagcacccaggaggaggaggccggccccggcgacgtggcccccagacccggcagacccgtgacctggtggagctag

SEQ ID NO: 101441 - DNA, 1056 bp, synthetic construct
  misc_feature 1..1056: note = Description of Artificial Sequence: Synthetic coding sequence
  source 1..1056: mol_type = other DNA
atggccggcagaagcctgaccagcaaggccgagcccaccgccggcgccgtggacagagccgagaaggccggcggccaggacaccagcagccagaagatcgaggacctgatggagatggtgcagaagctgcagaaggtgggcagcctggagcccagagtggaggtgctgatcaacagaatcaacgaggtgcagcaggccaagaagaaggccaacaaggacctgggcgaggccagaaccatctgcgaggccctgcagaaggagctggacagcctgcacggcgagaaggtgcacctgaaggagatcctgagcaagaagcaggagaccctgagaatcctgagactgcactgccaggagaaggagagcgaggcccacagaaagcacaccatgctgcaggagtgcaaggagagaatcagcgccctgaacctgcagatcgaggaggagaagaacaagcagagacagctgagactggccttcgaggagcagctggaggacctgatgggccagcacaaggacctgtgggacttccacatgcccgagagactggccaaggagatctgcgccctggacagcagcaaggagcagctgctgaaggaggagaagctggtgaaggccaccctggaggacgtgaagcaccagctgtgcagcctgtgcggcgccgagggccccagcaccctggacgagggcctgttcctgagaagccaggaggccgccgccaccgtgcagctgttccaggaggagcacagaaaggccgaggagctgctggccgccgccgcccagagacaccagcagctgcagcagaagtgccagcagcagcagcagaagagacagagactgaaggaggagctggagaagcacggcatgcaggtgcccgcccaggcccagagcacccaggaggaggaggccggccccggcgacgtggccagccccaagcccctgaagggcgagagacccggcgccgcccaccaggccggccccgacgtgctgatcggccaggaggacaccctgcaccccgacctgagccccagaggcttccaggagatcaaggagctgttctag

SEQ ID NO: 101442 - DNA, 849 bp, synthetic construct
  misc_feature 1..849: note = Description of Artificial Sequence: Synthetic coding sequence
  source 1..849: mol_type = other DNA
atggagatggtgcagaagctgcagaaggtgggcagcctggagcccagagtggaggtgctgatcaacagaatcaacgaggtgcagcaggccaagaagaaggccaacaaggacctgggcgaggccagaaccatctgcgaggccctgcagaaggagctggacagcctgcacggcgagaaggtgcacctgaaggagatcctgagcaagaagcaggagaccctgagaatcctgagactgcactgccaggagaaggagagcgaggcccacagaaagcacaccatgctgcaggagtgcaaggagagaatcagcgccctgaacctgcagatcgaggaggagaagaacaagcagagacagctgagactggccttcgaggagcagctggaggacctgatgggccagcacaaggacctgtgggacttccacatgcccgagagactggccaaggagatctgcgccctggacagcagcaaggagcagctgctgaaggaggagaagctggtgaaggccaccctggaggacgtgaagcaccagctgtgcagcctgtgcggcgccgagggccccagcaccctggacgagggcctgttcctgagaagccaggaggccgccgccaccgtgcagctgttccaggaggagcacagaaaggccgaggagctgctggccgccgccgcccagagacaccagcagctgcagcagaagtgccagcagcagcagcagaagagacagagactgaaggaggagctggagaagcacggcatgcaggtgcccgcccaggcccagagcacccaggaggaggaggccggccccggcgacgtggcccccagacccggcagacccgtgacctggtggagctag

SEQ ID NO: 101443 - DNA, 849 bp, synthetic construct; identical to SEQ ID NO: 101442
  misc_feature 1..849: note = Description of Artificial Sequence: Synthetic coding sequence
  source 1..849: mol_type = other DNA

SEQ ID NO: 101444 - DNA, 657 bp, synthetic construct
  misc_feature 1..657: note = Description of Artificial Sequence: Synthetic coding sequence
  source 1..657: mol_type = other DNA
atggagagacagggcgtggacgtgccccacgtgaagtgcaaggaccaggagccccagcccctgggcgagagcaaggagcaccccagatgggaggagaactgcgaggaggaggccggcggcggccccgccagcgccagctgccagctgaccgtgctggagggcaagagcggcctgtacttcagcagcctggacagcagcatcgacatcctgcagaagagagcccaggagctgatcgagaacatcaacaagagcagacagaaggaccacgccctgatgaccaacttcagaaacagcctgaagaccaaggtgagcgacctgaccgagaagctggaggagagaatctaccagatctacaacgaccacaacaagatcatccaggagaagctgcaggagttcacccagaagatggccaagatcagccacctggagaccgagctgaagcaggtgtgccacagcgtggagaccgtgtacaaggacctgtgcctgcagcccgagcagagcctgagactgagatggggccccgaccacagcagaggcaagagcccccccagacccggcaacagccagccccccgacgtgttcgtgagcagcgtggccgagaccaccagccaggccaccgccagcgaggtgcagaccaacagagacggcgagtgctag

SEQ ID NO: 101445 - DNA, 2931 bp, synthetic construct
  misc_feature 1..2931: note = Description of Artificial Sequence: Synthetic coding sequence
  source 1..2931: mol_type = other DNA
atggagaagcagaagcccttcgccctgttcgtgccccccagaagcagcagcagccaggtgagcgccgtgaagccccagaccctgggcggcgacagcaccttcttcaagagcttcaacaagtgcaccgaggacgacttcgagttccccttcgccaagaccaacctgagcaagaacggcgagaacatcgacagcgaccccgccctgcagaaggtgaacttcctgcccgtgctggagcaggtgggcaacagcgactgccactaccaggagggcctgaaggacagcgacctggagaacagcgagggcctgagcagagtgtacagcaagctgtacaaggaggccgagaagatcaagaagtggaaggtgagcaccgaggccgagctgagacagaaggagagcaagctgcaggagaacagaaagatcatcgaggcccagagaaaggccatccaggagctgcagttcggcaacgagaaggtgagcctgaagctggaggagggcatccaggagaacaaggacctgatcaaggagaacaacgccaccagacacctgtgcaacctgctgaaggagacctgcgccagaagcgccgagaagaccaagaagtacgagtacgagagagaggagaccagacaggtgtacatggacctgaacaacaacatcgagaagatgatcaccgccttcgaggagctgagagtgcaggccgagaacagcagactggagatgcacttcaagctgaaggaggactacgagaagatccagcacctggagcaggagtacaagaaggagatcaacgacaaggagaagcaggtgagcctgctgctgatccagatcaccgagaaggagaacaagatgaaggacctgaccttcctgctggaggagagcagagacaaggtgaaccagctggaggagaagaccaagctgcagagcgagaacctgaagcagagcatcgagaagcagcaccacctgaccaaggagctggaggacatcaaggtgagcctgcagagaagcgtgagcacccagaaggccctggaggaggacctgcagatcgccaccaagaccatctgccagctgaccgaggagaaggagacccagatggaggagagcaacaaggccagagccgcccacagcttcgtggtgaccgagttcgagaccaccgtgtgcagcctggaggagctgctgagaaccgagcagcagagactggagaagaacgaggaccagctgaagatcctgaccatggagctgcagaagaagagcagcgagctggaggagatgaccaagctgaccaacaacaaggaggtggagctggaggagctgaagaaggtgctgggcgagaaggagaccctgctgtacgagaacaagcagttcgagaagatcgccgaggagctgaagggcaccgagcaggagctgatcggcctgctgcaggccagagagaaggaggtgcacgacctggagatccagctgaccgccatcaccaccagcgagcagtactacagcaaggaggtgaaggacctgaagaccgagctggagaacgagaagctgaagaacaccgagctgaccagccactgcaacaagctgagcctggagaacaaggagctgacccaggagaccagcgacatgaccctggagctgaagaaccagcaggaggacatcaacaacaacaagaagcaggaggagagaatgctgaagcagatcgagaacctgcaggagaccgagacccagctgagaaacgagctggagtacgtgagagaggagctgaagcagaagagagacgaggtgaagtgcaagctggacaagagcgaggagaactgcaacaacctgagaaagcaggtggagaacaagaacaagtacatcgaggagctgcagcaggagaacaaggccctgaagaagaagggcaccgccgagagcaagcagctgaacgtgtacgagatcaaggtgaacaagctggagctggagctggagagcgccaagcagaagttcggcgagatcaccgacacctaccagaaggagatcgaggacaagaagatcagcgaggagaacctgctggaggaggtggagaaggccaaggtgatcgccgacgaggccgtgaagctgcagaaggagatcgacaagagatgccagcacaagatcgccgagatggtggccctgatggagaagcacaagcaccagtacgacaagatcatcgaggagagagacagcgagctgggcctgtacaagagcaaggagcaggagcagagcagcctgagagccagcctggagatcgagctgagcaacctgaaggccgagctgctgagcgtgaagaagcagctggagatcgagagagaggagaaggagaagctgaagagagaggccaaggagaacaccgccaccctgaaggagaagaaggacaagaagacccagaccttcctgctggagacccccgagatctactggaagctggacagcaaggccgtgcccagccagaccgtgagcagaaacttcaccagcgtggaccacggcatcagcaaggacaagagagactacctgtggaccagcgccaagaacaccctgagcacccccctgcccaaggcctacaccgtgaagacccccaccaagcccaagctgcagcagagagagaacctgaacatccccatcgaggagagcaagaagaagagaaagatggccttcgagttcgacatcaacagcgacagcagcgagaccaccgacctgctgagcatggtgagcgaggaggagaccctgaagaccctgtacagaaacaacaacccccccgccagccacctgtgcgtgaagacccccaagaaggcccccagcagcctgaccacccccggcagcaccctgaagttcggcgccatcagaaagatgagagaggacagatgggccgtgatcgccaagatggacagaaagaagaagctgaaggaggccgagaagctgttcgtgtag

SEQ ID NO: 101446 - DNA, 2931 bp, synthetic construct; identical to SEQ ID NO: 101445
  misc_feature 1..2931: note = Description of Artificial Sequence: Synthetic coding sequence
  source 1..2931: mol_type = other DNA

SEQ ID NO: 101447 - DNA, 2379 bp, synthetic construct
  misc_feature 1..2379: note = Description of Artificial Sequence: Synthetic coding sequence
  source 1..2379: mol_type = other DNA
atggagaagcagaagcccttcgccctgttcgtgccccccagaagcagcagcagccaggtgagcgccgtgaagccccagaccctgggcggcgacagcaccttcttcaagagcttcaacaagtgcaccgaggacgacttcgagttccccttcgccaagaccaacctgagcaagaacggcgagaacatcgacagcgaccccgccctgcagaaggtgaacttcctgcccgtgctggagcaggtgggcaacagcgactgccactaccaggagggcctgaaggacagcgacctggagaacagcgagggcctgagcagagtgtacagcaagctgtacaaggaggccgagaagatcaagaagtggaaggtgagcaccgaggccgagctgagacagaaggagagcaagctgcaggagaacagaaagatcatcgaggcccagagaaaggccatccaggagctgcagttcggcaacgagaaggtgagcctgaagctggaggagggcatccaggagaacaaggacctgatcaaggagaacaacgccaccagacacctgtgcaacctgctgaaggagacctgcgccagaagcgccgagaagaccaagaagtacgagtacgagagagaggagaccagacaggtgtacatggacctgaacaacaacatcgagaagatgatcaccgccttcgaggagctgagagtgcaggccgagaacagcagactggagatgcacttcaagctgaaggaggactacgagaagatccagcacctggagcaggagtacaagaaggagatcaacgacaaggagaagcaggtgagcctgctgctgatccagatcaccgagaaggagaacaagatgaaggacctgaccttcctgctggaggagagcagagacaaggtgaaccagctggaggagaagaccaagctgcagagcgagaacctgaagcagagcatcgagaagcagcaccacctgaccaaggagctggaggacatcaaggtgagcctgcagagaagcgtgagcacccagaaggccctggaggaggacctgcagatcgccaccaagaccatctgccagctgaccgaggagaaggagacccagatggaggagagcaacaaggccagagccgcccacagcttcgtggtgaccgagttcgagaccaccgtgtgcagcctggaggagctgctgagaaccgagcagcagagactggagaagaacgaggaccagctgaagatcctgaccatggagctgcagaagaagagcagcgagctggaggagatgaccaagctgaccaacaacaaggaggtggagctggaggagctgaagaaggtgctgggcgagaaggagaccctgctgtacgagaacaagcagttcgagaagatcgccgaggagctgaagggcaccgagcaggagctgatcggcctgctgcaggccagagagaaggaggtgcacgacctggagatccagctgaccgccatcaccaccagcgagcagtactacagcaaggaggtgaaggacctgaagaccgagctggagaacgagaagctgaagaacaccgagctgaccagccactgcaacaagctgagcctggagaacaaggagctgacccaggagaccagcgacatgaccctggagctgaagaaccagcaggaggacatcaacaacaacaagaagcaggaggagagaatgctgaagcagatcgagaacctgcaggagaccgagacccagctgagaaacgagctggagtacgtgagagaggagctgaagcagaagagagacgaggtgaagtgcaagctggacaagagcgaggagaactgcaacaacctgagaaagcaggtggagaacaagaacaagtacatcgaggagctgcagcaggagaacaaggccctgaagaagaagggcaccgccgagagcaagcagctgaacgtgtacgagatcaaggtgaacaagctggagctggagctggagagcgccaagcagaagttcggcgagatcaccgacacctaccagaaggagatcgaggacaagaagatcagcgaggagaacctgctggaggaggtggagaaggccaaggtgatcgccgacgaggccgtgaagctgcagaaggagatcgacaagagatgccagcacaagatcgccgagatggtggccctgatggagaagcacaagcaccagtacgacaagatcatcgaggagagagacagcgagctgggcctgtacaagagcaaggagcaggagcagagcagcctgagagccagcctggagatcgagctgagcaacctgaaggccgagctgctgagcgtgaagaagcagctggagatcgagagagaggagaaggagaagctgaagagagaggccaaggagaacaccgccaccctgaaggagaagaagtag

SEQ ID NO: 101448 - DNA, 2388 bp, synthetic construct
  misc_feature 1..2388: note = Description of Artificial Sequence: Synthetic coding sequence
  source 1..2388: mol_type = other DNA
atggagaagcagaagcccttcgccctgttcgtgccccccagaagcagcagcagccaggtgagcgccgtgaagccccagaccctgggcggcgacagcaccttcttcaagagcttcaacaagtgcaccgaggacgacttcgagttccccttcgccaagaccaacctgagcaagaacggcgagaacatcgacagcgaccccgccctgcagaaggtgaacttcctgcccgtgctggagcaggtgggcaacagcgactgccactaccaggagggcctgaaggacagcgacctggagaacagcgagggcctgagcagagtgtacagcaagctgtacaaggaggccgagaagatcaagaagtggaaggtgagcaccgaggccgagctgagacagaaggagagcaagctgcaggagaacagaaagatcatcgaggcccagagaaaggccatccaggagctgcagttcggcaacgagaaggtgagcctgaagctggaggagggcatccaggagaacaaggacctgatcaaggagaacaacgccaccagacacctgtgcaacctgctgaaggagacctgcgccagaagcgccgagaagaccaagaagtacgagtacgagagagaggagaccagacaggtgtacatggacctgaacaacaacatcgagaagatgatcaccgccttcgaggagctgagagtgcaggccgagaacagcagactggagatgcacttcaagctgaaggaggactacgagaagatccagcacctggagcaggagtacaagaaggagatcaacgacaaggagaagcaggtgagcctgctgctgatccagatcaccgagaaggagaacaagatgaaggacctgaccttcctgctggaggagagcagagacaaggtgaaccagctggaggagaagaccaagctgcagagcgagaacctgaagcagagcatcgagaagcagcaccacctgaccaaggagctggaggacatcaaggtgagcctgcagagaagcgtgagcacccagaaggccctggaggaggacctgcagatcgccaccaagaccatctgccagctgaccgaggagaaggagacccagatggaggagagcaacaaggccagagccgcccacagcttcgtggtgaccgagttcgagaccaccgtgtgcagcctggaggagctgctgagaaccgagcagcagagactggagaagaacgaggaccagctgaagatcctgaccatggagctgcagaagaagagcagcgagctggaggagatgaccaagctgaccaacaacaaggaggtggagctggaggagctgaagaaggtgctgggcgagaaggagaccctgctgtacgagaacaagcagttcgagaagatcgccgaggagctgaagggcaccgagcaggagctgatcggcctgctgcaggccagagagaaggaggtgcacgacctggagatccagctgaccgccatcaccaccagcgagcagtactacagcaaggaggtgaaggacctgaagaccgagctggagaacgagaagctgaagaacaccgagctgaccagccactgcaacaagctgagcctggagaacaaggagctgacccaggagaccagcgacatgaccctggagctgaagaaccagcaggaggacatcaacaacaacaagaagcaggaggagagaatgctgaagcagatcgagaacctgcaggagaccgagacccagctgagaaacgagctggagtacgtgagagaggagctgaagcagaagagagacgaggtgaagtgcaagctggacaagagcgaggagaactgcaacaacctgagaaagcaggtggagaacaagaacaagtacatcgaggagctgcagcaggagaacaaggccctgaagaagaagggcaccgccgagagcaagcagctgaacgtgtacgagatcaaggtgaacaagctggagctggagctggagagcgccaagcagaagttcggcgagatcaccgacacctaccagaaggagatcgaggacaagaagatcagcgaggagaacctgctggaggaggtggagaaggccaaggtgatcgccgacgaggccgtgaagctgcagaaggagatcgacaagagatgccagcacaagatcgccgagatggtggccctgatggagaagcacaagcaccagtacgacaagatcatcgaggagagagacagcgagctgggcctgtacaagagcaaggagcaggagcagagcagcctgagagccagcctggagatcgagctgagcaacctgaaggccgagctgctgagcgtgaagaagcagctggagatcgagagagaggagaaggagaagctgaagagagaggccaaggagaacaccgccaccctgaaggagaagaaggacaagaagtag

SEQ ID NO: 101449 - DNA, 4593 bp, synthetic construct
  misc_feature 1..4593: note = Description of Artificial Sequence: Synthetic coding sequence
  source 1..4593: mol_type = other DNA
atgcccatcagacccgacctgcagcagctggagaagtgcatcgacgacgccctgagaaagaacgacttcaagcccctgaagaccctgctgcagatcgacatctgcgaggacgtgaagatcaagtgcagcaagcagttcttccacaaggtggacaacctgatctgcagagagctgaacaaggaggacatccacaacgtgagcgccatcctggtgagcgtgggcagatgcggcaagaacatcagcgtgctgggccaggccggcctgctgaccatgatcaagcagggcctgatccagaagatggtggcctggttcgagaagagcaaggacatcatccagagccagggcaacagcaaggacgaggccgtgctgaacatgatcgaggacctggtggacctgctgctggtgatccacgacgtgagcgacgagggcaagaagcaggtggtggagagcttcgtgcccagaatctgcagcctggtgatcgacagcagagtgaacatctgcatccagcaggagatcatcaagaagatgaacgccatgctggacaagatgccccaggacgccagaaagatcctgagcaaccaggagatgctgatcctgatgagcagcatgggcgagagaatcctggacgccggcgactacgacctgcaggtgggcatcgtggaggccctgtgcagaatgaccaccgagaagcagagacaggagctggcccaccagtggttcagcatggacttcatcgccaaggccttcaagagaatcaaggacagcgagttcgagaccgactgcagaatcttcctgaacctggtgaacggcatgctgggcgacaagagaagagtgttcaccttcccctgcctgagcgccttcctggacaagtacgagctgcagatccccagcgacgagaagctggaggagttctggatcgacttcaacctgggcagccagaccctgagcttctacatcgccggcgacaacgacgaccaccagtgggaggccgtgaccgtgcccgaggagaaggtgcagatctacagcatcgaggtgagagagagcaagaagctgctgaccatcatcctgaagaacaccgtgaagatcagcaagagagagggcaaggagctgctgctgtacttcgacgccagcctggagatcaccaacgtgacccagaagatcttcggcgccaccaagcacagagagagcatcagaaagcagggcatcagcgtggccaagaccagcctgcacatcctgttcgacgccagcggcagccagatcctggtgcccgagagccagatcagccccgtgggcgaggagctggtgagcctgaaggagaagagcaagagccccaaggagttcgccaagcccagcaagtacatcaagaacagcgacaagggcaacagaaacaacagccagctggagaagaccacccccagcaagagaaagatgagcgaggccagcatgatcgtgagcggcgccgacagatacaccatgagaagccccgtgctgttcagcaacaccagcatcccccccagaagaagaagaatcaagccccccctgcagatgaccagcagcgccgagaagcccagcgtgagccagaccagcgagaacagagtggacaacgccgccagcctgaagagcagaagcagcgagggcagacacagaagagacaacatcgacaagcacatcaagaccgccaagtgcgtggagaacaccgagaacaagaacgtggagttccccaaccagaacttcagcgagctgcaggacgtgatccccgacagccaggccgccgagaagagagaccacaccatcctgcccggcgtgctggacaacatctgcggcaacaagatccacagcaagtgggcctgctggacccccgtgaccaacatcgagctgtgcaacaaccagagagccagcaccagcagcggcgacaccctgaaccaggacatcgtgatcaacaagaagctgaccaagcagaagagcagcagcagcatcagcgaccacaacagcgagggcaccggcaaggtgaagtacaagaaggagcagaccgaccacatcaagatcgacaaggccgaggtggaggtgtgcaagaagcacaaccagcagcagaaccaccccaagtacagcggccagaagaacaccgagaacgccaagcagagcgactggcccgtggagagcgagaccaccttcaagagcgtgctgctgaacaagaccatcgaggagagcctgatctacagaaagaagtacatcctgagcaaggacgtgaacaccgccacctgcgacaagaaccccagcgccagcaagaacgtgcagagccacagaaaggccgagaaggagctgaccagcgagctgaacagctgggacagcaagcagaagaagatgagagagaagagcaagggcaaggagttcaccaacgtggccgagagcctgatcagccagatcaacaagagatacaagaccaaggacgacatcaagagcaccagaaagctgaaggagagcctgatcaacagcggcttcagcaacaagcccgtggtgcagctgagcaaggagaaggtgcagaagaagagctacagaaagctgaagaccaccttcgtgaacgtgaccagcgagtgccccgtgaacgacgtgtacaacttcaacctgaacggcgccgacgaccccatcatcaagctgggcatccaggagttccaggccaccgccaaggaggcctgcgccgacagaagcatcagactggtgggccccagaaaccacgacgagctgaagagcagcgtgaagaccaaggacaagaagatcatcaccaaccaccagaagaagaacctgttcagcgacaccgagaccgagtacagatgcgacgacagcaagaccgacatcagctggctgagagagcccaagagcaagccccagctgatcgactacagcagaaacaagaacgtgaagaaccacaagagcggcaagagcagaagcagcctggagaagggccagcccagcagcaagatgacccccagcaagaacatcaccaagaagatggacaagaccatccccgagggcagaatcagactgcccagaaaggccaccaagaccaagaagaactacaaggacctgagcaacagcgagagcgagtgcgagcaggagttcagccacagcttcaaggagaacatccccgtgaaggaggagaacatccacagcagaatgaagaccgtgaagctgcccaagaagcagcagaaggtgttctgcgccgagaccgagaaggagctgagcaagcagtggaagaacagcagcctgctgaaggacgccatcagagacaactgcctggacctgagccccagaagcctgagcggcagccccagcagcatcgaggtgaccagatgcatcgagaagatcaccgagaaggacttcacccaggactacgactgcatcaccaagagcatcagcccctaccccaagaccagcagcctggagagcctgaacagcaacagcggcgtgggcggcaccatcaagagccccaagaacaacgagaagaacttcctgtgcgccagcgagagctgcagccccatccccagacccctgttcctgcccagacacacccccaccaagagcaacaccatcgtgaacagaaagaagatcagcagcctggtgctgacccaggagacccagaacagcaacagctacagcgacgtgagcagctacagcagcgaggagagattcatggagatcgagagcccccacatcaacgagaactacatccagagcaagagagaggagagccacctggccagcagcctgagcaagagcagcgagggcagagagaagacctggttcgacatgccctgcgacgccacccacgtgagcggccccacccagcacctgagcagaaagagaatctacatcgaggacaacctgagcaacagcaacgaggtggagatggaggagaagggcgagagaagagccaacctgctgcccaagaagctgtgcaagatcgaggacgccgaccaccacatccacaagatgagcgagagcgtgagcagcctgagcaccaacgacttcagcatcccctgggagacctggcagaacgagttcgccggcatcgagatgacctacgagacctacgagagactgaacagcgagttcaagagaagaaacaacatcagacacaagatgctgagctacttcaccacccagagctggaagaccgcccagcagcacctgagaaccatgaaccaccagagccaggacagcagaatcaagaagctggacaagttccagttcatcatcatcgaggagctggagaacttcgagaaggacagccagagcctgaaggacctggagaaggagttcgtggacttctgggagaagatcttccagaagttcagcgcctaccagaagagcgagcagcagagactgcacctgctgaagaccagcctggccaagagcgtgttctgcaacaccgacagcgaggagaccgtgttcaccagcgagatgtgcctgatgaaggaggacatgaaggtgctgcaggacagactgctgaaggacatgctggaggaggagctgctgaacgtgagaagagagctgatgagcgtgttcatgagccacgagagaaacgccaacgtgtag

SEQ ID NO: 101450 - DNA, 4593 bp, synthetic construct; identical to SEQ ID NO: 101449
  misc_feature 1..4593: note = Description of Artificial Sequence: Synthetic coding sequence
  source 1..4593: mol_type = other DNA

SEQ ID NO: 101451 - DNA, 3072 bp, synthetic construct
  misc_feature 1..3072: note = Description of Artificial Sequence: Synthetic coding sequence
  source 1..3072: mol_type = other DNA
atgcccatcagacccgacctgcagcagctggagaagtgcatcgacgacgccctgagaaagaacgacttcaagcccctgaagaccctgctgcagatcgacatctgcgaggacgtgaagatcaagtgcagcaagcagttcttccacaaggtggacaacctgatctgcagagagctgaacaaggaggacatccacaacgtgagcgccatcctggtgagcgtgggcagatgcggcaagaacatcagcgtgctgggccaggccggcctgctgaccatgatcaagcagggcctgatccagaagatggtggcctggttcgagaagagcaaggacatcatccagagccagggcaacagcaaggacgaggccgtgctgaacatgatcgaggacctggtggacctgctgctggtgatccacgacgtgagcgacgagggcaagaagcaggtggtggagagcttcgtgcccagaatctgcagcctggtgatcgacagcagagtgaacatctgcatccagcaggagatcatcaagaagatgaacgccatgctggacaagatgccccaggacgccagaaagatcctgagcaaccaggagatgctgatcctgatgagcagcatgggcgagagaatcctggacgccggcgactacgacctgcaggtgggcatcgtggaggccctgtgcagaatgaccaccgagaagcagagacaggagctggcccaccagtggttcagcatggacttcatcgccaaggccttcaagagaatcaaggacagcgagttcgagaccgactgcagaatcttcctgaacctggtgaacggcatgctgggcgacaagagaagagtgttcaccttcccctgcctgagcgccttcctggacaagtacgagctgcagatccccagcgacgagaagctggaggagttctggatcgacttcaacctgggcagccagaccctgagcttctacatcgccggcgacaacgacgaccaccagtgggaggccgtgaccgtgcccgaggagaaggtgcagatctacagcatcgaggtgagagagagcaagaagctgctgaccatcatcctgaagaacaccgtgaagatcagcaagagagagggcaaggagctgctgctgtacttcgacgccagcctggagatcaccaacgtgacccagaagatcttcggcgccaccaagcacagagagagcatcagaaagcagggcatcagcgtggccaagaccagcctgcacatcctgttcgacgccagcggcagccagatcctggtgcccgagagccagatcagccccgtgggcgaggagctggtgagcctgaaggagaagagcaagagccccaaggagttcgccaagcccagcaagtacatcaagaacagcgacaagggcaacagaaacaacagccagctggagaagaccacccccagcaagagaaagatgagcgaggccagcatgatcgtgagcggcgccgacagatacaccatgagaagccccgtgctgttcagcaacaccagcatcccccccagaagaagaagaatcaagccccccctgcagatgaccagcagcgccgagaagcccagcgtgagccagaccagcgagaacagagtggacaacgccgccagcctgaagagcagaagcagcgagggcagacacagaagagacaacatcgacaagcacatcaagaccgccaagtgcgtggagaacaccgagaacaagaacgtggagttccccaaccagaacttcagcgagctgcaggacgtgatccccgacagccaggccgccgagaagagagaccacaccatcctgcccggcgtgctggacaacatctgcggcaacaagatccacagcaagtgggcctgctggacccccgtgaccaacatcgagctgtgcaacaaccagagagccagcaccagcagcggcgacaccctgaaccaggacatcgtgatcaacaagaagctgaccaagcagaagagcagcagcagcatcagcgaccacaacagcgagggcaccggcaaggtgaagtacaagaaggagcagaccgaccacatcaagatcgacaaggccgaggtggaggtgtgcaagaagcacaaccagcagcagaaccaccccaagtacagcggccagaagaacaccgagaacgccaagcagagcgactggcccgtggagagcgagaccaccttcaagagcgtgctgctgaacaagaccatcgaggagagcctgatctacagaaagaagtacatcctgagcaaggacgtgaacaccgccacctgcgacaagaaccccagcgccagcaagaacgtgcagagccacagaaaggccgagaaggagctgaccagcgagctgaacagctgggacagcaagcagaagaagatgagagagaagagcaagggcaaggagttcaccaacgtggccgagagcctgatcagccagatcaacaagagatacaagaccaaggacgacatcaagagcaccagaaagctgaaggagagcctgatcaacagcggcttcagcaacaagcccgtggtgcagctgagcaaggagaaggtgcagaagaagagctacagaaagctgaagaccaccttcgtgaacgtgaccagcgagtgccccgtgaacgacgtgtacaacttcaacctgaacggcgccgacgaccccatcatcaagctgggcatccaggagttccaggccaccgccaaggaggcctgcgccgacagaagcatcagactggtgggccccagaaaccacgacgagctgaagagcagcgtgaagaccaaggacaagaagatcatcaccaaccaccagaagaagaacctgttcagcgacaccgagaccgagtacagatgcgacgacagcaagaccgacatcagctggctgagagagcccaagagcaagccccagctgatcgactacagcagaaacaagaacgtgaagaaccacaagagcggcaagagcagaagcagcctggagaagggccagcccagcagcaagatgacccccagcaagaacatcaccaagaagatggacaagaccatccccgagggcagaatcagactgcccagaaaggccaccaagaccaagaagtag

SEQ ID NO: 101452 - DNA, 711 bp, synthetic construct
  misc_feature 1..711: note = Description of Artificial Sequence: Synthetic coding sequence
  source 1..711: mol_type = other DNA
atggtgagcagcggcaagaagtacagcagaaagagcggcaagcccagcgtggaggaccagttcaccagagcctacgacttcgagaccgaggacaagaaggacctgagcggcagcgaggaggacgtgatcgagggcaagaccgccgtgatcgagaagagaagaaagaagagaagcagcgccggcgtggtggaggacatgggcggcgaggtgcagaacatgctggagggcgtgggcgtggacatcaacaaggccctgctggccaagagaaagagactggagatgtacaccaaggccagcctgaagaccagcaaccagaagatcgagcacgtgtggaagacccagcaggaccagagacagaagctgaaccaggagtacagccagcagttcctgaccctgttccagcagtgggacctggacatgcagaaggccgaggagcaggaggagaagatcctgaacatgttcagacagcagcagaagatcctgcagcagagcagaatcgtgcagagccagagactgaagaccatcaagcagctgtacgagcagttcatcaagagcatggaggagctggagaagaaccacgacaacctgctgaccggcgcccagaacgagttcaagaaggagatggccatgctgcagaagaagatcatgatggagacccagcagcaggagatcgccagcgtgagaaagagcctgcagagcatgctgttctag

SEQ ID NO: 101453 - DNA, 711 bp, synthetic construct; identical to SEQ ID NO: 101452
  misc_feature 1..711: note = Description of Artificial Sequence: Synthetic coding sequence
  source 1..711: mol_type = other DNA

SEQ ID NO: 101454 - DNA, 711 bp, synthetic construct; identical to SEQ ID NO: 101452
  misc_feature 1..711: note = Description of Artificial Sequence: Synthetic coding sequence
  source 1..711: mol_type = other DNA

SEQ ID NO: 101455 - DNA, 942 bp, synthetic construct
  misc_feature 1..942: note = Description of Artificial Sequence: Synthetic coding sequence
  source 1..942: mol_type = other DNA
atgctgctgctggccgacatggacgtggtgaaccagctggtggccggcggccagttcagagtggtgaaggagcccctgggcttcgtgaaggtgctgcagtgggtgttcgccatcttcgccttcgccacctgcggcagctacagcggcgagctgcagctgagcgtggactgcgccaacaagaccgagagcgacctgagcatcgaggtggagttcgagtaccccttcagactgcaccaggtgtacttcgacgcccccacctgcagaggcggcaccaccaaggtgttcctggtgggcgactacagcagcagcgccgagttcttcgtgaccgtggccgtgttcgccttcctgtacagcatgggcgccctggccacctacatcttcctgcagaacaagtacagagagaacaacaagggccccatgctggacttcctggccaccgccgtgttcgccttcatgtggctggtgagcagcagcgcctgggccaagggcctgagcgacgtgaagatggccaccgaccccgagaacatcatcaaggagatgcccgtgtgcagacagaccggcaacacctgcaaggagctgagagaccccgtgaccagcggcctgaacaccagcgtggtgttcggcttcctgaacctggtgctgtgggtgggcaacctgtggttcgtgttcaaggagaccggctgggccgcccccttcctgagagccccccccggcgcccccgagaagcagcccgcccccggcgacgcctacggcgacgccggctacggccagggccccggcggctacggcccccaggacagctacggcccccagggcggctaccagcccgactacggccagcccgccggcagcggcggcagcggctacggcccccagggcgactacggccagcagggctacggcccccagggcgcccccaccagcttcagcaaccagatgtag

SEQ ID NO: 101456 - DNA, 942 bp, synthetic construct; identical to SEQ ID NO: 101455
  misc_feature 1..942: note = Description of Artificial Sequence: Synthetic coding sequence
  source 1..942: mol_type = other DNA

SEQ ID NO: 101457 - DNA, 588 bp, synthetic construct
  misc_feature 1..588: note = Description of Artificial Sequence: Synthetic coding sequence
  source 1..588: mol_type = other DNA
atgggcgccctggccacctacatcttcctgcagaacaagtacagagagaacaacaagggccccatgctggacttcctggccaccgccgtgttcgccttcatgtggctggtgagcagcagcgcctgggccaagggcctgagcgacgtgaagatggccaccgaccccgagaacatcatcaaggagatgcccgtgtgcagacagaccggcaacacctgcaaggagctgagagaccccgtgaccagcggcctgaacaccagcgtggtgttcggcttcctgaacctggtgctgtgggtgggcaacctgtggttcgtgttcaaggagaccggctgggccgcccccttcctgagagccccccccggcgcccccgagaagcagcccgcccccggcgacgcctacggcgacgccggctacggccagggccccggcggctacggcccccaggacagctacggcccccagggcggctaccagcccgactacggccagcccgccggcagcggcggcagcggctacggcccccagggcgactacggccagcagggctacggcccccagggcgcccccaccagcttcagcaaccagatgtag

SEQ ID NO: 101458 - DNA, 2712 bp, synthetic construct
  misc_feature 1..2712: note = Description of Artificial Sequence: Synthetic coding sequence
  source 1..2712: mol_type = other DNA
atggagggctacagcgaggaggccagcctgctgagacacctggagaaggtggccagcgaggaggaggaggtgcccctggtggtgtacctgaaggagaacgccgccctgctgaccgccaacggcctgcacctgagccagaacagagaggcccagcagagcagccccgcccccccccccgccgaggtgcacagccccgccgccgacgtgaaccagaacctggccagccccagcgccaccctgaccacccccaccagcaacagcagccacaacccccccgccaccgacgtgaaccagaacccccccgccaccgtggtgccccagagcctgcccctgagcagcatccagcagaacagcagcgaggcccagctgcccagcaacggcaccggccccgccagcaagcccagcaccctgtgcgccgacggccagccccaggcccccgccgaggaggtgagatgcagcaccctgctgatcgacaaggtgagcacccccgccaccaccaccagcaccttcagcagagaggccaccctgatccccagcagcagaccccccgccagcgacttcatgagcagcagcctgctgatcgacatccagcccaacaccctggtggtgagcgccgaccaggagatgagcggcagagccgccgccaccacccccaccaaggtgtacagcgaggtgcacttcaccctggccaagccccccagcgtggtgaacagaaccgccagacccttcggcatccaggcccccggcggcaccagccagatggagagaagccccatgctggagagaagacacttcggcgagaaggcccccgccccccagccccccagcctgcccgacagaagccccagaccccagagacacatcatgagcagaagccccatggtggagagaagaatgatgggccagagaagccccgccagcgagagaagacccctgggcaacttcaccgccccccccacctacaccgagaccctgagcaccgcccccctggccagctgggtgagaagcccccccagctacagcgtgctgtaccccagcagcgaccccaagagcagccacctgaagggccaggccgtgcccgccagcaagaccggcatcctggaggagagcatggccagaagaggcagcagaaagagcatgttcaccttcgtggagaagcccaaggtgacccccaaccccgacctgctggacctggtgcagaccgccgacgagaagagaagacagagagaccagggcgaggtgggcgtggaggaggagcccttcgccctgggcgccgaggccagcaacttccagcaggagcccgcccccagagacagagccagccccgccgccgccgaggaggtggtgcccgagtgggccagctgcctgaagagccccagaatccaggccaagcccaagcccaagcccaaccagaacctgagcgaggccagcggcaagggcgccgagctgtacgccagaagacagagcagaatggagaagtacgtgatcgagagcagcagccacacccccgagctggccagatgccccagccccaccatgagcctgcccagcagctggaagtaccccaccaacgcccccggcgccttcagagtggccagcagaagccccgccagaaccccccccgccagcctgtaccacggctacctgcccgagaacggcgtgctgagacccgagcccaccaagcagcccccctaccagctgagacccagcctgttcgtgctgagccccatcaaggagcccgccaaggtgagccccagagccgccagccccgccaagcccagcagcctggacctggtgcccaacctgcccaagggcgccctgccccccagccccgccctgcccagacccagcagaagcagccccggcctgtacaccagccccggccaggacagcctgcagcccaccgccgtgagccccccctacggcggcgacatcagccccgtgagccccagcagagcctggagccccagagccaagcaggcccccagacccagcttcagcaccagaaacgccggcatcgaggcccaggacagaagagagagcctgcccaccagccccccctggacccccggcgccagcagaccccccagcagcctggacggctgggtgagccccggcccctgggagcccggcagaggcagcagcatgagcagccccccccccctgcccccccccccccccatgagccccagctggagcgagagaagcgtgagccccctgagacccgagaccgaggccagaccccccagcagacagctgcaggccctgctggccagaaacatcatcaacgccgccagaagaaagagcgccagccccagaagcgccggcgccgagaaccccagacccttcagcccccccagagccccccccccccccccccccccccccccccccccccccagaatgagaagcccccagcccgccagacccggcagcgccgccgtgcccggcgccgccttcgcccccatccccagaagccccctgcccgccggccccagcagctgcaccagccccagaagccccctgcccgccccccccagacccttcctgtacagaagaagccccaccgacagcgacgtgagcctggacagcgaggacagcggcgccaagagccccggcatcctgggctacaacatctgccccagaggctggaacggcagcctgagactgaagagaggcagcctgcccgccgaggccagctgcaccacctag

SEQ ID NO: 101459 - DNA, 2790 bp, synthetic construct
  misc_feature 1..2790: note = Description of Artificial Sequence: Synthetic coding sequence
  source 1..2790: mol_type = other DNA
atgctgggcccccacctgccccccccccccctggcccccagcgagggcagacccaccccctgcgccttccagatccccgacggcagctacagatgcctggccctggaggccgaggagagcagcggcgaggagggcctgcagggcgaggtgggccccaccgacctggaggaggacgagggcgtgagcagaagcggcgacgacagcgcctgcagagtgacccagggcaccccccagctgcccaaggccctgggcatccagccccccagctgcagcagagaggagcagggcgccagccagcacgacgacagagccagccaggactgggacgtggtgaaggccggccagatgatgaccgccagccccagccccggccccggccccagagtggcccagaagcccgccctgggcagaagcaccagcctgaccgagaaggacctgaaggaggccaaggccagaagccagcagatcgccgcccagctgaccaccccccccagcagcaacagcagaggcgtgcagctgttcaacagaagaagacagagagtgaacgagttcaccctggagagccacggccagagaggccagaagcccagccaggagagcctgagagtgctgcccagcagcctgcccggccacgcccccggcctgagcctgagcagcaccagcctgcccgagcccggcccccccagacaccccagcccccagagccccgacagaggcgtgcccggccacagcatggagggctacagcgaggaggccagcctgctgagacacctggagaaggtggccagcgaggaggaggaggtgcccctggtggtgtacctgaaggagaacgccgccctgctgaccgccaacggcctgcacctgagccagaacagagaggcccagcagagcagccccgcccccccccccgccgaggtgcacagccccgccgccgacgtgaaccagaacctggccagccccagcgccaccctgaccacccccaccagcaacagcagccacaacccccccgccaccgacgtgaaccagaacccccccgccaccgtggtgccccagagcctgcccctgagcagcatccagcagaacagcagcgaggcccagctgcccagcaacggcaccggccccgccagcaagcccagcaccctgtgcgccgacggccagccccaggcccccgccgaggaggtgagatgcagcaccctgctgatcgacaaggtgagcacccccgccaccaccaccagcaccttcagcagagaggccaccctgatccccagcagcagaccccccgccagcgacttcatgagcagcagcctgctgatcgacatccagcccaacaccctggtggtgagcgccgaccaggagatgagcggcagagccgccgccaccacccccaccaaggtgtacagcgaggtgcacttcaccctggccaagccccccagcgtggtgaacagaaccgccagacccttcggcatccaggcccccggcggcaccagccagatggagagaagccccatgctggagagaagacacttcggcgagaaggcccccgccccccagccccccagcctgcccgacagaagccccagaccccagagacacatcatgagcagaagccccatggtggagagaagaatgatgggccagagaagccccgccagcgagagaagacccctgggcaacttcaccgccccccccacctacaccgagaccctgagcaccgcccccctggccagctgggtgagaagcccccccagctacagcgtgctgtaccccagcagcgaccccaagagcagccacctgaagggccaggccgtgcccgccagcaagaccggcatcctggaggagagcatggccagaagaggcagcagaaagagcatgttcaccttcgtggagaagcccaaggtgacccccaaccccgacctgctggacctggtgcagaccgccgacgagaagagaagacagagagaccagggcgaggtgggcgtggaggaggagcccttcgccctgggcgccgaggccagcaacttccagcaggagcccgcccccagagacagagccagccccgccgccgccgaggaggtggtgcccgagtgggccagctgcctgaagagccccagaatccaggccaagcccaagcccaagcccaaccagaacctgagcgaggccagcggcaagggcgccgagctgtacgccagaagacagagcagaatggagaagtacgtgatcgagagcagcagccacacccccgagctggccagatgccccagccccaccatgagcctgcccagcagctggaagtaccccaccaacgcccccggcgccttcagagtggccagcagaagccccgccagaaccccccccgccagcctgtaccacggctacctgcccgagaacggcgtgctgagacccgagcccaccaagcagcccccctaccagctgagacccagcctgttcgtgctgagccccatcaaggagcccgccaaggtgagccccagagccgccagccccgccaagcccagcagcctggacctggtgcccaacctgcccaagggcgccctgccccccagccccgccctgcccagacccagcagaagcagccccggcctgtacaccagccccggccaggacagcctgcagcccaccgccgtgagccccccctacggcggcgacatcagccccgtgagccccagcagagcctggagccccagagccaagcaggcccccagacccagcttcagcaccagaaacgccggcatcgaggcccaggtgtggaagcccagcttctgcttcaagtag

SEQ ID NO: 101460 - DNA, 2058 bp, synthetic construct
  misc_feature 1..2058: note = Description of Artificial Sequence: Synthetic coding sequence
  source 1..2058: mol_type = other DNA
atggagggctacagcgaggaggccagcctgctgagacacctggagaaggtggccagcgaggaggaggaggtgcccctggtggtgtacctgaaggagaacgccgccctgctgaccgccaacggcctgcacctgagccagaacagagaggcccagcagagcagccccgcccccccccccgccgaggtgcacagccccgccgccgacgtgaaccagaacctggccagccccagcgccaccctgaccacccccaccagcaacagcagccacaacccccccgccaccgacgtgaaccagaacccccccgccaccgtggtgccccagagcctgcccctgagcagcatccagcagaacagcagcgaggcccagctgcccagcaacggcaccggccccgccagcaagcccagcaccctgtgcgccgacggccagccccaggcccccgccgaggaggtgagatgcagcaccctgctgatcgacaaggtgagcacccccgccaccaccaccagcaccttcagcagagaggccaccctgatccccagcagcagaccccccgccagcgacttcatgagcagcagcctgctgatcgacatccagcccaacaccctggtggtgagcgccgaccaggagatgagcggcagagccgccgccaccacccccaccaaggtgtacagcgaggtgcacttcaccctggccaagccccccagcgtggtgaacagaaccgccagacccttcggcatccaggcccccggcggcaccagccagatggagagaagccccatgctggagagaagacacttcggcgagaaggcccccgccccccagccccccagcctgcccgacagaagccccagaccccagagacacatcatgagcagaagccccatggtggagagaagaatgatgggccagagaagccccgccagcgagagaagacccctgggcaacttcaccgccccccccacctacaccgagaccctgagcaccgcccccctggccagctgggtgagaagcccccccagctacagcgtgctgtaccccagcagcgaccccaagagcagccacctgaagggccaggccgtgcccgccagcaagaccggcatcctggaggagagcatggccagaagaggcagcagaaagagcatgttcaccttcgtggagaagcccaaggtgacccccaaccccgacctgctggacctggtgcagaccgccgacgagaagagaagacagagagaccagggcgaggtgggcgtggaggaggagcccttcgccctgggcgccgaggccagcaacttccagcaggagcccgcccccagagacagagccagccccgccgccgccgaggaggtggtgcccgagtgggccagctgcctgaagagccccagaatccaggccaagcccaagcccaagcccaaccagaacctgagcgaggccagcggcaagggcgccgagctgtacgccagaagacagagcagaatggagaagtacgtgatcgagagcagcagccacacccccgagctggccagatgccccagccccaccatgagcctgcccagcagctggaagtaccccaccaacgcccccggcgccttcagagtggccagcagaagccccgccagaaccccccccgccagcctgtaccacggctacctgcccgagaacggcgtgctgagacccgagcccaccaagcagcccccctaccagctgagacccagcctgttcgtgctgagccccatcaaggagcccgccaaggtgagccccagagccgccagccccgccaagcccagcagcctggacctggtgcccaacctgcccaagggcgccctgccccccagccccgccctgcccagacccagcagaagcagccccggcctgtacaccagccccggccaggacagcctgcagcccaccgccgtgagccccccctacggcggcgacatcagccccgtgagccccagcagagcctggagccccagagccaagcaggcccccagacccagcttcagcaccagaaacgccggcatcgaggcccaggtgtggaagcccagcttctgcttcaagtag

SEQ ID NO: 101461 - DNA, 2790 bp, synthetic construct; identical to SEQ ID NO: 101459
  misc_feature 1..2790: note = Description of Artificial Sequence: Synthetic coding sequence
  source 1..2790: mol_type = other DNA

SEQ ID NO: 101462 - DNA, 636 bp, synthetic construct
  misc_feature 1..636: note = Description of Artificial Sequence: Synthetic coding sequence
  source 1..636: mol_type = other DNA
atggacaacctgagcagcgaggagatccagcagagagcccaccagatcaccgacgagagcctggagagcaccagaagaatcctgggcctggccatcgagagccaggacgccggcatcaagaccatcaccatgctggacgagcagaaggagcagctgaacagaatcgaggagggcctggaccagatcaacaaggacatgagagagaccgagaagaccctgaccgagctgaacaagtgctgcggcctgtgcgtgtgcccctgcaacagaaccaagaacttcgagagcggcaaggcctacaagaccacctggggcgacggcggcgagaacagcccctgcaacgtggtgagcaagcagcccggccccgtgaccaacggccagctgcagcagcccaccaccggcgccgccagcggcggctacatcaagagaatcaccaacgacgccagagaggacgagatggaggagaacctgacccaggtgggcagcatcctgggcaacctgaaggacatggccctgaacatcggcaacgagatcgacgcccagaacccccagatcaagagaatcaccgacaaggccgacaccaacagagacagaatcgacatcgccaacgccagagccaagaagctgatcgacagctag

SEQ ID NO: 101463 - DNA, 477 bp, synthetic construct
  misc_feature 1..477: note = Description of Artificial Sequence: Synthetic coding sequence
  source 1..477: mol_type = other DNA
atggacaacctgagcagcgaggagatccagcagagagcccaccagatcaccgacgagagcctggagagcaccagaagaatcctgggcctggccatcgagagccaggacgccggcatcaagaccatcaccatgctggacgagcagaaggagcagctgaacagaatcgaggagggcctggaccagatcaacaaggacatgagagagaccgagaagaccctgaccgagctgaacaagtgctgcggcctgtgcgtgtgcccctgcaacagcatcaccaacgacgccagagaggacgagatggaggagaacctgacccaggtgggcagcatcctgggcaacctgaaggacatggccctgaacatcggcaacgagatcgacgcccagaacccccagatcaagagaatcaccgacaaggccgacaccaacagagacagaatcgacatcgccaacgccagagccaagaagctgatcgacagctag

SEQ ID NO: 101464 - DNA, 477 bp, synthetic construct; identical to SEQ ID NO: 101463
  misc_feature 1..477: note = Description of Artificial Sequence: Synthetic coding sequence
  source 1..477: mol_type = other DNA

SEQ ID NO: 101465 - DNA, 621 bp, synthetic construct
  misc_feature 1..621: note = Description of Artificial Sequence: Synthetic coding sequence
  source 1..621: mol_type = other DNA
atggccgaggacgccgacatgagaaacgagctggaggagatgcagagaagagccgaccagctggccgacgagagcctggagagcaccagaagaatgctgcagctggtggaggagagcaaggacgccggcatcagaaccctggtgatgctggacgagcagggcgagcagctggagagaatcgaggagggcatggaccagatcaacaaggacatgaaggaggccgagaagaacctgaccgacctgggcaagttctgcggcctgtgcgtgtgcccctgcaacaagctgaagagcagcgacgcctacaagaaggcctggggcaacaaccaggacggcgtggtggccagccagcccgccagagtggtggacgagagagagcagatggccatcagcggcggcttcatcagaagagtgaccaacgacgccagagagaacgagatggacgagaacctggagcaggtgagcggcatcatcggcaacctgagacacatggccctggacatgggcaacgagatcgacacccagaacagacagatcgacagaatcatggagaaggccgacagcaacaagaccagaatcgacgaggccaaccagagagccaccaagatgctgggcagcggctag

SEQ ID NO: 101466 - DNA, 621 bp, synthetic construct
  misc_feature 1..621: note = Description of Artificial Sequence: Synthetic coding sequence
  source 1..621: mol_type = other DNA
atggccgaggacgccgacatgagaaacgagctggaggagatgcagagaagagccgaccagctggccgacgagagcctggagagcaccagaagaatgctgcagctggtggaggagagcaaggacgccggcatcagaaccctggtgatgctggacgagcagggcgagcagctggacagagtggaggagggcatgaaccacatcaaccaggacatgaaggaggccgagaagaacctgaaggacctgggcaagtgctgcggcctgttcatctgcccctgcaacaagctgaagagcagcgacgcctacaagaaggcctggggcaacaaccaggacggcgtggtggccagccagcccgccagagtggtggacgagagagagcagatggccatcagcggcggcttcatcagaagagtgaccaacgacgccagagagaacgagatggacgagaacctggagcaggtgagcggcatcatcggcaacctgagacacatggccctggacatgggcaacgagatcgacacccagaacagacagatcgacagaatcatggagaaggccgacagcaacaagaccagaatcgacgaggccaaccagagagccaccaagatgctgggcagcggctag

SEQ ID NO: 101467 - DNA, 282 bp, synthetic construct
  misc_feature 1..282: note = Description of Artificial Sequence: Synthetic coding sequence
  source 1..282: mol_type = other DNA
atggccgaggacgccgacatgagaaacgagctggaggagatgcagagaagagccgaccagctggccgacgagagcctggagagcaccagaagaatgctgcagctggtggaggagagcaaggacgccggcatcagaaccctggtgatgctggacgagcagggcgagcagctggagagaatcgaggagggcatggaccagatcaacaaggacatgaaggaggccgagaagaacctgaccgacctgggcaagttctgcggcctgtgcgtgtgcccctgcaactag

SEQ ID NO: 101468 - DNA, 1500 bp, synthetic construct; identical to SEQ ID NO: 98618
  misc_feature 1..1500: note = Description of Artificial Sequence: Synthetic coding sequence
  source 1..1500: mol_type = other DNA

SEQ ID NO: 101469 - DNA, 1269 bp, synthetic construct
  misc_feature 1..1269: note = Description of Artificial Sequence: Synthetic coding sequence
  source 1..1269: mol_type = other DNA
atggtgagcgagagccaccacgaggccctggccgccccccccgtgaccaccgtggccaccgtgctgcccagcaacgccaccgagcccgccagccccggcgagggcaaggaggacgccttcagcaagctgaaggagaagttcatgaacgagctgcacaagatccccctgcccccctgggccctgatcgccatcgccatcgtggccgtgctgctggtgctgacctgctgcttctgcatctgcaagaagtgcctgttcaagaagaagaacaagaagaagggcaaggagaagggcggcaagaacgccatcaacatgaaggacgtgaaggacctgggcaagaccatgaaggaccaggccctgaaggacgacgacgccgagaccggcctgaccgacggcgaggagaaggaggagcccaaggaggaggagaagctgggcaagctgcagtacagcctggactacgacttccagaacaaccagctgctggtgggcatcatccaggccgccgagctgcccgccctggacatgggcggcaccagcgacccctacgtgaaggtgttcctgctgcccgacaagaagaagaagttcgagaccaaggtgcacagaaagaccctgaaccccgtgttcaacgagcagttcaccttcaaggtgccctacagcgagctgggcggcaagaccctggtgatggccgtgtacgacttcgacagattcagcaagcacgacatcatcggcgagttcaaggtgcccatgaacaccgtggacttcggccacgtgaccgaggagtggagagacctgcagagcgccgagaaggaggagcaggagaagctgggcgacatctgcttcagcctgagatacgtgcccaccgccggcaagctgaccgtggtgatcctggaggccaagaacctgaagaagatggacgtgggcggcctgagcgacccctacgtgaagatccacctgatgcagaacggcaagagactgaagaagaagaagaccaccatcaagaagaacaccctgaacccctactacaacgagagcttcagcttcgaggtgcccttcgagcagatccagaaggtgcaggtggtggtgaccgtgctggactacgacaagatcggcaagaacgacgccatcggcaaggtgttcgtgggctacaacagcaccggcgccgagctgagacactggagcgacatgctggccaaccccagaagacccatcgcccagtggcacaccctgcaggtggaggaggaggtggacgccatgctggccgtgaagaagtag

SEQ ID NO: 101470 - DNA, 1269 bp, synthetic construct; identical to SEQ ID NO: 101469
  misc_feature 1..1269: note = Description of Artificial Sequence: Synthetic coding sequence
  source 1..1269: mol_type = other DNA

SEQ ID NO: 101471 - DNA, 549 bp, synthetic construct
  misc_feature 1..549: note = Description of Artificial Sequence: Synthetic coding sequence
  source 1..549: mol_type = other DNA
atggtgagcgagagccaccacgaggccctggccgccccccccgtgaccaccgtggccaccgtgctgcccagcaacgccaccgagcccgccagccccggcgagggcaaggaggacgccttcagcaagctgaaggagaagttcatgaacgagctgcacaagatccccctgcccccctgggccctgatcgccatcgccatcgtggccgtgctgctggtgctgacctgctgcttctgcatctgcaagaagtgcctgttcaagaagaagaacaagaagaagggcaaggagaagggcggcaagaacgccatcaacatgaaggacgtgaaggacctgggcaagaccatgaaggaccaggccctgaaggacgacgacgccgagaccggcctgaccgacggcgaggagaaggaggagcccaaggaggaggagaagctgggcaagctgcagtacagcctggactacgacttccagaacaaccagctgctggtgggcatcatccaggccgccgagctgcccgccctggacatgggcggcaccagcgacccctacgtgtag

SEQ ID NO: 101472 - DNA, 177 bp, synthetic construct
  misc_feature 1..177: note = Description of Artificial Sequence: Synthetic coding sequence
  source 1..177: mol_type = other DNA
atggtgagcgagagccaccacgaggccctggccgccccccccgtgaccaccgtggccaccgtgctgcccagcaacgccaccgagcccgccagccccggcgagggcaaggaggacgccttcagcaagctgaaggagaagttcatgaacgagctgcacaagatccccctgcccccctag

SEQ ID NO: 101473 - DNA, 219 bp, synthetic construct
  misc_feature 1..219: note = Description of Artificial Sequence: Synthetic coding sequence
  source 1..219: mol_type = other DNA
atggtgagcgagagccaccacgaggccctggccgccccccccgtgaccaccgtggccaccgtgctgcccagcaacgccaccgagcccgccagccccggcgagggcaaggaggacgccttcagcaagctgaaggagaagttcatgaacgagctgcacaagatccccctgcccccctgggccctgatcgccatcgccatcgtggccgtgctgctggtgtag

SEQ ID NO: 101474 - DNA, 222 bp, synthetic construct
  misc_feature 1..222: note = Description of Artificial Sequence: Synthetic coding sequence
  source 1..222: mol_type = other DNA
atggtgagcgagagccaccacgaggccctggccgccccccccgtgaccaccgtggccaccgtgctgcccagcaacgccaccgagcccgccagccccggcgagggcaaggaggacgccttcagcaagctgaaggagaagttcatgaacgagctgcacaagatccccctgcccccctgggccctgatcgccatcgccatcgtggccgtgctgctggtgctgtag

SEQ ID NO: 101475 - DNA, 285 bp, synthetic construct
  misc_feature 1..285: note = Description of Artificial Sequence: Synthetic coding sequence
  source 1..285: mol_type = other DNA
atggtgagcgagagccaccacgaggccctggccgccccccccgtgaccaccgtggccaccgtgctgcccagcaacgccaccgagcccgccagccccggcgagggcaaggaggacgccttcagcaagctgaaggagaagttcatgaacgagctgcacaagatccccctgcccccctgggccctgatcgccatcgccatcgtggccgtgctgctggtgctgacctgctgcttctgcatctgcaagaagtgcctgttcaagaagaagaacaagaagaagggcaagtag

SEQ ID NO: 101476 - DNA, 1269 bp, synthetic construct; identical to SEQ ID NO: 101469
  misc_feature 1..1269: note = Description of Artificial Sequence: Synthetic coding sequence
  source 1..1269: mol_type = other DNA

SEQ ID NO: 101477 - DNA, 1773 bp, synthetic construct
  misc_feature 1..1773: note = Description of Artificial Sequence: Synthetic coding sequence
  source 1..1773: mol_type = other DNA
atgagcggcgactacgaggacgacctgtgcagaagagccctgatcctggtgagcgacctgtgcgccagagtgagagacgccgacaccaacgacagatgccaggagttcaacgacagaatcagaggctaccccagaggccccgacgccgacatcagcgtgagcctgctgagcgtgatcgtgaccttctgcggcatcgtgctgctgggcgtgagcctgttcgtgagctggaagctgtgctgggtgccctggagagacaagggcggcagcgccgtgggcggcggccccctgagaaaggacctgggccccggcgtgggcctggccggcctggtgggcggcggcggccaccacctggccgccggcctgggcggccaccccctgctgggcggcccccaccaccacgcccacgccgcccaccacccccccttcgccgagctgctggagcccggcagcctgggcggcagcgacacccccgagcccagctacctggacatggacagctaccccgaggccgccgccgccgccgtggccgccggcgtgaagcccagccagaccagccccgagctgcccagcgagggcggcgccggcagcggcctgctgctgctgccccccagcggcggcggcctgcccagcgcccagagccaccagcaggtgaccagcctggcccccaccaccagataccccgccctgcccagacccctgacccagcagaccctgaccagccagcccgaccccagcagcgaggagagaccccccgccctgcccctgcccctgcccggcggcgaggagaaggccaagctgatcggccagatcaagcccgagctgtaccagggcaccggccccggcggcagaagaagcggcggcggccccggcagcggcgaggccggcaccggcgccccctgcggcagaatcagcttcgccctgagatacctgtacggcagcgaccagctggtggtgagaatcctgcaggccctggacctgcccgccaaggacagcaacggcttcagcgacccctacgtgaagatctacctgctgcccgacagaaagaagaagttccagaccaaggtgcacagaaagaccctgaaccccgtgttcaacgagaccttccagttcagcgtgcccctggccgagctggcccagagaaagctgcacttcagcgtgtacgacttcgacagattcagcagacacgacctgatcggccaggtggtgctggacaacctgctggagctggccgagcagccccccgacagacccctgtggagagacatcgtggagggcggcagcgagaaggccgacctgggcgagctgaacttcagcctgtgctacctgcccaccgccggcagactgaccgtgaccatcatcaaggccagcaacctgaaggccatggacctgaccggcttcagcgacccctacgtgaaggccagcctgatcagcgagggcagaagactgaagaagagaaagaccagcatcaagaagaacaccctgaaccccacctacaacgaggccctggtgttcgacgtggcccccgagagcgtggagaacgtgggcctgagcatcgccgtggtggactacgactgcatcggccacaacgaggtgatcggcgtgtgcagagtgggccccgacgccgccgacccccacggcagagagcactgggccgagatgctggccaaccccagaaagcccgtggagcactggcaccagctggtggaggagaagaccgtgaccagcttcaccaagggcagcaagggcctgagcgagaaggagaacagcgagtag

SEQ ID NO: 101478 - DNA, 1773 bp, synthetic construct; identical to SEQ ID NO: 101477
  misc_feature 1..1773: note = Description of Artificial Sequence: Synthetic coding sequence
  source 1..1773: mol_type = other DNA

SEQ ID NO: 101479 - DNA, 1773 bp, synthetic construct; identical to SEQ ID NO: 101477
  misc_feature 1..1773: note = Description of Artificial Sequence: Synthetic coding sequence
  source 1..1773: mol_type = other DNA

SEQ ID NO: 101480 - DNA, 1773 bp, synthetic construct; identical to SEQ ID NO: 101477
  misc_feature 1..1773: note = Description of Artificial Sequence: Synthetic coding sequence
  source 1..1773: mol_type = other DNA

SEQ ID NO: 101481 - DNA, 1278 bp, synthetic construct
  misc_feature 1..1278: note = Description of Artificial Sequence: Synthetic coding sequence
  source 1..1278: mol_type = other DNA
atggcccccatcaccaccagcagagaggagttcgacgagatccccaccgtggtgggcatcttcagcgccttcggcctggtgttcaccgtgagcctgttcgcctggatctgctgccagagaaagagcagcaagagcaacaagacccccccctacaagttcgtgcacgtgctgaagggcgtggacatctaccccgagaacctgaacagcaagaagaagttcggcgccgacgacaagaacgaggtgaagaacaagcccgccgtgcccaagaacagcctgcacctggacctggagaagagagacctgaacggcaacttccccaagaccaacctgaagcccggcagccccagcgacctggagaacgccacccccaagctgttcctggagggcgagaaggagagcgtgagccccgagagcctgaagagcagcaccagcctgaccagcgaggagaagcaggagaagctgggcaccctgttcttcagcctggagtacaacttcgagagaaaggccttcgtggtgaacatcaaggaggccagaggcctgcccgccatggacgagcagagcatgaccagcgacccctacatcaagatgaccatcctgcccgagaagaagcacaaggtgaagaccagagtgctgagaaagaccctggaccccgccttcgacgagaccttcaccttctacggcatcccctacacccagatccaggagctggccctgcacttcaccatcctgagcttcgacagattcagcagagacgacatcatcggcgaggtgctgatccccctgagcggcatcgagctgagcgagggcaagatgctgatgaacagagagatcatcaagagaaacgtgagaaagagcagcggcagaggcgagctgctgatcagcctgtgctaccagagcaccaccaacaccctgaccgtggtggtgctgaaggccagacacctgcccaagagcgacgtgagcggcctgagcgacccctacgtgaaggtgaacctgtaccacgccaagaagagaatcagcaagaagaagacccacgtgaagaagtgcacccccaacgccgtgttcaacgagctgttcgtgttcgacatcccctgcgagggcctggaggacatcagcgtggagttcctggtgctggacagcgagagaggcagcagaaacgaggtgatcggccagctggtgctgggcgccgccgccgagggcaccggcggcgagcactggaaggagatctgcgactaccccagaagacagatcgccaagtggcacgtgctgtgcgacggctag

SEQ ID NO: 101482 - DNA, 693 bp, synthetic construct
  misc_feature 1..693: note = Description of Artificial Sequence: Synthetic coding sequence
  source 1..693: mol_type = other DNA
atggacctgctgagcgagaagaagcacaaggtgaagaccagagtgctgagaaagaccctggaccccgccttcgacgagaccttcaccttctacggcatcccctacacccagatccaggagctggccctgcacttcaccatcctgagcttcgacagattcagcagagacgacatcatcggcgaggtgctgatccccctgagcggcatcgagctgagcgagggcaagatgctgatgaacagagagatcatcaagagaaacgtgagaaagagcagcggcagaggcgagctgctgatcagcctgtgctaccagagcaccaccaacaccctgaccgtggtggtgctgaaggccagacacctgcccaagagcgacgtgagcggcctgagcgacccctacgtgaaggtgaacctgtaccacgccaagaagagaatcagcaagaagaagacccacgtgaagaagtgcacccccaacgccgtgttcaacgagctgttcgtgttcgacatcccctgcgagggcctggaggacatcagcgtggagttcctggtgctggacagcgagagaggcagcagaaacgaggtgatcggccagctggtgctgggcgccgccgccgagggcaccggcggcgagcactggaaggagatctgcgactaccccagaagacagatcgccaagtggcacgtgctgtgcgacggctag

SEQ ID NO: 101483 - DNA, 1476 bp, synthetic construct
  misc_feature 1..1476: note = Description of Artificial Sequence: Synthetic coding sequence
  source 1..1476: mol_type = other DNA
atgcccggcgccagagacgccctgtgccaccaggccctgcagctgctggccgagctgtgcgccagaggcgccctggagcacgacagctgccaggacttcatctaccacctgagagacagagccagacccagactgagagaccccgacatcagcgtgagcctgctgaccctggtggtgaccgcctgcggcctggccctgttcggcgtgagcctgttcgtgagctggaagctgtgctgggtgccctggagagagagaggcctgcccagcggcagcaaggacaacaaccaggagcccctgaactacatggacaccgagaccaacgagcaggagaacagcgaggacttcctggacccccccaccccctgccccgacagcagcatgaagatcagccacaccagccccgacatccccctgagcacccagaccggcatccaggagaactgcgcccacggcgtgagagtgcagagacaggtgaccgagcccaccagcagcgccagacacaacagcatcagaagacagctgaacctgagcaaccccgacttcaacatccagcagctgcagaagcaggagcagctgaccggcatcggcagaatcaagcccgagctgtacaagcagagaagcctggacaacgacgacggcagaagaagcaacagcaaggcctgcggcaagctgaacttcatcctgaagtacgactgcgacctggagcagctgatcgtgaagatccacaaggccgtgaacctgcccgccaaggacttcagcggcaccagcgacccctacgtgaagatctacctgctgcccgacagaaagaccaagcaccagaccaaggtgcacagaaagaccctgaaccccgtgttcgacgaggtgttcctgttccccgtgccctacaacgacctggaggccagaaagctgcacttcagcgtgtacgacttcgacagattcagcagacacgacctgatcggccaggtggtggtggaccacttcctggacctggccgacttccccagagagtgcatcctgtggaaggacatcgagtacgtgaccaacgacaacgtggacctgggcgagctgatgttcagcctgtgctacctgcccaccgccggcagactgaccatcaccatcatcaaggccagaaacctgaaggccatggacatcaccggcgccagcgacccctacgtgaaggtgagcctgatgtgcgacggcagaagactgaagaagagaaagaccagcaccaagagaaacaccctgaaccccgtgtacaacgaggccatcgtgttcgacgtgccccccgagaacatcgaccagatccacctgagcatcgccgtgatggactacgacagagtgggccacaacgagatcatcggcgtgtgccaggtgggcaacgaggccgagagactgggcagagaccactggagcgagatgctgagctaccccagaaagcccatcgcccactggcacagcctggtggagaagagatag

SEQ ID NO: 101484 - DNA, 960 bp, synthetic construct
  misc_feature 1..960: note = Description of Artificial Sequence: Synthetic coding sequence
  source 1..960: mol_type = other DNA
atgctggccaaggtggtggagggcgacctggccttcaagggcggcagagacatcagcgtgagcctgctgaccctggtggtgaccgcctgcggcctggccctgttcggcgtgagcctgttcgtgagctggaagctgtgctgggtgccctggagagagagaggcctgcccagcggcagcaaggacaacaaccaggagcccctgaactacatggacaccgagaccaacgagcaggagaacagcgaggacttcctggacccccccaccccctgccccgacagcagcatgaagatcagccacaccagccccgacatccccctgagcacccagaccggcatccaggagaactgcgcccacggcgtgagagtgcagagacaggtgaccgagcccaccagcagcgccagacacaacagcatcagaagacagctgaacctgagcaaccccgacttcaacatccagcagctgcagaagcaggagcagctgaccggcatcggcagaatcaagcccgagctgtacaagcagagaagcctggacaacgacgacggcagaagaagcaacagcaaggcctgcggcaagctgaacttcatcctgaagtacgactgcgacctggagcagctgatcgtgaagatccacaaggccgtgaacctgcccgccaaggacttcagcggcaccagcgacccctacgtgaagatctacctgctgcccgacagaaagaccaagcaccagaccaaggtgcacagaaagaccctgaaccccgtgttcgacgaggtgttcctgttccccgtgccctacaacgacctggaggccagaaagctgcacttcagcgtgtacgacttcgacagattcagcagacacgacctgatcggccaggtggtggtggaccacttcctggacctggccgacttccccagagagtgcatcctgtggaaggacatcgagtacgtgaccaacatcctgagctag

SEQ ID NO: 101485 - DNA, 1161 bp, synthetic construct
  misc_feature 1..1161: note = Description of Artificial Sequence: Synthetic coding sequence
  source 1..1161: mol_type = other DNA
atgttccccgagccccccacccccggcccccccagccccgacaccccccccgacagcagcagaatcagccacggccccgtgcccccctgggccctggccaccatcgtgctggtgagcggcctgctgatcttcagctgctgcttctgcctgtacagaaagagctgcagaagaagaaccggcaagaagagccaggcccaggcccaggtgcacctgcaggaggtgaagggcctgggccagagctacatcgacaaggtgcagcccgaggtggaggagctggagcccgcccccagcggccccggccagcaggtggccgacaagcacgagctgggcagactgcagtacagcctggactacgacttccagagcggccagctgctggtgggcatcctgcaggccatgggcctggccgccctggacctgggcggcagcagcgacccctacgtgagagtgtacctgctgcccgacaagagaagaagatacgagaccaaggtgcacagacagaccctgaacccccacttcggcgagaccttcgccttcaaggtgccctacgtggagctgggcggcagagtgctggtgatggccgtgtacgacttcgacagattcagcagaaacgacgccatcggcgaggtgagagtgcccatgagcagcgtggacctgggcagacccgtgcaggcctggagagagctgcaggccgcccccagagaggagcaggagaagctgggcgacatctgcttcagcctgagatacgtgcccaccgccggcaagctgaccgtgatcgtgctggaggccaagaacctgaagaagatggacgtgggcggcctgagcgacccctacgtgaaggtgcacctgctgcagggcggcaagaaggtgagaaagaagaagaccaccatcaagaagaacaccctgaacccctactacaacgaggccttcagcttcgaggtgccctgcgaccaggtgcagaaggtgcaggtggagctgaccgtgctggactacgacaagctgggcaagaacgaggccatcggcagagtggccgtgggcgccgccgccggcggcgccggcctgagacactgggccgacatgctggccaaccccagaagacccatcgcccagtggcacagcctgagaccccccgacagagtgagactgctgcccgccccctag

SEQ ID NO: 101486 - DNA, 1161 bp, synthetic construct; identical to SEQ ID NO: 101485
  misc_feature 1..1161: note = Description of Artificial Sequence: Synthetic coding sequence
  source 1..1161: mol_type = other DNA

SEQ ID NO: 101487 - DNA, 1149 bp, synthetic construct
  misc_feature 1..1149: note = Description of Artificial Sequence: Synthetic coding sequence
  source 1..1149: mol_type = other DNA
atgaccagaggcggctgccccgtgagcgccagactgttcgcccagagaccccacggcagctggagcagcctgctgtgcgtgggcctgaagggcagactgggctgggagtggggcaccagagtgctggagtgcctgtgcagaaaggacagcagaaccccccccccctgcagcagaagcccccagcccagaggcctgcacagacccaccagactgcccacccccgtggccagcgccaccgcccaggtgcagcccgaggtggaggagctggagcccgcccccagcggccccggccagcaggtggccgacaagcacgagctgggcagactgcagtacagcctggactacgacttccagagcggccagctgctggtgggcatcctgcaggccatgggcctggccgccctggacctgggcggcagcagcgacccctacgtgagagtgtacctgctgcccgacaagagaagaagatacgagaccaaggtgcacagacagaccctgaacccccacttcggcgagaccttcgccttcaaggtgccctacgtggagctgggcggcagagtgctggtgatggccgtgtacgacttcgacagattcagcagaaacgacgccatcggcgaggtgagagtgcccatgagcagcgtggacctgggcagacccgtgcaggcctggagagagctgcaggccgcccccagagaggaggagaagctgggcgacatctgcttcagcctgagatacgtgcccaccgccggcaagctgaccgtgatcgtgctggaggccaagaacctgaagaagatggacgtgggcggcctgagcgacccctacgtgaaggtgcacctgctgcagggcggcaagaaggtgagaaagaagaagaccaccatcaagaagaacaccctgaacccctactacaacgaggccttcagcttcgaggtgccctgcgaccaggtgcagaaggtgcaggtggagctgaccgtgctggactacgacaagctgggcaagaacgaggccatcggcagagtggccgtgggcgccgccgccggcggcgccggcctgagacactgggccgacatgctggccaaccccagaagacccatcgcccagtggcacagcctgagaccccccgacagagtgagactgctgcccgccccctag

SEQ ID NO: 101488 - DNA, 1533 bp, synthetic construct
  misc_feature 1..1533: note = Description of Artificial Sequence: Synthetic coding sequence
  source 1..1533: mol_type = other DNA
atgagcggcgtgtggggcgccggcggccccagatgccaggaggccctggccgtgctggccagcctgtgcagagccagacccccccccctgggcctggacgtggagacctgcagaagcttcgagctgcagccccccgagagaagccccagcgccgccggcgccggcaccagcgtgagcctgctggccgtggtggtgatcgtgtgcggcgtggccctggtggccgtgttcctgttcctgttctggaagctgtgctggatgccctggagaaacaaggaggccagcagccccagcagcgccaacccccccctggaggccctgcagagccccagcttcagaggcaacatggccgacaagctgaaggaccccagcaccctgggcttcctggaggccgccgtgaagatcagccacaccagccccgacatccccgccgaggtgcagatgagcgtgaaggagcacatcatgagacacaccagactgcagagacagaccaccgagcccgccagcagcaccagacacaccagcttcaagagacacctgcccagacagatgcacgtgagcagcgtggactacggcaacgagctgccccccgccgccgagcagcccaccagcatcggcagaatcaagcccgagctgtacaagcagaagagcgtggacggcgaggacgccaagagcgaggccaccaagagctgcggcaagatcaacttcagcctgagatacgactacgagaccgagaccctgatcgtgagaatcctgaaggccttcgacctgcccgccaaggacttctgcggcagcagcgacccctacgtgaagatctacctgctgcccgacagaaagtgcaagctgcagaccagagtgcacagaaagaccctgaaccccaccttcgacgagaacttccacttccccgtgccctacgaggagctggccgacagaaagctgcacctgagcgtgttcgacttcgacagattcagcagacacgacatgatcggcgaggtgatcctggacaacctgttcgaggccagcgacctgagcagagagaccagcatctggaaggacatccagtacgccaccagcgagagcgtggacctgggcgagatcatgttcagcctgtgctacctgcccaccgccggcagactgaccctgaccgtgatcaagtgcagaaacctgaaggccatggacatcaccggctacagcgacccctacgtgaaggtgagcctgctgtgcgacggcagaagactgaagaagaagaagaccaccatcaagaagaacaccctgaaccccgtgtacaacgaggccatcatcttcgacatcccccccgagaacatggaccaggtgagcctgctgatcagcgtgatggactacgacagagtgggccacaacgagatcatcggcgtgtgcagagtgggcatcaccgccgagggcctgggcagagaccactggaacgagatgctggcctaccccagaaagcccatcgcccactggcacagcctggtggaggtgaagaagagcttcaaggagggcaaccccagactgtag

SEQ ID NO: 101489 - DNA, 1278 bp, synthetic construct
  misc_feature 1..1278: note = Description of Artificial Sequence: Synthetic coding sequence
  source 1..1278: mol_type = other DNA
atgccctggagaaacaaggaggccagcagccccagcagcgccaacccccccctggaggccctgcagagccccagcttcagaggcaacatggccgacaagctgaaggaccccagcaccctgggcttcctggaggccgccgtgaagatcagccacaccagccccgacatccccgccgaggtgcagatgagcgtgaaggagcacatcatgagacacaccagactgcagagacagaccaccgagcccgccagcagcaccagacacaccagcttcaagagacacctgcccagacagatgcacgtgagcagcgtggactacggcaacgagctgccccccgccgccgagcagcccaccagcatcggcagaatcaagcccgagctgtacaagcagaagagcgtggacggcgaggacgccaagagcgaggccaccaagagctgcggcaagatcaacttcagcctgagatacgactacgagaccgagaccctgatcgtgagaatcctgaaggccttcgacctgcccgccaaggacttctgcggcagcagcgacccctacgtgaagatctacctgctgcccgacagaaagtgcaagctgcagaccagagtgcacagaaagaccctgaaccccaccttcgacgagaacttccacttccccgtgccctacgaggagctggccgacagaaagctgcacctgagcgtgttcgacttcgacagattcagcagacacgacatgatcggcgaggtgatcctggacaacctgttcgaggccagcgacctgagcagagagaccagcatctggaaggacatccagtacgccaccagcgagagcgtggacctgggcgagatcatgttcagcctgtgctacctgcccaccgccggcagactgaccctgaccgtgatcaagtgcagaaacctgaaggccatggacatcaccggctacagcgacccctacgtgaaggtgagcctgctgtgcgacggcagaagactgaagaagaagaagaccaccatcaagaagaacaccctgaaccccgtgtacaacgaggccatcatcttcgacatcccccccgagaacatggaccaggtgagcctgctgatcagcgtgatggactacgacagagtgggccacaacgagatcatcggcgtgtgcagagtgggcatcaccgccgagggcctgggcagagaccactggaacgagatgctggcctaccccagaaagcccatcgcccactggcacagcctggtggaggtgaagaagagcttcaaggagggcaaccccagactgtag

SEQ ID NO: 101490 - DNA, 1278 bp, synthetic construct; identical to SEQ ID NO: 101489
  misc_feature 1..1278: note = Description of Artificial Sequence: Synthetic coding sequence
  source 1..1278: mol_type = other DNA

SEQ ID NO: 101491 - DNA, 1533 bp, synthetic construct; identical to SEQ ID NO: 101488
  misc_feature 1..1533: note = Description of Artificial Sequence: Synthetic coding sequence
  source 1..1533: mol_type = other DNA

SEQ ID NO: 101492 - DNA, 288 bp, synthetic construct
  misc_feature 1..288: note = Description of Artificial Sequence: Synthetic coding sequence
  source 1..288: mol_type = other DNA
atgccctggagaaacaaggaggccagcagccccagcagcgccaacccccccctggaggccctgcagagccccagcttcagaggcaacatggccgacaagctgaaggaccccagcaccctgggcttcctggaggccgccgtgaagatcagccacaccagccccgacatccccgccgaggtgcagatgagcgtgaaggagcacatcatgagacacaccagactgcagagacagaccaccgagcccgccagcagcaccagacacaccagcttcaagagacacctgccctag

SEQ ID NO: 101493 - DNA, 261 bp, synthetic construct
  misc_feature 1..261: note = Description of Artificial Sequence: Synthetic coding sequence
  source 1..261: mol_type = other DNA
atgccctggagaaacaaggaggccagcagccccagcagcgccaacccccccctggaggccctgcagagccccagcttcagaggcaacatggccgacaagctgaaggaccccagcaccctgggcttcctggaggccgccgtgaagatcagccacaccagccccgacatccccgccgaggtgcagatgagcgtgaaggagcacatcatgagacacaccagactgcagagacagaccaccgagcccgccagcagcaccagatag

SEQ ID NO: 101494 - DNA, 1212 bp, synthetic construct
  misc_feature 1..1212: note = Description of Artificial Sequence: Synthetic coding sequence
  source 1..1212: mol_type = other DNA
atgtacagagaccccgaggccgccagccccggcgcccccagcagagacgtgctgctggtgagcgccatcatcaccgtgagcctgagcgtgaccgtggtgctgtgcggcctgtgccactggtgccagagaaagctgggcaagagatacaagaacagcctggagaccgtgggcacccccgacagcggcagaggcagaagcgagaagaaggccatcaagctgcccgccggcggcaaggccgtgaacaccgcccccgtgcccggccagaccccccacgacgagagcgacagaagaaccgagcccagaagcagcgtgagcgacctggtgaacagcctgaccagcgagatgctgatgctgagccccggcagcgaggaggacgaggcccacgagggctgcagcagagagaacctgggcagaatccagttcagcgtgggctacaacttccaggagagcaccctgaccgtgaagatcatgaaggcccaggagctgcccgccaaggacttcagcggcaccagcgaccccttcgtgaagatctacctgctgcccgacaagaagcacaagctggagaccaaggtgaagagaaagaacctgaacccccactggaacgagaccttcctgttcgagggcttcccctacgagaaggtggtgcagagaatcctgtacctgcaggtgctggactacgacagattcagcagaaacgaccccatcggcgaggtgagcatccccctgaacaaggtggacctgacccagatgcagaccttctggaaggacctgaagccctgcagcgacggcagcggcagcagaggcgagctgctgctgagcctgtgctacaaccccagcgccaacagcatcatcgtgaacatcatcaaggccagaaacctgaaggccatggacatcggcggcaccagcgacccctacgtgaaggtgtggctgatgtacaaggacaagagagtggagaagaagaagaccgtgaccatgaagagaaacctgaaccccatcttcaacgagagcttcgccttcgacatccccaccgagaagctgagagagaccaccatcatcatcaccgtgatggacaaggacaagctgagcagaaacgacgtgatcggcaagatctacctgagctggaagagcggccccggcgaggtgaagcactggaaggacatgatcgccagacccagacagcccgtggcccagtggcaccagctgaaggcctag

SEQ ID NO: 101495 - DNA, 1266 bp, synthetic construct
  misc_feature 1..1266: note = Description of Artificial Sequence: Synthetic coding sequence
  source 1..1266: mol_type = other DNA
atggccgtggacgtggccgagtaccacctgagcgtgatcaagagcccccccggctgggaggtgggcgtgtacgccgccggcgccctggccctgctgggcatcgccgccgtgagcctgtggaagctgtggaccagcggcagcttccccagccccagccccttccccaactacgactacagatacctgcagcagaagtacggcgagagctgcgccgaggccagagagaagagagtgcccgcctggaacgcccagagagccagcaccagaggcccccccagcagaaagggcagcctgagcatcgaggacaccttcgagagcatcagcgagctgggccccctggagctgatgggcagagagctggacctggccccctacggcaccctgagaaagagccagagcgccgacagcctgaacagcatcagcagcgtgagcaacaccttcggccaggacttcaccctgggccaggtggaggtgagcatggagtacgacaccgccagccacaccctgaacgtggccgtgatgcagggcaaggacctgctggagagagaggaggccagcttcgagagctgcttcatgagagtgagcctgctgcccgacgagcagatcgtgggcatcagcagaatccagagaaacgcctacagcatcttcttcgacgagaagttcagcatccccctggaccccaccgccctggaggagaagagcctgagattcagcgtgttcggcatcgacgaggacgagagaaacgtgagcaccggcgtggtggagctgaagctgagcgtgctggacctgcccctgcagcccttcagcggctggctgtacctgcaggaccagaacaaggccgccgacgccgtgggcgagatcctgctgagcctgagctacctgcccaccgccgagagactgaccgtggtggtggtgaaggccaagaacctgatctggaccaacgacaagaccaccgccgaccccttcgtgaaggtgtacctgctgcaggacggcagaaagatgagcaagaagaagaccgccgtgaagagagacgaccccaaccccgtgttcaacgaggccatgatcttcagcgtgcccgccatcgtgctgcaggacctgagcctgagagtgaccgtggccgagagcagcagcgacggcagaggcgacaacgtgggccacgtgatcatcggccccagcgccagcggcatgggcaccacccactggaaccagatgctggccaccctgagaagacccgtgagcatgtggcacgccgtgagaagaaactag

SEQ ID NO: 101496 - DNA, 1266 bp, synthetic construct; identical to SEQ ID NO: 101495
  misc_feature 1..1266: note = Description of Artificial Sequence: Synthetic coding sequence
  source 1..1266: mol_type = other DNA

SEQ ID NO: 101497 - DNA, 1266 bp, synthetic construct; identical to SEQ ID NO: 101495
  misc_feature 1..1266: note = Description of Artificial Sequence: Synthetic coding sequence
  source 1..1266: mol_type = other DNA

SEQ ID NO: 101498 - DNA, 1281 bp, synthetic construct
  misc_feature 1..1281: note = Description of Artificial Sequence: Synthetic coding sequence
  source 1..1281: mol_type = other DNA
atggtgctgagcgtgcccgtgatcgccctgggcgccaccctgggcaccgccaccagcatcctggccctgtgcggcgtgacctgcctgtgcagacacatgcaccccaagaagggcctgctgcccagagaccaggaccccgacctggagaaggccaagcccagcctgctgggcagcgcccagcagttcaacgtgaagaagagcaccgagcccgtgcagcccagagccctgctgaagttccccgacatctacggccccagacccgccgtgaccgcccccgaggtgatcaactacgccgactacagcctgagaagcaccgaggagcccaccgcccccgccagcccccagccccccaacgacagcagactgaagagacaggtgaccgaggagctgttcatcctgccccagaacggcgtggtggaggacgtgtgcgtgatggagacctggaaccccgagaaggccgccagctggaaccaggcccccaagctgcactactgcctggactacgactgccagaaggccgagctgttcgtgaccagactggaggccgtgaccagcaaccacgacggcggctgcgactgctacgtgcagggcagcgtggccaacagaaccggcagcgtggaggcccagaccgccctgaagaagagacagctgcacaccacctgggaggagggcctggtgctgcccctggccgaggaggagctgcccaccgccaccctgaccctgaccctgagaacctgcgacagattcagcagacacagcgtggccggcgagctgagactgggcctggacggcaccagcgtgcccctgggcgccgcccagtggggcgagctgaagaccagcgccaaggagcccagcgccggcgccggcgaggtgctgctgagcatcagctacctgcccgccgccaacagactgctggtggtgctgatcaaggccaagaacctgcacagcaaccagagcaaggagctgctgggcaaggacgtgagcgtgaaggtgaccctgaagcaccaggccagaaagctgaagaagaagcagaccaagagagccaagcacaagatcaaccccgtgtggaacgagatgatcatgttcgagctgcccgacgacctgctgcaggccagcagcgtggagctggaggtgctgggccaggacgacagcggccagagctgcgccctgggccactgcagcctgggcctgcacaccagcggcagcgagagaagccactgggaggagatgctgaagaaccccagaagacagatcgccatgtggcaccagctgcacctgtag

SEQ ID NO: 101499 - DNA, 1554 bp, synthetic construct
  misc_feature 1..1554: note = Description of Artificial Sequence: Synthetic coding sequence
  source 1..1554: mol_type = other DNA
atgctgctgctgttcctgtacatcaacaagaagttctgcttcgagaacgtgggcggcttccccgacctgggcagcgagtacagcaccagaaagaacagccaggacaagatctacaacagctacatggacaaggacgagcacggcagcagcagcgagagcgaggacgaggccctgggcaagtaccacgaggccctgagcagaacccacaacagcagactgcccctggccgacagcagacagagaaactacgcctgggagaccagacagaagtacagccccctgagcgccgagtacgacggctacagcagcgaggccagcatcgacgagggcaactgcatccagagaatgagaagaaccccccccctggacgagctgcagccccccccctaccaggacgacagcggcagcccccacctgagctgcacccccagcgagatcggcgacagcaagtgcgagttcagccactgcagcaacagccccagatgcagctacaacaagtgccccagcgagggcagcaccggccacgagatcgagagcttccacaacaagggctacgaggaggacgtgcccagcgacagcaccgccgtgctgagccccgaggacatgagcgcccagggcagcagcagccagctgcccaagcccttcgaccccgagcccgaggccaagtacggcaccctggacgtgaccttcgactacgacagccaggagcagaagctgctggtgaccgtgaccgccgtgaccgacatccccacctacaacagaaccggcggcaacagctggcaggtgcacctggtgctgctgcccatcaagaagcagagagccaagaccagcatccagagaggcccctgccccgtgttcaccgagaccttcaagttcaaccacgtggagagcgagatgatcggcaactacgccgtgagattcagactgtacggcgtgcacagaatgaagaaggagaagatcgtgggcgagaagatcttctacctgaccaagctgaacctgcagggcaagatgagcctgcccgtgatcctggagcccagctacaaccacagcggctgcgacagccagatgagcgtgagcgagatgagctgcagcgagagcaccagcagctgccagagcctggagcacggcagcgtgcccgagatcctgatcggcctgctgtacaacgccaccaccggcagactgagcgccgaggtgatcaagggcagccacttcaagaacctggccgccaacagaccccccaacacctacgtgaagctgaccctgctgaacagcatgggccaggagatgagcaagtgcaagaccagcatcagaagaggccagcccaaccccgtgtacaaggagaccttcgtgttccaggtggccctgttccagctgagcgacgtgaccctgatcctgagcgtgtacaacaagagaagcatgaagagaaaggagatgatcggctggatcagcctgggcctgaacagcagcggcgaggaggagctgaaccactggaccgagatgaaggagagcaagggccagcaggtgtgcagatggcacgccctgctggagagctag

SEQ ID NO: 101500 - DNA, 1725 bp, synthetic construct
  misc_feature 1..1725: note = Description of Artificial Sequence: Synthetic coding sequence
  source 1..1725: mol_type = other DNA
atggccatcgagggcggcgagagaacctgcggcgtgcacgagctgatctgcatcagaaaggtgagccccgaggccgtgggcttcctgagcgccgtgggcgtgttcatcatcctgatgctgctgctgttcctgtacatcaacaagaagttctgcttcgagaacgtgggcggcttccccgacctgggcagcgagtacagcaccagaaagaacagccaggacaagatctacaacagctacatggacaaggacgagcacggcagcagcagcgagagcgaggacgaggccctgggcaagtaccacgaggccctgagcagaacccacaacagcagactgcccctggccgacagcagacagagaaactacgcctgggagaccagacagaagtacagccccctgagcgccgagtacgacggctacagcagcgaggccagcatcgacgagggcaactgcatccagagaatgagaagaaccccccccctggacgagctgcagccccccccctaccaggacgacagcggcagcccccacctgagctgcacccccagcgagatcggcgacagcaagtgcgagttcagccactgcagcaacagccccagatgcagctacaacaagtgccccagcgagggcagcaccggccacgagatcgagagcttccacaacaagggctacgaggaggacgtgcccagcgacagcaccgccgtgctgagccccgaggacatgagcgcccagggcagcagcagccagctgcccaagcccttcgaccccgagcccgaggccaagtacggcaccctggacgtgaccttcgactacgacagccaggagcagaagctgctggtgaccgtgaccgccgtgaccgacatccccacctacaacagaaccggcggcaacagctggcaggtgcacctggtgctgctgcccatcaagaagcagagagccaagaccagcatccagagaggcccctgccccgtgttcaccgagaccttcaagttcaaccacgtggagagcgagatgatcggcaactacgccgtgagattcagactgtacggcgtgcacagaatgaagaaggagaagatcgtgggcgagaagatcttctacctgaccaagctgaacctgcagggcaagatgagcctgcccgtgatcctggagcccagctacaaccacagcggctgcgacagccagatgagcgtgagcgagatgagctgcagcgagagcaccagcagctgccagagcctggagcacggcagcgtgcccgagatcctgatcggcctgctgtacaacgccaccaccggcagactgagcgccgaggtgatcaagggcagccacttcaagaacctggccgccaacagaccccccaacggcctgttctgctgcctgaagcacctgatcggcggccaggtgtacatcatcagagacacctacgtgaagctgaccctgctgaacagcatgggccaggagatgagcaagtgcaagaccagcatcagaagaggccagcccaaccccgtgtacaaggagaccttcgtgttccaggtggccctgttccagctgagcgacgtgaccctgatcctgagcgtgtacaacaagagaagcatgaagagaaaggagatgatcggctggatcagcctgggcctgaacagcagcggcgaggaggagctgaaccactggaccgagatgaaggagagcaagggccagcaggtgtgcagatggcacgccctgctggagagctag

SEQ ID NO: 101501 - DNA, 1377 bp, synthetic construct
  misc_feature 1..1377: note = Description of Artificial Sequence: Synthetic coding sequence
  source 1..1377: mol_type = other DNA
atggccatcgagggcggcgagagaacctgcggcgtgcacgagctgatctgcatcagaaaggtgagccccgaggccgtgggcttcctgagcgccgtgggcgtgttcatcatcctgatgctgctgctgttcctgtacatcaacaagaagttctgcttcgagaacgtgggcggcttccccgacctgggcagcgagtacagcaccagaaagaacagccaggacaagatctacaacagctacatggacaaggacgagcacggcagcagcagcgagagcgaggacgaggccctgggcaagtaccacgaggccctgagcagaacccacaacagcagactgcccctggccgacagcagacagagaaactacgcctgggagaccagacagaagtacagccccctgagcgccgagtacgacggctacagcagcgaggccagcatcgacgagggcaactgcatccagagaatgagaagaaccccccccctggacgagctgcagccccccccctaccaggacgacagcggcagcccccacctgagctgcacccccagcgagatcggcgacagcaagtgcgagttcagccactgcagcaacagccccagatgcagctacaacaagtgccccagcgagggcagcaccggccacgagatcgagagcttccacaacaagggctacgaggaggacgtgcccagcgacagcaccgccgtgctgagccccgaggacatgagcgcccagggcagcagcagccagctgcccaagcccttcgaccccgagcccgaggccaagtacggcaccctggacgtgaccttcgactacgacagccaggagcagaagctgctggtgaccgtgaccgccgtgaccgacatccccacctacaacagaaccggcggcaacagctggcaggtgcacctggtgctgctgcccatcaagaagcagagagccaagaccagcatccagagaggcccctgccccgtgttcaccgagaccttcaagttcaaccacgtggagagcgagatgatcggcaactacgccgtgagattcagactgtacggcgtgcacagaatgaagaaggagaagatcgtgggcgagaagatcttctacctgaccaagctgaacctgcagggcaagatgagcctgcccgtgatcctggagcccagctacaaccacagcggctgcgacagccagatgagcgtgagcgagatgagctgcagcgagagcaccagcagctgccagagcctggagcacggcagcgtgcccgagatcctgatcggcctgctgtacaacgccaccaccggcagactgagcgccgaggtgatcaagggcagccacttcaagaacctggccgccaacagaccccccaagatggactgcagcgtggtgtag

SEQ ID NO: 101502 - DNA, 1860 bp, synthetic construct
  misc_feature 1..1860: note = Description of Artificial Sequence: Synthetic coding sequence
  source 1..1860: mol_type = other DNA
atggccagcgccagctggagactgaaggtggagagagagcccgtggagtacatgaacctgagcgtgctggagaagatcggctacttcagcgtggccagactggagtacagcggcaccatcctggcccactgcaacttcagactgctgggcagcaacgacagcagcgccagcgccagccaggtgaccggcaccaccgtgagccccgaggccgtgggcttcctgagcgccgtgggcgtgttcatcatcctgatgctgctgctgttcctgtacatcaacaagaagttctgcttcgagaacgtgggcggcttccccgacctgggcagcgagtacagcaccagaaagaacagccaggacaagatctacaacagctacatggacaaggacgagcacggcagcagcagcgagagcgaggacgaggccctgggcaagtaccacgaggccctgagcagaacccacaacagcagactgcccctggccgacagcagacagagaaactacgcctgggagaccagacagaagtacagccccctgagcgccgagtacgacggctacagcagcgaggccagcatcgacgagggcaactgcatccagagaatgagaagaaccccccccctggacgagctgcagccccccccctaccaggacgacagcggcagcccccacctgagctgcacccccagcgagatcggcgacagcaagtgcgagttcagccactgcagcaacagccccagatgcagctacaacaagtgccccagcgagggcagcaccggccacgagatcgagagcttccacaacaagggctacgaggaggacgtgcccagcgacagcaccgccgtgctgagccccgaggacatgagcgcccagggcagcagcagccagctgcccaagcccttcgaccccgagcccgaggccaagtacggcaccctggacgtgaccttcgactacgacagccaggagcagaagctgctggtgaccgtgaccgccgtgaccgacatccccacctacaacagaaccggcggcaacagctggcaggtgcacctggtgctgctgcccatcaagaagcagagagccaagaccagcatccagagaggcccctgccccgtgttcaccgagaccttcaagttcaaccacgtggagagcgagatgatcggcaactacgccgtgagattcagactgtacggcgtgcacagaatgaagaaggagaagatcgtgggcgagaagatcttctacctgaccaagctgaacctgcagggcaagatgagcctgcccgtgatcctggagcccagctacaaccacagcggctgcgacagccagatgagcgtgagcgagatgagctgcagcgagagcaccagcagctgccagagcctggagcacggcagcgtgcccgagatcctgatcggcctgctgtacaacgccaccaccggcagactgagcgccgaggtgatcaagggcagccacttcaagaacctggccgccaacagaccccccaacggcctgttctgctgcctgaagcacctgatcggcggccaggtgtacatcatcagagacacctacgtgaagctgaccctgctgaacagcatgggccaggagatgagcaagtgcaagaccagcatcagaagaggccagcccaaccccgtgtacaaggagaccttcgtgttccaggtggccctgttccagctgagcgacgtgaccctgatcctgagcgtgtacaacaagagaagcatgaagagaaaggagatgatcggctggatcagcctgggcctgaacagcagcggcgaggaggagctgaaccactggaccgagatgaaggagagcaagggccagcaggtgtgcagatggcacgccctgctggagagctag

SEQ ID NO: 101503 - DNA, 1668 bp, synthetic construct
  misc_feature 1..1668: note = Description of Artificial Sequence: Synthetic coding sequence
  source 1..1668: mol_type = other DNA
atggccatcgagggcggcgagagaacctgcggcgtgcacgagctgatctgcatcagaaaggtgagccccgaggccgtgggcttcctgagcgccgtgggcgtgttcatcatcctgatgctgctgctgttcctgtacatcaacaagaagttctgcttcgagaacgtgggcggcttccccgacctgggcagcgagtacagcaccagaaagaacagccaggacaagatctacaacagctacatggacaaggacgagcacggcagcagcagcgagagcgaggacgaggccctgggcaagtaccacgaggccctgagcagaacccacaacagcagactgcccctggccgacagcagacagagaaactacgcctgggagaccagacagaagtacagccccctgagcgccgagtacgacggctacagcagcgaggccagcatcgacgagggcaactgcatccagagaatgagaagaaccccccccctggacgagctgcagccccccccctaccaggacgacagcggcagcccccacctgagctgcacccccagcgagatcggcgacagcaagtgcgagttcagccactgcagcaacagccccagatgcagctacaacaagtgccccagcgagggcagcaccggccacgagatcgagagcttccacaacaagggctacgaggaggacgtgcccagcgacagcaccgccgtgctgagccccgaggacatgagcgcccagggcagcagcagccagctgcccaagcccttcgaccccgagcccgaggccaagtacggcaccctggacgtgaccttcgactacgacagccaggagcagaagctgctggtgaccgtgaccgccgtgaccgacatccccacctacaacagaaccggcggcaacagctggcaggtgcacctggtgctgctgcccatcaagaagcagagagccaagaccagcatccagagaggcccctgccccgtgttcaccgagaccttcaagttcaaccacgtggagagcgagatgatcggcaactacgccgtgagattcagactgtacggcgtgcacagaatgaagaaggagaagatcgtgggcgagaagatcttctacctgaccaagctgaacctgcagggcaagatgagcctgcccgtgatcctggagcccagctacaaccacagcggctgcgacagccagatgagcgtgagcgagatgagctgcagcgagagcaccagcagctgccagagcctggagcacggcagcgtgcccgagatcctgatcggcctgctgtacaacgccaccaccggcagactgagcgccgaggtgatcaagggcagccacttcaagaacctggccgccaacagaccccccaacacctacgtgaagctgaccctgctgaacagcatgggccaggagatgagcaagtgcaagaccagcatcagaagaggccagcccaaccccgtgtacaaggagaccttcgtgttccaggtggccctgttccagctgagcgacgtgaccctgatcctgagcgtgtacaacaagagaagcatgaagagaaaggagatgatcggctggatcagcctgggcctgaacagcagcggcgaggaggagctgaaccactggaccgagatgaaggagagcaagggccagcaggtgtgcagatggcacgccctgctggagagctag

SEQ ID NO: 101504 - DNA, 1746 bp, synthetic construct
  misc_feature 1..1746: note = Description of Artificial Sequence: Synthetic coding sequence
  source 1..1746: mol_type = other DNA
atggccatcgagggcggcgagagaacctgcggcgtgcacgagctgatctgcatcagaaaggtgagccccgaggccgtgggcttcctgagcgccgtgggcgtgttcatcatcctgatgctgctgctgttcctgtacatcaacaagaagttctgcttcgagaacgtgggcggcttccccgacctgggcagcgagtacagcaccagaaagaacagccaggacaagatctacaacagctacatggacaaggacgagcacggcagcagcagcgagagcgaggacgaggccctgggcaagtaccacgaggccctgagcagaacccacaacagcagactgcccctggccgacagcagacagagaaactacgcctgggagaccagacagaagtacagccccctgagcgccgagtacgacggctacagcagcgaggccagcatcgacgagggcaactgcatccagagaatgagaagaaccccccccctggacgagctgcagccccccccctaccaggacgacagcggcagcccccacctgagctgcacccccagcgagatcggcgacagcaagtgcgagttcagccactgcagcaacagccccagatgcagctacaacaagtgccccagcgagggcagcaccggccacgagatcgagagcttccacaacaagggctacgaggaggacgtgcccagcgacagcaccgccgtgctgagccccgaggacatgagcgcccagggcagcagcagccagctgcccaagcccttcgaccccgagcccgaggccaagtacggcaccctggacgtgaccttcgactacgacagccaggagcagaagctgctggtgaccgtgaccgccgtgaccgacatccccacctacaacagaaccggcggcaacagctggcaggtgcacctggtgctgctgcccatcaagaagcagagagccaagaccagcatccagagaggcccctgccccgtgttcaccgagaccttcaagttcaaccacgtggagagcgagatgatcggcaactacgccgtgagattcagactgtacggcgtgcacagaatgaagaaggagaagatcgtgggcgagaagatcttctacctgaccaagctgaacctgcagggcaagatgagcctgcccgtgatcctggagcccagctacaaccacagcggctgcgacagccagatgagcgtgagcgagatgagctgcagcgagagcaccagcagctgccagagcctggagcacggcagcgtgcccgagatcctgatcggcctgctgtacaacgccaccaccggcagactgagcgccgaggtgatcaagggcagccacttcaagaacctggccgccaacagaccccccaccttccaccccctgctgagcgacggcctgttctgctgcctgaagcacctgatcggcggccaggtgtacatcatcagagacacctacgtgaagctgaccctgctgaacagcatgggccaggagatgagcaagtgcaagaccagcatcagaagaggccagcccaaccccgtgtacaaggagaccttcgtgttccaggtggccctgttccagctgagcgacgtgaccctgatcctgagcgtgtacaacaagagaagcatgaagagaaaggagatgatcggctggatcagcctgggcctgaacagcagcggcgaggaggagctgaaccactggaccgagatgaaggagagcaagggccagcaggtgtgcagatggcacgccctgctggagagctag

SEQ ID NO: 101505 - DNA, 1554 bp, synthetic construct; identical to SEQ ID NO: 101499
  misc_feature 1..1554: note = Description of Artificial Sequence: Synthetic coding sequence
  source 1..1554: mol_type = other DNA

SEQ ID NO: 101506 - DNA, 1266 bp, synthetic construct
  misc_feature 1..1266: note = Description of Artificial Sequence: Synthetic coding sequence
  source 1..1266: mol_type = other DNA
atggccgagcagctggccctggtgatcggcggcaccatcggcggcctgctgctgctgctgctgatcggcgccagctgctgcctgtggagaagattctgcgccaccctgacctacgaggagctgcccggcacccccgccatggccaccaccgccgccagcagcggccagagagacagaccctgccagccccacgccagaacccagctgagcagaccccccgccgtgcccttcgtggtgccccccaccctgcagggcagagactgggtgcccctgcacagcggcgagtgggccgacgccccctgggacccctgccccgccagcgagctgctgccccacaccagcagcggcggcctgggcgacgcctgcatggtgggcgccatcaaccccgagctgtacaagttccccgaggacaagagcgagaccgacttccccgacggctgcctgggcagactgtggttcagcgtggagtacgagcaggaggccgagagactgctggtgggcctgatcaaggcccagcacctgcaggcccccagcgagacctgcagccccctggtgaagctgtacctgctgcccgacgagagaagattcctgcagagcaagaccaagagaaagaccagcaacccccagttcgacgagcacttcatcttccaggtgagcagcaagaccatcacccagagagtgctgaagttcagcgtgtaccacgtggacagacagagaaagcaccagctgctgggccaggtgctgttccccctgaagaacgagaccctggtgggcgactgcagaagagtgatctggagagacctggaggccgagagcctggagccccccagcgagttcggcgacctgcagttctgcctgagctacaacgactacctgagcagactgaccgtggtggtgctgagagccaagggcctgagactgcaggaggacagaggcatcgtgagcgtgttcgtgaaggtgagcctgatgaaccacaacaagttcgtgaagtgcaagaagaccagcgccgtgctgggcagcatcaaccccgtgtacaacgagaccttcagcttcaaggccgacgccaccgagctggacaccgccagcctgagcctgaccgtggtgcagaacatggagggcgacaagagccagcagctgggcagagtggtggtgggcccctacatgtacaccagaggcagagagctggagcactgggacgagatgctgagcaagcccaaggagctggtgaagagatggcacgccctgtgcagaaccaccgagccctag

SEQ ID NO: 101507 - DNA, 1425 bp, synthetic construct
  misc_feature 1..1425: note = Description of Artificial Sequence: Synthetic coding sequence
  source 1..1425: mol_type = other DNA
atgggcgtggtgctgagcccccaccccgcccccagcagaagagagcccctggcccccctggcccccggcaccagacccggctggagccccgccgtgagcggcagcagcagaagcgccctgagacccagcaccgccggccccggccccggccccggcaccggctggggcggcaccgccgccagcggcagatgggtgcccgcccccgccgtgcactgcgccgcccccagagccgccgccggccaccagcagcaccacggcccccccctgtgcagccccgacggcgcccccagaagattcaagagaagacccggcagccccgcccccgccgcccagaccggcgagaccagcctgagagagcagccccacggcggcccccccgccgtgcccttcgtggtgccccccaccctgcagggcagagactgggtgcccctgcacagcggcgagtgggccgacgccccctgggacccctgccccgccagcgagctgctgccccacaccagcagcggcggcctgggcgacgcctgcatggtgggcgccatcaaccccgagctgtacaagttccccgaggacaagagcgagaccgacttccccgacggctgcctgggcagactgtggttcagcgtggagtacgagcaggaggccgagagactgctggtgggcctgatcaaggcccagcacctgcaggcccccagcgagacctgcagccccctggtgaagctgtacctgctgcccgacgagagaagattcctgcagagcaagaccaagagaaagaccagcaacccccagttcgacgagcacttcatcttccaggtgagcagcaagaccatcacccagagagtgctgaagttcagcgtgtaccacgtggacagacagagaaagcaccagctgctgggccaggtgctgttccccctgaagaacgagaccctggtgggcgactgcagaagagtgatctggagagacctggaggccgagagcctggagccccccagcgagttcggcgacctgcagttctgcctgagctacaacgactacctgagcagactgaccgtggtggtgctgagagccaagggcctgagactgcaggaggacagaggcatcgtgagcgtgttcgtgaaggtgagcctgatgaaccacaacaagttcgtgaagtgcaagaagaccagcgccgtgctgggcagcatcaaccccgtgtacaacgagaccttcagcttcaaggccgacgccaccgagctggacaccgccagcctgagcctgaccgtggtgcagaacatggagggcgacaagagccagcagctgggcagagtggtggtgggcccctacatgtacaccagaggcagagagctggagcactgggacgagatgctgagcaagcccaaggagctggtgaagagatggcacgccctgtgcagaaccaccgagccctag

SEQ ID NO: 101508 - DNA, 1173 bp, synthetic construct
  misc_feature 1..1173: note = Description of Artificial Sequence: Synthetic coding sequence
  source 1..1173: mol_type = other DNA
atggccgagcagctggccctggtgatcggcggcaccatcggcggcctgctgctgctgctgctgatcggcgccagctgctgcctgtggagaagattctgcgccaccctgacctacgaggagctgcccggcacccccgccatggccaccaccgccgccagcagcggccagagagacagaccctgccagccccacgccagaacccagctgagcagaccccccgccgtgcccttcgtggtgccccccaccctgcagggcagagactgggtgcccctgcacagcggcgagtgggccgacgccccctgggacccctgccccgccagcgagctgctgccccacaccagcagcggcggcctgggcgacgcctgcatggtgggcgccatcaaccccgagctgtacaagttccccgaggacaagagcgagaccgacttccccgacggctgcctgggcagactgtggttcagcgtggagtacgagcaggaggccgagagactgctggtgggcctgatcaaggcccagcacctgcaggcccccagcgagacctgcagccccctggtgaagctgtacctgctgcccgacgagagaagattcctgcagagcaagaccaagagaaagaccagcaacccccagttcgacgagcacttcatcttccaggtgagcagcaagaccatcacccagagagtgctgaagttcagcgtgtaccacgtggacagacagagaaagcaccagctgctgggccaggtgctgttccccctgaagaacgagaccctggtgggcgactgcagaagagtgatctggagagacctggaggccgagagcctggagccccccagcgagttcggcgacctgcagttctgcctgagctacaacgactacctgagcagactgaccgtggtggtgctgagagccaagggcctgagactgcaggaggacagaggcatcgtgagcgtgttcgtgaaggtgagcctgatgaaccacaacaagttcgtgaagtgcaagaagaccagcgccgtgctgggcagcatcaaccccgtgtacaacgagaccttcagcttcaaggccgacgccaccgagctggacaccgccagcctgagcctgaccgtggtgcagaacatggagggcgacaagcaggccaccaccgtggagctgttcctgttccacctgaccagcggctag

SEQ ID NO: 101509 - DNA, 543 bp, synthetic construct
  misc_feature 1..543: note = Description of Artificial Sequence: Synthetic coding sequence
  source 1..543: mol_type = other DNA
gacgagcacttcatcttccaggtgagcagcaagaccatcacccagagagtgctgaagttcagcgtgtaccacgtggacagacagagaaagcaccagctgctgggccaggtgctgttccccctgaagaacgagaccctggtgggcgactgcagaagagtgatctggagagacctggaggccgagagcctggagccccccagcgagttcggcgacctgcagttctgcctgagctacaacgactacctgagcagactgaccgtggtggtgctgagagccaagggcctgagactgcaggaggacagaggcatcgtgagcgtgttcgtgaaggtgagcctgatgaaccacaacaagttcgtgaagtgcaagaagaccagcgccgtgctgggcagcatcaaccccgtgtacaacgagaccttcagcttcaaggccgacgccaccgagctggacaccgccagcctgagcctgaccgtggtgcagaacatggagggcgacaagcaggccaccaccgtggagctgttcctgttccacctgaccagcggctag

SEQ ID NO: 101510 - DNA, 783 bp, synthetic construct
  misc_feature 1..783: note = Description of Artificial Sequence: Synthetic coding sequence
  source 1..783: mol_type = other DNA
atggtgggcgccatcaaccccgagctgtacaagttccccgaggacaagagcgagacctgcagccccctggtgaagctgtacctgctgcccgacgagagaagattcctgcagagcaagaccaagagaaagaccagcaacccccagttcgacgagcacttcatcttccaggtgagcagcaagaccatcacccagagagtgctgaagttcagcgtgtaccacgtggacagacagagaaagcaccagctgctgggccaggtgctgttccccctgaagaacgagaccctggtgggcgactgcagaagagtgatctggagagacctggaggccgagagcctggagccccccagcgagttcggcgacctgcagttctgcctgagctacaacgactacctgagcagactgaccgtggtggtgctgagagccaagggcctgagactgcaggaggacagaggcatcgtgagcgtgttcgtgaaggtgagcctgatgaaccacaacaagttcgtgaagtgcaagaagaccagcgccgtgctgggcagcatcaaccccgtgtacaacgagaccttcagcttcaaggccgacgccaccgagctggacaccgccagcctgagcctgaccgtggtgcagaacatggagggcgacaagagccagcagctgggcagagtggtggtgggcccctacatgtacaccagaggcagagagctggagcactgggacgagatgctgagcaagcccaaggagctggtgaagagatggcacgccctgtgcagaaccaccgagccctag

SEQ ID NO: 101511 - DNA, 1047 bp, synthetic construct
  misc_feature 1..1047: note = Description of Artificial Sequence: Synthetic coding sequence
  source 1..1047: mol_type = other DNA
atggccgagcagctggccctggtgatcggcggcaccatcggcggcctgctgctgctgctgctgatcggcgccagctgctgcctgtggagaagattctgcgccaccctgacctacgaggagctgcccggcacccccgccatggccaccaccgccgccagcagcggccagagagacagaccctgccagccccacgccagaacccagctgagcagaccccccgccgtgcccttcgtggtgccccccaccctgcagggcagagactgggtgcccctgcacagcggcgagtgggccgacgccccctgggacccctgccccgccagcgagctgctgccccacaccagcagcggcggcctgggcgacgcctgcatggtgggcgccatcaaccccgagctgtacaagttccccgaggacaagagcgagaccgacttccccgacggctgcctgggcagactgtggttcagcgtggagtacgagcaggaggccgagagactgctggtgggcctgatcaaggcccagcacctgcaggcccccagcgagacctgcagccccctggtgaagctgtacctgctgcccgacgagagaagattcctgcagagcaagaccaagagaaagaccagcaacccccagttcgacgagcacttcatcttccaggtgagcagcaagaccatcacccagagagtgctgaagttcagcgtgtaccacgtggacagacagagaaagcaccagctgctgggccaggtgctgttccccctgaagaacgagaccctggtgggcgactgcagaagagtgatctggagagacctggaggccgagagcctggagccccccagcgagttcggcgacctgcagttctgcctgagctacaacgactacctgagcagactgaccgtggtggtgctgagagccaagggcctgagactgcaggaggacagaggcatcgtgagcgtgttcgtgaaggtgagcctgatgaaccacaacaagttcgccaagtgcaagcccggccccgacctgggcgaggagagcagaggcagcctgaacctgaagtag

SEQ ID NO: 101512 - DNA, 1173 bp, synthetic construct; identical to SEQ ID NO: 101508
  misc_feature 1..1173: note = Description of Artificial Sequence: Synthetic coding sequence
  source 1..1173: mol_type = other DNA

SEQ ID NO: 101513 - DNA, 1152 bp, synthetic construct
  misc_feature 1..1152: note = Description of Artificial Sequence: Synthetic coding sequence
  source 1..1152: mol_type = other DNA
atggtgctggccatggccagccaggacgtgcagaacttcttccagcccttcagcagctggatcagcagagtgtacgaggccctgcagcaggccggcgacatgctgagcgccagcctggtgaacatcagcaagcaggacagcaagctgagcgacaagctggaccaggacctggacaacatccagatccaggagacctacttcgaggacgaggagcaggacaacgactggagccaggaggacgccaacagcctgttcctggaggtggaccacttcagctgctgcaacagcgacctgcaggacagcgcccagaacagcagccccagcctgagccagcacgccaaggacagctgcagcaccatgagccagtggcccaactgggccagcgacgacagaaagctgccccacgtgctgagcagcatcgccgaggaggagcaccacctggagaagcagagaagcggcctgcagcacggcttcgacagccagctgcccggcaccctggagaccgtgaacggcaagaagcaggtgaacagcttcggcgacgacgaggagctgagcaccagcagcgacagcgacgaggaggtgatcaagcagttcgagatcagcgtgagcagaagccagagcttcagaagcgtgaccagcgagaagggcaagcagaccggcctggagcagaagcccaagttcagcagaagcctgctgacccacggcgaggacggcaccgaggtgagcgcctgcgaggacctggacggcgccagccagagaagatacagcgagaacctgagctacggcgaggacgaccacatccccgcccacagccagagcccctgcgagagaggcgacgccaagcaccacggcaccagccaccaggagagcagcgtggtgcagagcctgagaagacagagcaccgagggcagcctggagatggagaccgccttcaacagcagaggcttcgaggacagctacgccaccgacagcagcagcatgtggagccccgaggccaacctgaacctgaagagaaagggctacctgctggacgtgtactgcctgagcagccccctgctgttcaccaccagcctgcacagaagaaacagaaccggccccatctgcagatgccaccccggcagccagagccccagccagagcgtggtgacctag

SEQ ID NO: 101514 - DNA, 1938 bp, synthetic construct
  misc_feature 1..1938: note = Description of Artificial Sequence: Synthetic coding sequence
  source 1..1938: mol_type = other DNA
atggtgctggccatggccagccaggacgtgcagaacttcttccagcccttcagcagctggatcagcagagtgtacgaggccctgcagcaggccggcgacatgctgagcgccagcctggtgaacatcagcaagcaggacagcaagctgagcgacaagctggaccaggacctggacaacatccagatccaggagacctacttcgaggacgaggagcaggacaacgactggagccaggaggacgccaacagcctgttcctggaggtggaccacttcagctgctgcaacagcgacctgcaggacagcgcccagaacagcagccccagcctgagccagcacgccaaggacagctgcagcaccatgagccagtggcccaactgggccagcgacgacagaaagctgccccacgtgctgagcagcatcgccgaggaggagcaccacctggagaagcagagaagcggcctgcagcacggcttcgacagccagctgcccggcaccctggagaccgtgaacggcaagaagcaggtgaacagcttcggcgacgacgaggagctgagcaccagcagcgacagcgacgaggaggtgatcaagcagttcgagatcagcgtgagcagaagccagagcttcagaagcgtgaccagcgagaagggcaagcagaccggcctggagcagaagcccaagttcagcagaagcctgctgacccacggcgaggacggcaccgaggtgagcgcctgcgaggacctggacggcgccagccagagaagatacagcgagaacctgagctacggcgaggacgaccacatccccgcccacagccagagcccctgcgagagaggcgacgccaagcaccacggcaccagccaccaggagagcagcgtggtgcagagcctgagaagacagagcaccgagggcagcctggagatggagaccgccttcaacagcagaggcttcgaggacagctacgccaccgacagcagcagcatgtggagccccgaggagcaggacagaaccaacctgcaggtgcccagcggcgtgagcgagcccatcagcaagtgcggcgacctggacgtgatcttcgagtacagagccgccagccagaagctgaccgtgaccatcgtgagagcccagggcctgcccgacaaggacagaagcggcgtgaacagctggcaggtgcacgtggtgctgctgcccggcaagaagcacagaggcagaaccaacatccagagaggccccaaccccgtgttcagagagaaggtgaccttcgccaagctggagcccagagacgtggccgcctgcgccgtgagattcagactgtacgccgccagaaagatgaccagagagagaatgatgggcgagaagctgttctacctgagccacctgcaccccgagggcgagatgaaggtgaccctggtgctggagcccagaagcaacatcagcagcggcggcagccccctgagccccagcgccgtgagccacagcgacagcaccagcagcacccagagcctgagccacggcggcgcccccgagctgctggtgggcctgagctacaacgccaccaccggcagactgagcgtggagatgatcaagggcagccacttcagaaacctggccgtgaacagagcccccgacacctacggcaagctgttcctgctgaacagcgtgggccaggagatgagcagatgcaagaccagcatcagaagaggccagcccaaccccgtgtacaaggagaccttcgtgttccaggtggccctgttccagctgagcgacgtgaccctgatgatcagcgtgtacaacagaagaaccatgaagagaaaggagatgatcggctggatcgccctgggccagaacagcagcggcgaggaggagcaggaccactgggaggagatgaaggagaccaagggccagcagatctgcagatggcacaccctgctggagagctag

SEQ ID NO: 101515 - DNA, 1653 bp, synthetic construct
  misc_feature 1..1653: note = Description of Artificial Sequence: Synthetic coding sequence
  source 1..1653: mol_type = other DNA
atgccccagagaggccaccccagccaggagggcctgtgggccctgcccagcctgcccatggcccacggccccaagcccgagaccgagggcctgctggacctgagcttcctgaccgaggaggagcaggaggccatcgccggcgtgctgcagagagacgccagactgagacagctggaggagggcagagtgagcaagctgagagccagcgtggccgaccccggccagctgaagatcctgaccggcgactggttccaggaggccagaagccagagacaccacaacgcccacttcggcagcgacctggtgagagccagcatgagaagaaagaagagcaccagaggcgaccaggcccccggccacgacagagaggccgaggccgccgtgaaggagaaggaggagggccccgagcccagactgaccatcgacgaggccccccaggagagactgagagagaccgaggccagcgaccccgaggaggccagccaggcccaggaggaccccggccagggcgaccagcaggtgtgcgccgaggaggccgaccccgagctggagcccgccagcggcggcgagcaggagcccagaccccagcaggcccagaccaaggccgccagccagatcctggagaacggcgaggaggcccccggccccgaccccagcctggacagaatgctgagcagcagcagcagcgtgagcagcctgaacagcagcaccctgagcggcagccagatgagcctgagcggcgacgccgaggccgtgcaggtgagaggcagcgtgcacttcgccctgcactacgagcccggcgccgccgagctgagagtgcacgtgatccagtgccagggcctggccgccgccagaagaagaagaagcgacccctacgtgaagagctacctgctgcccgacaagcagagcaagagaaagaccgccgtgaagaagagaaacctgaaccccgtgttcaacgagaccctgagatacagcgtgccccaggccgagctgcagggcagagtgctgagcctgagcgtgtggcacagagagagcctgggcagaaacatcttcctgggcgaggtggaggtgcccctggacacctgggactggggcagcgagcccacctggctgcccctgcagcccagagtgccccccagccccgacgacctgcccagcagaggcctgctggccctgagcctgaagtacgtgcccgccggcagcgagggcgccggcctgccccccagcggcgagctgcacttctgggtgaaggaggccagagacctgctgcccctgagagccggcagcctggacacctacgtgcagtgcttcgtgctgcccgacgacagccaggccagcagacagagaaccagagtggtgagaagaagcctgagccccgtgttcaaccacaccatggtgtacgacggcttcggccccgccgacctgagacaggcctgcgccgagctgagcctgtgggaccacggcgccctggccaacagacagctgggcggcaccagactgagcctgggcaccggcagcagctacggcctgcaggtgccctggatggacagcacccccgaggagaagcagctgtggcaggccctgctggagcagccctgcgagtgggtggacggcctgctgcccctgagaaccaacctggcccccagaacctag

SEQ ID NO: 101516 - DNA, 231 bp, synthetic construct
  misc_feature 1..231: note = Description of Artificial Sequence: Synthetic coding sequence
  source 1..231: mol_type = other DNA
atgccccagagaggccaccccagccaggagggcctgtgggccctgcccagcctgcccatggcccacggccccaagcccgagaccgagggcctgctggacctgagcttcctgaccgaggaggagcaggaggccatcgccggcgtgctgcagagagacgccagactgagacagctggaggagggcagagtgagcaagctgagagccagcgtggccgaccccggccagctgtag

SEQ ID NO: 101517 - DNA, 1065 bp, synthetic construct
  misc_feature 1..1065: note = Description of Artificial Sequence: Synthetic coding sequence
  source 1..1065: mol_type = other DNA
atgccccagagaggccaccccagccaggagggcctgtgggccctgcccagcctgcccatggcccacggccccaagcccgagaccgagggcctgctggacctgagcttcctgaccgaggaggagcaggaggccatcgccggcgtgctgcagagagacgccagactgagacagctggaggagggcagagtgagcaagctgagagccagcgtggccgaccccggccagctgaagatcctgaccggcgactggttccaggaggccagaagccagagacaccacaacgcccacttcggcagcgacctggtgagagccagcatgagaagaaagaagagcaccagaggcgaccaggcccccggccacgacagagaggccgaggccgccgtgaaggagaaggaggagggccccgagcccagactgaccatcgacgaggccccccaggagagactgagagagaccgagggccccgacttccccagccccagcgtgcccctgaaggccagcgaccccgaggaggccagccaggcccaggaggaccccggccagggcgaccagcaggtgtgcgccgaggaggccgaccccgagctggagcccgccagcggcggcgagcaggagcccagaccccagcaggcccaggtgggcggcagcggcccctggctgctgagcaccagcggcgccgacagcggcagaggcgccctgctgcccagagccgccagcagacccagacccagagccctgggcgccggcgtgggcaaggagggcgcccccagacacctgccccccctgcagaccaaggccgccagccagatcctggagaacggcgaggaggcccccggccccgaccccagcctggacagaatgctgagcagcagcagcagcgtgagcagcctgaacagcagcaccctgagcggcagccagatgagcctgagcggcgacgccgaggccgtgcaggtgagaggcagcgtgcacttcgccctgcactacgagcccggcgccgccgagctgagagtgcacgtgatccagtgccagggcctggccgccgccagaagaagaagaagcgacccctag

SEQ ID NO: 101518 - DNA, 606 bp, synthetic construct
  misc_feature 1..606: note = Description of Artificial Sequence: Synthetic coding sequence
  source 1..606: mol_type = other DNA
atgggcaccaccgccctgctgggcggcgtgagactgagcgagaccatccccgtgaagagactggccagaggcctggccagagtgagagacggcggctggggcagcccccaggccggcgagaaggccctgggcggccccctgctgaccagcggcagccacctgcccagctacgtgaagagctacctgctgcccgacaagcagagcaagagaaagaccgccgtgaagaagagaaacctgaaccccgtgttcaacgagaccctgagatacagcgtgccccaggccgagctgcagggcagagtgctgagcctgagcgtgtggcacagagagagcctgggcagaaacatcttcctgggcgaggtggaggtgcccctggacacctgggactggggcagcgagcccacctggctgcccctgcagcccagagtgccccccagccccgacgacctgcccagcagaggcctgctggccctgagcctgaagtacgtgcccgccggcagcgagggcgccggcctgccccccagcggcgagctgcacttctgggtgaaggaggccagagacctgctgcccctgagagccggcagcctggacacctacgtgcagtggtag

SEQ ID NO: 101519 - DNA, 1083 bp, synthetic construct
  misc_feature 1..1083: note = Description of Artificial Sequence: Synthetic coding sequence
  source 1..1083: mol_type = other DNA
atgccccagagaggccaccccagccaggagggcctgtgggccctgcccagcctgcccatggcccacggccccaagcccgagaccgagggcctgctggacctgagcttcctgaccgaggaggagcaggaggccatcgccggcgtgctgcagagagacgccagactgagacagctggaggagggcagagtgagcaagctgagagccagcgtggccgaccccggccagctgaagatcctgaccggcgactggttccaggaggccagaagccagagacaccacaacgcccacttcggcagcgacctggtgagagccagcatgagaagaaagaagagcaccagaggcgaccaggcccccggccacgacagagaggccgaggccgccgtgaaggagaaggaggagggccccgagcccagactgaccatcgacgaggccccccaggagagactgagagagaccgagggccccgacttccccagccccagcgtgcccctgaaggccagcgaccccgaggaggccagccaggcccaggaggaccccggccagggcgaccagcaggtgtgcgccgaggaggccgaccccgagctggagcccgccagcggcggcgagcaggagcccagaccccagcaggcccaggtgggcggcagcggcccctggctgctgagcaccagcggcgccgacagcggcagaggcgccctgctgcccagagccgccagcagacccagacccagagccctgggcgccggcgtgggcaaggagggcgcccccagacacctgccccccctgcagaccaaggccgccagccagatcctggagaacggcgaggaggcccccggccccgaccccagcctggacagaatgctgagcagcagcagcagcgtgagcagcctgaacagcagcaccgtgagaagagagggcggcgaccccggcggcagaggcgtggaccccttcagatgcgtggcccccgcctgccccagcctggccgccggccccaccgccgccgccccccagcccgccacctacgaccccggcctgaagccccccagatgccccagacccagaagagagccctgcgagagaccctag

SEQ ID NO: 101520 - DNA, 879 bp, synthetic construct
  misc_feature 1..879: note = Description of Artificial Sequence: Synthetic coding sequence
  source 1..879: mol_type = other DNA
tgacccagaccccagcaggcccaggtgggcggcagcggcccctggctgctgagcaccagcggcgccgacagcggcagaggcgccctgctgcccagagccgccagcagacccagacccagagccctgggcgccggcgtgggcaaggagggcgcccccagacacctgccccccctgcagaccaaggccgccagccagatcctggagaacggcgaggaggcccccggccccgaccccagcctggacagaatgctgagcagcagcagcagcgtgagcagcctgaacagcagcaccctgagcggcagccagatgagcctgagcggcgacgccgaggccgtgcaggtgagaggcagcgtgcacttcgccctgcactacgagcccggcgccgccgagctgagagtgcacgtgatccagtgccagggcctggccgccgccagaagaagaagaagcgacccctacgtgaagagctacctgctgcccgacaagcagagcaagagaaagaccgccgtgaagaagagaaacctgaaccccgtgttcaacgagaccctgagatacagcgtgccccaggccgagctgcagggcagagtgctgagcctgagcgtgtggcacagagagagcctgggcagaaacatcttcctgggcgaggtggaggtgcccctggacacctgggactggggcagcgagcccacctggctgcccctgcagcccagagtgccccccagccccgacgacctgcccagcagaggcctgctggccctgagcctgaagtacgtgcccgccggcagcgagggcgccggcctgccccccagcggcgagctgcacttctgggtgaaggaggccagagacctgctgcccctgagagccggcagcctggacacctag

SEQ ID NO: 101521 - DNA, 1689 bp, synthetic construct
  misc_feature 1..1689: note = Description of Artificial Sequence: Synthetic coding sequence
  source 1..1689: mol_type = other DNA
atgccccagagaggccaccccagccaggagggcctgtgggccctgcccagcctgcccatggcccacggccccaagcccgagaccgagggcctgctggacctgagcttcctgaccgaggaggagcaggaggccatcgccggcgtgctgcagagagacgccagactgagacagctggaggagggcagagtgagcaagctgagagccagcgtggccgaccccggccagctgaagatcctgaccggcgactggttccaggaggccagaagccagagacaccacaacgcccacttcggcagcgacctggtgagagccagcatgagaagaaagaagagcaccagaggcgaccaggcccccggccacgacagagaggccgaggccgccgtgaaggagaaggaggagggccccgagcccagactgaccatcgacgaggccccccaggagagactgagagagaccgagggccccgacttccccagccccagcgtgcccctgaaggccagcgaccccgaggaggccagccaggcccaggaggaccccggccagggcgaccagcaggtgtgcgccgaggaggccgaccccgagctggagcccgccagcggcggcgagcaggagcccagaccccagcaggcccagaccaaggccgccagccagatcctggagaacggcgaggaggcccccggccccgaccccagcctggacagaatgctgagcagcagcagcagcgtgagcagcctgaacagcagcaccctgagcggcagccagatgagcctgagcggcgacgccgaggccgtgcaggtgagaggcagcgtgcacttcgccctgcactacgagcccggcgccgccgagctgagagtgcacgtgatccagtgccagggcctggccgccgccagaagaagaagaagcgacccctacgtgaagagctacctgctgcccgacaagcagagcaagagaaagaccgccgtgaagaagagaaacctgaaccccgtgttcaacgagaccctgagatacagcgtgccccaggccgagctgcagggcagagtgctgagcctgagcgtgtggcacagagagagcctgggcagaaacatcttcctgggcgaggtggaggtgcccctggacacctgggactggggcagcgagcccacctggctgcccctgcagcccagagtgccccccagccccgacgacctgcccagcagaggcctgctggccctgagcctgaagtacgtgcccgccggcagcgagggcgccggcctgccccccagcggcgagctgcacttctgggtgaaggaggccagagacctgctgcccctgagagccggcagcctggacacctacgtgcagtgcttcgtgctgcccgacgacagccaggccagcagacagagaaccagagtggtgagaagaagcctgagccccgtgttcaaccacaccatggtgtacgacggcttcggccccgccgacctgagacaggcctgcgccgagctgagcctgtgggaccacggcgccctggccaacagacagctgggcggcaccagactgagcctgggcaccggcagcagctacggcctgcaggtgccctggatggacagcacccccgaggagaagcagctgtggcaggccctgctggagcagccctgcgagtgggtggacggcctgctgcccctgagaaccaacctggcccccagaacctag

SEQ ID NO: 101522 - DNA, 2808 bp, synthetic construct
  misc_feature 1..2808: note = Description of Artificial Sequence: Synthetic coding sequence
  source 1..2808: mol_type = other DNA
atgatcgacctgagcttcctgaccgaggaggagcaggaggccatcatgaaggtgctgcagagagacgccgccctgaagagagccgaggaggagagagtgagacacctgcccgagaagatcaaggacgaccagcagctgaagaacatgagcggccagtggttctacgaggccaaggccaagagacacagagacaagatccacggcgccgacatcatcagagccagcatgagaaagaagagaccccagatcgccgccgagcagagcaaggacagagagaacggcgccaaggagagctgggtgaacaacgtgaacaaggacgccttcctgccccccgagctggccggcgtggtggaggagcccgaggaggacgccgcccccgccagccccagcagcagcgtggtgaaccccgccagcagcgtgatcgacatgagccaggagaacaccagaaagcccaacgtgagccccgagaagcagagaaagaaccccttcaacagcagcaagctgcccgagggccacagcagccagcagaccaagaacgagcagagcaagaacggcagaaccggcctgttccagaccagcaaggaggacgagctgagcgagagcaaggagaagagcaccgtggccgacaccagcatccagaagctggagaagagcaagcagaccctgcccggcctgagcaacggcagccagatcaaggcccccatccccaaggccagaaagatgatctacaagagcaccgacctgaacaaggacgacaaccagagcttccccagacagagaaccgacagcctgaaggccagaggcgcccccagaggcatcctgaagagaaacagcagcagcagcagcaccgacagcgagaccctgagatacaaccacaacttcgagcccaagagcaagatcgtgagccccggcctgaccatccacgagagaatcagcgagaaggagcacagcctggaggacaacagcagccccaacagcctggagcccctgaagcacgtgagattcagcgccgtgaaggacgagctgccccagagccccggcctgatccacggcagagaggtgggcgagttcagcgtgctggagagcgacagactgaagaacggcatggaggacgccggcgacaccgaggagttccagagcgaccccaagcccagccagtacagaaagcccagcctgttccaccagagcaccagcagcccctacgtgagcaagagcgagacccaccagcccatgaccagcggcagcttccccatcaacggcctgcacagccacagcgaggtgctgaccgccagaccccagagcatggagaacagccccaccatcaacgagcccaaggacaagagcagcgagctgaccagactggagagcgtgctgcccagaagccccgccgacgagctgagccactgcgtggagcccgagcccagccaggtgcccggcggcagcagcagagacagacagcagggcagcgaggaggagcccagccccgtgctgaagaccctggagagaagcgccgccagaaagatgcccagcaagagcctggaggacatcagcagcgacagcagcaaccaggccaaggtggacaaccagcccgaggagctggtgagaagcgccgaggacgtgagcaccgtgcccacccagcccgacaaccccttcagccaccccgacaagctgaagagaatgagcaagagcgtgcccgccttcctgcaggacgagagcgacgacagagagaccgacaccgccagcgagagcagctaccagctgagcagacacaagaagagccccagcagcctgaccaacctgagcagcagcagcggcatgaccagcctgagcagcgtgagcggcagcgtgatgagcgtgtacagcggcgacttcggcaacctggaggtgaagggcaacatccagttcgccatcgagtacgtggagagcctgaaggagctgcacgtgttcgtggcccagtgcaaggacctggccgccgccgacgtgaagaagcagagaagcgacccctacgtgaaggcctacctgctgcccgacaagggcaagatgggcaagaagaagaccctggtggtgaagaagaccctgaaccccgtgtacaacgagatcctgagatacaagatcgagaagcagatcctgaagacccagaagctgaacctgagcatctggcacagagacaccttcaagagaaacagcttcctgggcgaggtggagctggacctggagacctgggactgggacaacaagcagaacaagcagctgagatggtaccccctgaagagaaagaccgcccccgtggccctggaggccgagaacagaggcgagatgaagctggccctgcagtacgtgcccgagcccgtgcccggcaagaagctgcccaccaccggcgaggtgcacatctgggtgaaggagtgcctggacctgcccctgctgagaggcagccacctgaacagcttcgtgaagtgcaccatcctgcccgacaccagcagaaagagcagacagaagaccagagccgtgggcaagaccaccaaccccatcttcaaccacaccatggtgtacgacggcttcagacccgaggacctgatggaggcctgcgtggagctgaccgtgtgggaccactacaagctgaccaaccagttcctgggcggcctgagaatcggcttcggcaccggcaagagctacggcaccgaggtggactggatggacagcaccagcgaggaggtggccctgtgggagaagatggtgaacagccccaacacctggatcgaggccaccctgcccctgagaatgctgctgatcgccaagatcagcaagtag

SEQ ID NO: 101523 - DNA, 3819 bp, synthetic construct
  misc_feature 1..3819: note = Description of Artificial Sequence: Synthetic coding sequence
  source 1..3819: mol_type = other DNA
atggacgagcccaacgccgagcaggtgtacaaccccagccagttcgagaacctgagaaagttctgggacctggaggccaacagcaacagcaaggacaacgacaagaacatcaccaccaccagccagaagaacagcgcccccttcaacagacagaagcacaaggagttcagcgacatcaagctgagcggcaagaacacccacgaggccgaggtgctgctgagccccaagaaggtgatggccagagaggagatggagaagctgaacagcaagggcatcctgcaggtgctgcccgacgagatcaccttccccctgagccccctgagaaagtacacctaccagctgcccggcaacgagagcagcaaggagaacgtggagaagaacaccgagggcatcgtgacccccgtgttcaaggaggagaaggactacagcgagcaggagatccaggagagcatcatcaagaccaacgtgctgagcaaggactgcaaggacaccttcaacgacagcctgcagaagctgctgagcgagaccagcacccccgccatccagcccagcggcggcaaggtgcacggcaagcaggtgctggagcccagcgtgagcgagaacagaacctggccccagaagaccgacttcgccgacaccgaggaggaggtgaagggccccgagaagatcatcaacgagcacgtggacaagaccgtggtgcaccccaaggtgaagagaaacagcctgaccgccagcctggacaagctgctgaaggaggccaccggcaccagccccagccccctgcaggccaagctggcccccgtgatcaccggcaccaacagcaagctggaggagggcagattcttcggcaagggcatcgagcagagccacaacaccagcgccgacaagagagagatcctggcccccttccccgtgagagacgagaccttcggcaacaccgccctgctgaagaaggccgagagcggcgagtgccagctgagcacccagaacctgatccagatggccgccgaggacagccaccccctggaccccaccagccagctgagcagaaagggcagcttcggcgacgtggccagccccccccaggacatgctgttcccccaggacgcccacctggtgccccaggccagagtgcaccccagccagaccgagatcagcgagaccgtggagaaggtgatcctgccccccagacccgtgctgaacgacgtgagcgccgccctgcagaagctgtgcggcgaggtgtggctgagctaccccgccggcagagaggtgggccccggcgaggtgaaccccgagttccccgaggccgtgcagcccgtgtgcagccccctgaacccccccggcgtgatcagcccctgggccaccatggacaccatcgtgcccgacagaaaggacttctacagcagcaacgtggtgcccgacaagacccacgaggtgggcagctacctggccgcccagatgagccccagcgaccagaccctgagcagcttcgccagcatcgtggcccagtacggcaagggcctgccccaggaggtggaggagatcgtgagagagaccatcgtgcagcccaagagcgagttcctggagttcagcgccggcctggagaagctgctgaaggaggagaccgagaccttccccagcaagtacgagagcgacaccggcaacctgagccccagcaagctgatcggcagcaccgaggagcccagaagagccaccagcgagtgccaccccgaggagctgaaggagaccgtggagaaggccgaggcccccctgatcaccgagagcgccttcgacgccggcttcgagaagctgctgaaggagatcaccgaggcccccccctaccagccccaggtgagcgtgagagaggagacccacgagaaggagagcagccagagcgagcagaccagattcctgggcaccgtgccccacttctacagagccgccagccagaccagcgagatgaaggacaagagcaacggcctggagagccaggtgaaccagtgcgacaagatgctgggcggcgacgccctggtgaccgacctgctggtggacttctgcggcagcagaagcggcgtggagatccccagaaccccccagctgtacgtggcccacgagatcggcaccatcaagaccgtgaccccccccgaggacagagacagcgagagcggcgtggccggcggccagggcaccctgcaggagcccggcttcggcgaggccagcgaggccatcagcgtgagcagaaacagacagcccatccccctgctgatgaacaaggagaacagcaccaagaccagcaaggtggagctgaccctggccagcccctacatgaagcaggagaaggaggaggagaaggagggcttcagcgagagcgacttcagcgacggcaacaccagcagcaacgccgagagctggagaaaccccagcagcagcgaggaggagcccagccccgtgctgaagaccctggagagaagcgccgccagaaagatgcccagcaagagcctggaggacatcagcagcgacagcagcaaccaggccaaggtggacaaccagcccgaggagctggtgagaagcgccgaggacgacgagaagcccgaccagaagcccgtgaccaacgagtgcgtgcccagaatcagcaccgtgcccacccagcccgacaaccccttcagccaccccgacaagctgaagagaatgagcaagagcgtgcccgccttcctgcaggacgagagcgacgacagagagaccgacaccgccagcgagagcagctaccagctgagcagacacaagaagagccccagcagcctgaccaacctgagcagcagcagcggcatgaccagcctgagcagcgtgagcggcagcgtgatgagcgtgtacagcggcgacttcggcaacctggaggtgaagggcaacatccagttcgccatcgagtacgtggagagcctgaaggagctgcacgtgttcgtggcccagtgcaaggacctggccgccgccgacgtgaagaagcagagaagcgacccctacgtgaaggcctacctgctgcccgacaagggcaagatgggcaagaagaagaccctggtggtgaagaagaccctgaaccccgtgtacaacgagatcctgagatacaagatcgagaagcagatcctgaagacccagaagctgaacctgagcatctggcacagagacaccttcaagagaaacagcttcctgggcgaggtggagctggacctggagacctgggactgggacaacaagcagaacaagcagctgagatggtaccccctgaagagaaagaccgcccccgtggccctggaggccgagaacagaggcgagatgaagctggccctgcagtacgtgcccgagcccgtgcccggcaagaagctgcccaccaccggcgaggtgcacatctgggtgaaggagtgcctggacctgcccctgctgagaggcagccacctgaacagcttcgtgaagtgcaccatcctgcccgacaccagcagaaagagcagacagaagaccagagccgtgggcaagaccaccaaccccatcttcaaccacaccatggtgtacgacggcttcagacccgaggacctgatggaggcctgcgtggagctgaccgtgtgggaccactacaagctgaccaaccagttcctgggcggcctgagaatcggcttcggcaccggcaagagctacggcaccgaggtggactggatggacagcaccagcgaggaggtggccctgtgggagaagatggtgaacagccccaacacctggatcgaggccaccctgcccctgagaatgctgctgatcgccaagatcagcaagtag

SEQ ID NO: 101524 - DNA, 5343 bp, synthetic construct
  misc_feature 1..5343: note = Description of Artificial Sequence: Synthetic coding sequence
  source 1..5343: mol_type = other DNA
atgatcaacagcagcctgagcatgctgttcagctacctggagaagtacttctacgtggccgacgagctgagccactgcgtggagcccgagcccagccaggtgcccggcggcagcagcagagacagacagcagggcaagcccccccccctgcccgccctgaaggccaagaccagcagcagaagcggcccctacgccaccgagatcaagaagagcaccgacgacagcatcttcaaggtgctggactggttcaacagaagcagctacagcgacgacaacaagagcttcctgcagcaccccagaggcatcgagagcaaggagaagaccgacagcaagagccaggtggccgtggacctggtgaccgacgacaccaccctgagagagaacggcagcaagaccctgagccccagcaagatcgagctgaagcccgtgagaagcgacagccccttccaggccgagggcgacatgctggtgagcgagagctgccaggacaacaacgtgaacatcaagagcaagttcatgaacctgagccagaagggcacccccaaggagggccccggcatcctgcagcccttcgagagctacggcacccccagccagggcagcaagaacatggactacagccaggacagcaagagccccggcaagggcaacggcgccagccccagcaacagcaactacagctacagcgtgctgaaggagagcgacgccgagaaccaggtgccctgcaacaccaacaacatcggcaacctgggcgaggaggagcccaagttccacgcccacgaggagaacagaggccacagcgaggtgaacttcgacagcagcaccgtggtgaaggagcccggcctgaaggacaacatgaacgccgagagaaagagcaaggtgggcaacacctacatcctgaaggccagcctggagcccgagaacatcaagagcacccccggcgtggccaacaacggcagcccctggaagaagcccgaggtgcagttccagcaggaggccggcgaggtgcccaagaaccaggtgcagagagagaagtacaagagagtgagcgacagaatcagcttctgggagggcgagaaggccggcgccaagatcacccacgagaagcccaccagcagctgcagccaggagcagcccagcgccaaggcctaccagcccgtgaagaagagccagggcgtgagcagcatggacagcctgagcaccgaccagagcgagtacaaccaggccatccccaagagagtggtgctggacgaggacgaccaggccagccagctgagcaacagctacagcagcaacaagagcaaggagaccaagccccagatcgccggccccagcagatactacctgagcgccgagcagagcgacaaggtgagcctgttccagaacaagaagaacgagcccatcaagagaagccaggtggccgacagcctgcccagcagaagaaacatcaccctgcccgccctgcagccccccagcaacgtgggcagcgagagacacgcccccctggagaaggacagacccctggtgagagagagcaacgccaacttcaaggtgatgagcctgaaggagagaatggacgagcccaacgccgagcaggtgtacaaccccagccagttcgagaacctgagaaagttctgggacctggaggccaacagcaacagcaaggacaacgacaagaacatcaccaccaccagccagaagaacagcgcccccttcaacagacagaagcacaaggagttcagcgacatcaagctgagcggcaagaacacccacgaggccgaggtgctgctgagccccaagaaggtgatggccagagaggagatggagaagctgaacagcaagggcatcctgcaggtgctgcccgacgagatcaccttccccctgagccccctgagaaagtacacctaccagctgcccggcaacgagagcagcaaggagaacgtggagaagaacaccgagggcatcgtgacccccgtgttcaaggaggagaaggactacagcgagcaggagatccaggagagcatcatcaagaccaacgtgctgagcaaggactgcaaggacaccttcaacgacagcctgcagaagctgctgagcgagaccagcacccccgccatccagcccagcggcggcaaggtgcacggcaagcaggtgctggagcccagcgtgagcgagaacagaacctggccccagaagaccgacttcgccgacaccgaggaggaggtgaagggccccgagaagatcatcaacgagcacgtggacaagaccgtggtgcaccccaaggtgaagagaaacagcctgaccgccagcctggacaagctgctgaaggaggccaccggcaccagccccagccccctgcaggccaagctggcccccgtgatcaccggcaccaacagcaagctggaggagggcagattcttcggcaagggcatcgagcagagccacaacaccagcgccgacaagagagagatcctggcccccttccccgtgagagacgagaccttcggcaacaccgccctgctgaagaaggccgagagcggcgagtgccagctgagcacccagaacctgatccagatggccgccgaggacagccaccccctggaccccaccagccagctgagcagaaagggcagcttcggcgacgtggccagccccccccaggacatgctgttcccccaggacgcccacctggtgccccaggccagagtgcaccccagccagaccgagatcagcgagaccgtggagaaggtgatcctgccccccagacccgtgctgaacgacgtgagcgccgccctgcagaagctgtgcggcgaggtgtggctgagctaccccgccggcagagaggtgggccccggcgaggtgaaccccgagttccccgaggccgtgcagcccgtgtgcagccccctgaacccccccggcgtgatcagcccctgggccaccatggacaccatcgtgcccgacagaaaggacttctacagcagcaacgtggtgcccgacaagacccacgaggtgggcagctacctggccgcccagatgagccccagcgaccagaccctgagcagcttcgccagcatcgtggcccagtacggcaagggcctgccccaggaggtggaggagatcgtgagagagaccatcgtgcagcccaagagcgagttcctggagttcagcgccggcctggagaagctgctgaaggaggagaccgagaccttccccagcaagtacgagagcgacaccggcaacctgagccccagcaagctgatcggcagcaccgaggagcccagaagagccaccagcgagtgccaccccgaggagctgaaggagaccgtggagaaggccgaggcccccctgatcaccgagagcgccttcgacgccggcttcgagaagctgctgaaggagatcaccgaggcccccccctaccagccccaggtgagcgtgagagaggagacccacgagaaggagagcagccagagcgagcagaccagattcctgggcaccgtgccccacttctacagagccgccagccagaccagcgagatgaaggacaagagcaacggcctggagagccaggtgaaccagtgcgacaagatgctgggcggcgacgccctggtgaccgacctgctggtggacttctgcggcagcagaagcggcgtggagatccccagaaccccccagctgtacgtggcccacgagatcggcaccatcaagaccgtgaccccccccgaggacagagacagcgagagcggcgtggccggcggccagggcaccctgcaggagcccggcttcggcgaggccagcgaggccatcagcgtgagcagaaacagacagcccatccccctgctgatgaacaaggagaacagcaccaagaccagcaaggtggagctgaccctggccagcccctacatgaagcaggagaaggaggaggagaaggagggcttcagcgagagcgacttcagcgacggcaacaccagcagcaacgccgagagctggagaaaccccagcagcagcgaggaggagcccagccccgtgctgaagaccctggagagaagcgccgccagaaagatgcccagcaagagcctggaggacatcagcagcgacagcagcaaccaggccaaggtggacaaccagcccgaggagctggtgagaagcgccgaggacgtgagcaccgtgcccacccagcccgacaaccccttcagccaccccgacaagctgaagagaatgagcaagagcgtgcccgccttcctgcaggacgagagcgacgacagagagaccgacaccgccagcgagagcagctaccagctgagcagacacaagaagagccccagcagcctgaccaacctgagcagcagcagcggcatgaccagcctgagcagcgtgagcggcagcgtgatgagcgtgtacagcggcgacttcggcaacctggaggtgaagggcaacatccagttcgccatcgagtacgtggagagcctgaaggagctgcacgtgttcgtggcccagtgcaaggacctggccgccgccgacgtgaagaagcagagaagcgacccctacgtgaaggcctacctgctgcccgacaagggcaagatgggcaagaagaagaccctggtggtgaagaagaccctgaaccccgtgtacaacgagatcctgagatacaagatcgagaagcagatcctgaagacccagaagctgaacctgagcatctggcacagagacaccttcaagagaaacagcttcctgggcgaggtggagctggacctggagacctgggactgggacaacaagcagaacaagcagctgagatggtaccccctgaagagaaagaccgcccccgtggccctggaggccgagaacagaggcgagatgaagctggccctgcagtacgtgcccgagcccgtgcccggcaagaagctgcccaccaccggcgaggtgcacatctgggtgaaggagtgcctggacctgcccctgctgagaggcagccacctgaacagcttcgtgaagtgcaccatcctgcccgacaccagcagaaagagcagacagaagaccagagccgtgggcaagaccaccaaccccatcttcaaccacaccatggtgtacgacggcttcagacccgaggacctgatggaggcctgcgtggagctgaccgtgtgggaccactacaagctgaccaaccagttcctgggcggcctgagaatcggcttcggcaccggcaagagctacggcaccgaggtggactggatggacagcaccagcgaggaggtggccctgtgggagaagatggtgaacagccccaacacctggatcgaggccaccctgcccctgagaatgctgctgatcgccaagatcagcaagtag

SEQ ID NO: 101525 - DNA, 1098 bp, synthetic construct
  misc_feature 1..1098: note = Description of Artificial Sequence: Synthetic coding sequence
  source 1..1098: mol_type = other DNA
atgagcgacgacagagagaccgacaccgccagcgagagcagctaccagctgagcagacacaagaagagccccagcagcctgaccaacctgagcagcagcagcggcatgaccagcctgagcagcgtgagcggcagcgtgatgagcgtgtacagcggcgacttcggcaacctggaggtgaagggcaacatccagttcgccatcgagtacgtggagagcctgaaggagctgcacgtgttcgtggcccagtgcaaggacctggccgccgccgacgtgaagaagcagagaagcgacccctacgtgaaggcctacctgctgcccgacaagggcaagatgggcaagaagaagaccctggtggtgaagaagaccctgaaccccgtgtacaacgagatcctgagatacaagatcgagaagcagatcctgaagacccagaagctgaacctgagcatctggcacagagacaccttcaagagaaacagcttcctgggcgaggtggagctggacctggagacctgggactgggacaacaagcagaacaagcagctgagatggtaccccctgaagagaaagaccgcccccgtggccctggaggccgagaacagaggcgagatgaagctggccctgcagtacgtgcccgagcccgtgcccggcaagaagctgcccaccaccggcgaggtgcacatctgggtgaaggagtgcctggacctgcccctgctgagaggcagccacctgaacagcttcgtgaagtgcaccatcctgcccgacaccagcagaaagagcagacagaagaccagagccgtgggcaagaccaccaaccccatcttcaaccacaccatggtgtacgacggcttcagacccgaggacctgatggaggcctgcgtggagctgaccgtgtgggaccactacaagctgaccaaccagttcctgggcggcctgagaatcggcttcggcaccggcaagagctacggcaccgaggtggactggatggacagcaccagcgaggaggtggccctgtgggagaagatggtgaacagccccaacacctggatcgaggccaccctgcccctgagaatgctgctgatcgccaagatcagcaagtag

SEQ ID NO: 101526 - DNA, 2733 bp, synthetic construct
  misc_feature 1..2733: note = Description of Artificial Sequence: Synthetic coding sequence
  source 1..2733: mol_type = other DNA
atgatcgacctgagcttcctgaccgaggaggagcaggaggccatcatgaaggtgctgcagagagacgccgccctgaagagagccgaggaggagagagtgagacacctgcccgagaagatcaaggacgaccagcagctgaagaacatgagcggccagtggttctacgaggccaaggccaagagacacagagacaagatccacggcgccgacatcatcagagccagcatgagaaagaagagaccccagatcgccgccgagcagagcaaggacagagagaacggcgccaaggagagctgggtgaacaacgtgaacaaggacgccttcctgccccccgagctggccggcgtggtggaggagcccgaggaggacgccgcccccgccagccccagcagcagcgtggtgaaccccgccagcagcgtgatcgacatgagccaggagaacaccagaaagcccaacgtgagccccgagaagagaaagaaccccttcaacagcagcaagctgcccgagggccacagcagccagcagaccaagaacgagcagagcaagaacggcagaaccggcctgttccagaccagcaaggaggacgagctgagcgagagcaaggagaagagcaccgtggccgacaccagcatccagaagctggagaagagcaagcagaccctgcccggcctgagcaacggcagccagatcaaggcccccatccccaaggccagaaagatgatctacaagagcaccgacctgaacaaggacgacaaccagagcttccccagacagagaaccgacagcctgaaggccagaggcgcccccagaggcatcctgaagagaaacagcagcagcagcagcaccgacagcgagaccctgagatacaaccacaacttcgagcccaagagcaagatcgtgagccccggcctgaccatccacgagagaatcagcgagaaggagcacagcctggaggacaacagcagccccaacagcctggagcccctgaagcacgtgagattcagcgccgtgaaggacgagctgccccagagccccggcctgatccacggcagagaggtgggcgagttcagcgtgctggagagcgacagactgaagaacggcatggaggacgccggcgacaccgaggagttccagagcgaccccaagcccagccagtacagaaagcccagcctgttccaccagagcaccagcagcccctacgtgagcaagagcgagacccaccagcccatgaccagcggcagcttccccatcaacggcctgcacagccacagcgaggtgctgaccgccagaccccagagcatggagaacagccccaccatcaacgagcccaaggacaagagcagcgagctgaccagactggagagcgtgctgcccagaagccccgccgacgagctgagccactgcgtggagcccgagcccagccaggtgcccggcggcagcagcagagacagacagcagggcagcgaggaggagcccagccccgtgctgaagaccctggagagaagcgccgccagaaagatgcccagcaagagcctggaggacatcagcagcgacagcagcaaccaggccaaggtggacaaccagcccgaggagctggtgagaagcgccgaggacgacgagaagcccgaccagaagcccgtgaccaacgagtgcgtgcccagaatcagcaccgtgcccacccagcccgacaaccccttcagccaccccgacaagctgaagagaatgagcaagagcgtgcccgccttcctgcaggacgaggtgagcggcagcgtgatgagcgtgtacagcggcgacttcggcaacctggaggtgaagggcaacatccagttcgccatcgagtacgtggagagcctgaaggagctgcacgtgttcgtggcccagtgcaaggacctggccgccgccgacgtgaagaagcagagaagcgacccctacgtgaaggcctacctgctgcccgacaagggcaagatgggcaagaagaagaccctggtggtgaagaagaccctgaaccccgtgtacaacgagatcctgagatacaagatcgagaagcagatcctgaagacccagaagctgaacctgagcatctggcacagagacaccttcaagagaaacagcttcctgggcgaggtggagctggacctggagacctgggactgggacaacaagcagaacaagcagctgagatggtaccccctgaagagaaagaccgcccccgtggccctggaggccgagaacagaggcgagatgaagctggccctgcagtacgtgcccgagcccgtgcccggcaagaagctgcccaccaccggcgaggtgcacatctgggtgaaggagtgcctggacctgcccctgctgagaggcagccacctgaacagcttcgtgaagtgcaccatcctgcccgacaccagcagaaagagcagacagaagaccagagccgtgggcaagaccaccaaccccatcttcaaccacaccatggtgtacgacggcttcagacccgaggacctgatggaggcctgcgtggagctgaccgtgtgggaccactacaagctgaccaaccagttcctgggcggcctgagaatcggcttcggcaccggcaagagctacggcaccgaggtggactggatggacagcaccagcgaggaggtggccctgtgggagaagatggtgaacagccccaacacctggatcgaggccaccctgcccctgagaatgctgctgatcgccaagatcagcaagtag

SEQ ID NO: 101527 - DNA, 2733 bp, synthetic construct; identical to SEQ ID NO: 101526
  misc_feature 1..2733: note = Description of Artificial Sequence: Synthetic coding sequence
  source 1..2733: mol_type = other DNA

SEQ ID NO: 101528 - DNA, 192 bp, synthetic construct
  misc_feature 1..192: note = Description of Artificial Sequence: Synthetic coding sequence
  source 1..192: mol_type = other DNA
atgagcaagagcgtgcccgccttcctgcaggacgagagcgacgacagagagaccgacaccgccagcgagagcagctaccagctgagcagacacaagaagagccccagcagcctgaccaacctgagcagcagcagcggcatgaccagcctgagcagcgtgagcggcagcgtgatgagcgtgtacagcggctag

SEQ ID NO: 101529 - DNA, 3771 bp, synthetic construct
  misc_feature 1..3771: note = Description of Artificial Sequence: Synthetic coding sequence
  source 1..3771: mol_type = other DNA
atggacgagcccaacgccgagcaggtgtacaaccccagccagttcgagaacctgagaaagttctgggacctggaggccaacagcaacagcaaggacaacgacaagaacatcaccaccaccagccagaagaacagcgcccccttcaacagacagaagcacaaggagttcagcgacatcaagctgagcggcaagaacacccacgaggccgaggtgctgctgagccccaagaaggtgatggccagagaggagatggagaagctgaacagcaagggcatcctgcaggtgctgcccgacgagatcaccttccccctgagccccctgagaaagtacacctaccagctgcccggcaacgagagcagcaaggagaacgtggagaagaacaccgagggcatcgtgacccccgtgttcaaggaggagaaggactacagcgagcaggagatccaggagagcatcatcaagaccaacgtgctgagcaaggactgcaaggacaccttcaacgacagcctgcagaagctgctgagcgagaccagcacccccgccatccagcccagcggcggcaaggtgcacggcaagcaggtgctggagcccagcgtgagcgagaacagaacctggccccagaagaccgacttcgccgacaccgaggaggaggtgaagggccccgagaagatcatcaacgagcacgtggacaagaccgtggtgcaccccaaggtgaagagaaacagcctgaccgccagcctggacaagctgctgaaggaggccaccggcaccagccccagccccctgcaggccaagctggcccccgtgatcaccggcaccaacagcaagctggaggagggcagattcttcggcaagggcatcgagcagagccacaacaccagcgccgacaagagagagatcctggcccccttccccgtgagagacgagaccttcggcaacaccgccctgctgaagaaggccgagagcggcgagtgccagctgagcacccagaacctgatccagatggccgccgaggacagccaccccctggaccccaccagccagctgagcagaaagggcagcttcggcgacgtggccagccccccccaggacatgctgttcccccaggacgcccacctggtgccccaggccagagtgcaccccagccagaccgagatcagcgagaccgtggagaaggtgatcctgccccccagacccgtgctgaacgacgtgagcgccgccctgcagaagctgtgcggcgaggtgtggctgagctaccccgccggcagagaggtgggccccggcgaggtgaaccccgagttccccgaggccgtgcagcccgtgtgcagccccctgaacccccccggcgtgatcagcccctgggccaccatggacaccatcgtgcccgacagaaaggacttctacagcagcaacgtggtgcccgacaagacccacgaggtgggcagctacctggccgcccagatgagccccagcgaccagaccctgagcagcttcgccagcatcgtggcccagtacggcaagggcctgccccaggaggtggaggagatcgtgagagagaccatcgtgcagcccaagagcgagttcctggagttcagcgccggcctggagaagctgctgaaggaggagaccgagaccttccccagcaagtacgagagcgacaccggcaacctgagccccagcaagctgatcggcagcaccgaggagcccagaagagccaccagcgagtgccaccccgaggagctgaaggagaccgtggagaaggccgaggcccccctgatcaccgagagcgccttcgacgccggcttcgagaagctgctgaaggagatcaccgaggcccccccctaccagccccaggtgagcgtgagagaggagacccacgagaaggagagcagccagagcgagcagaccagattcctgggcaccgtgccccacttctacagagccgccagccagaccagcgagatgaaggacaagagcaacggcctggagagccaggtgaaccagtgcgacaagatgctgggcggcgacgccctggtgaccgacctgctggtggacttctgcggcagcagaagcggcgtggagatccccagaaccccccagctgtacgtggcccacgagatcggcaccatcaagaccgtgaccccccccgaggacagagacagcgagagcggcgtggccggcggccagggcaccctgcaggagcccggcttcggcgaggccagcgaggccatcagcgtgagcagaaacagacagcccatccccctgctgatgaacaaggagaacagcaccaagaccagcaaggtggagctgaccctggccagcccctacatgaagcaggagaaggaggaggagaaggagggcttcagcgagagcgacttcagcgacggcaacaccagcagcaacgccgagagctggagaaaccccagcagcagcgaggaggagcccagccccgtgctgaagaccctggagagaagcgccgccagaaagatgcccagcaagagcctggaggacatcagcagcgacagcagcaaccaggccaaggtggacaaccagcccgaggagctggtgagaagcgccgaggacgtgagcaccgtgcccacccagcccgacaaccccttcagccaccccgacaagctgaagagaatgagcaagagcgtgcccgccttcctgcaggacgagagcgacgacagagagaccgacaccgccagcgagagcagctaccagctgagcagacacaagaagagccccagcagcctgaccaacctgagcagcagcagcggcatgaccagcctgagcagcgtgagcggcagcgtgatgagcgtgtacagcggcgacttcggcaacctggaggtgaagggcaacatccagttcgccatcgagtacgtggagagcctgaaggagctgcacgtgttcgtggcccagtgcaaggacctggccgccgccgacgtgaagaagcagagaagcgacccctacgtgaaggcctacctgctgcccgacaagggcaagatgggcaagaagaagaccctggtggtgaagaagaccctgaaccccgtgtacaacgagatcctgagatacaagatcgagaagcagatcctgaagacccagaagctgaacctgagcatctggcacagagacaccttcaagagaaacagcttcctgggcgaggtggagctggacctggagacctgggactgggacaacaagcagaacaagcagctgagatggtaccccctgaagagaaagaccgcccccgtggccctggaggccgagaacagaggcgagatgaagctggccctgcagtacgtgcccgagcccgtgcccggcaagaagctgcccaccaccggcgaggtgcacatctgggtgaaggagtgcctggacctgcccctgctgagaggcagccacctgaacagcttcgtgaagtgcaccatcctgcccgacaccagcagaaagagcagacagaagaccagagccgtgggcaagaccaccaaccccatcttcaaccacaccatggtgtacgacggcttcagacccgaggacctgatggaggcctgcgtggagctgaccgtgtgggaccactacaagctgaccaaccagttcctgggcggcctgagaatcggcttcggcaccggcaagagctacggcaccgaggtggactggatggacagcaccagcgaggaggtggccctgtgggagaagatggtgaacagccccaacacctggatcgaggccaccctgcccctgagaatgctgctgatcgccaagatcagcaagtag

SEQ ID NO: 101530 - DNA, 1131 bp, synthetic construct
  misc_feature 1..1131: note = Description of Artificial Sequence: Synthetic coding sequence
  source 1..1131: mol_type = other DNA
atgagcaagagcgtgcccgccttcctgcaggacgagagcgacgacagagagaccgacaccgccagcgagagcagctaccagctgagcagacacaagaagagccccagcagcctgaccaacctgagcagcagcagcggcatgaccagcctgagcagcgtgagcggcagcgtgatgagcgtgtacagcggcgacttcggcaacctggaggtgaagggcaacatccagttcgccatcgagtacgtggagagcctgaaggagctgcacgtgttcgtggcccagtgcaaggacctggccgccgccgacgtgaagaagcagagaagcgacccctacgtgaaggcctacctgctgcccgacaagggcaagatgggcaagaagaagaccctggtggtgaagaagaccctgaaccccgtgtacaacgagatcctgagatacaagatcgagaagcagatcctgaagacccagaagctgaacctgagcatctggcacagagacaccttcaagagaaacagcttcctgggcgaggtggagctggacctggagacctgggactgggacaacaagcagaacaagcagctgagatggtaccccctgaagagaaagaccgcccccgtggccctggaggccgagaacagaggcgagatgaagctggccctgcagtacgtgcccgagcccgtgcccggcaagaagctgcccaccaccggcgaggtgcacatctgggtgaaggagtgcctggacctgcccctgctgagaggcagccacctgaacagcttcgtgaagtgcaccatcctgcccgacaccagcagaaagagcagacagaagaccagagccgtgggcaagaccaccaaccccatcttcaaccacaccatggtgtacgacggcttcagacccgaggacctgatggaggcctgcgtggagctgaccgtgtgggaccactacaagctgaccaaccagttcctgggcggcctgagaatcggcttcggcaccggcaagagctacggcaccgaggtggactggatggacagcaccagcgaggaggtggccctgtgggagaagatggtgaacagccccaacacctggatcgaggccaccctgcccctgagaatgctgctgatcgccaagatcagcaagtag

SEQ ID NO: 101531 - DNA, 312 bp, synthetic construct
  misc_feature 1..312: note = Description of Artificial Sequence: Synthetic coding sequence
  source 1..312: mol_type = other DNA
atgagcaagagcgtgcccgccttcctgcaggacgagagcgacgacagagagaccgacaccgccagcgagagcagctaccagctgagcagacacaagaagagccccagcagcctgaccaacctgagcagcagcagcggcatgaccagcctgagcagcgtgagcggcagcgtgatgagcgtgtacagcggcgacttcggcaacctggaggtgaagggcaacatccagttcgccatcgagtacgtggagagcctgaaggagctgcacgtgttcgtggcccagtgcaaggacctggccgccgccgacgtgaagtag

SEQ ID NO: 101532 - DNA, 2709 bp, synthetic construct
  misc_feature 1..2709: note = Description of Artificial Sequence: Synthetic coding sequence
  source 1..2709: mol_type = other DNA
atgagcggccagtggttctacgaggccaaggccaagagacacagagacaagatccacggcgccgacatcatcagagccagcatgagaaagaagagaccccagatcgccgccgagcagagcaaggacagagagaacggcgccaaggagagctgggtgaacaacgtgaacaaggacgccttcctgccccccgagctggccggcgtggtggaggagcccgaggaggacgccgcccccgccagccccagcagcagcgtggtgaaccccgccagcagcgtgatcgacatgagccaggagaacaccagaaagcccaacgtgagccccgagaagagaaagaaccccttcaacagcagcaagctgcccgagggccacagcagccagcagaccaagaacgagcagagcaagaacggcagaaccggcctgttccagaccagcaaggaggacgagctgagcgagagcaaggagaagagcaccgtggccgacaccagcatccagaagctggagaagagcaagcagaccctgcccggcctgagcaacggcagccagatcaaggcccccatccccaaggccagaaagatgatctacaagagcaccgacctgaacaaggacgacaaccagagcttccccagacagagaaccgacagcctgaaggccagaggcgcccccagaggcatcctgaagagaaacagcagcagcagcagcaccgacagcgagaccctgagatacaaccacaacttcgagcccaagagcaagatcgtgagccccggcctgaccatccacgagagaatcagcgagaaggagcacagcctggaggacaacagcagccccaacagcctggagcccctgaagcacgtgagattcagcgccgtgaaggacgagctgccccagagccccggcctgatccacggcagagaggtgggcgagttcagcgtgctggagagcgacagactgaagaacggcatggaggacgccggcgacaccgaggagttccagagcgaccccaagcccagccagtacagaaagcccagcctgttccaccagagcaccagcagcccctacgtgagcaagagcgagacccaccagcccatgaccagcggcagcttccccatcaacggcctgcacagccacagcgaggtgctgaccgccagaccccagagcatggagaacagccccaccatcaacgagcccaaggacaagagcagcgagctgaccagactggagagcgtgctgcccagaagccccgccgacgagctgagccactgcgtggagcccgagcccagccaggtgcccggcggcagcagcagagacagacagcagggcagcgaggaggagcccagccccgtgctgaagaccctggagagaagcgccgccagaaagatgcccagcaagagcctggaggacatcagcagcgacagcagcaaccaggccaaggtggacaaccagcccgaggagctggtgagaagcgccgaggacgacgagaagcccgaccagaagcccgtgaccaacgagtgcgtgcccagaatcagcaccgtgcccacccagcccgacaaccccttcagccaccccgacaagctgaagagaatgagcaagagcgtgcccgccttcctgcaggacgagagcgacgacagagagaccgacaccgccagcgagagcagctaccagctgagcagacacaagaagagccccagcagcctgaccaacctgagcagcagcagcggcatgaccagcctgagcagcgtgagcggcagcgtgatgagcgtgtacagcggcgacttcggcaacctggaggtgaagggcaacatccagttcgccatcgagtacgtggagagcctgaaggagctgcacgtgttcgtggcccagtgcaaggacctggccgccgccgacgtgaagaagcagagaagcgacccctacgtgaaggcctacctgctgcccgacaagggcaagatgggcaagaagaagaccctggtggtgaagaagaccctgaaccccgtgtacaacgagatcctgagatacaagatcgagaagcagatcctgaagacccagaagctgaacctgagcatctggcacagagacaccttcaagagaaacagcttcctgggcgaggtggagctggacctggagacctgggactgggacaacaagcagaacaagcagctgagatggtaccccctgaagagaaagaccgcccccgtggccctggaggccgagaacagaggcgagatgaagctggccctgcagtacgtgcccgagcccgtgcccggcaagaagctgcccaccaccggcgaggtgcacatctgggtgaaggagtgcctggacctgcccctgctgagaggcagccacctgaacagcttcgtgaagtgcaccatcctgcccgacaccagcagaaagagcagacagaagaccagagccgtgggcaagaccaccaaccccatcttcaaccacaccatggtgtacgacggcttcagacccgaggacctgatggaggcctgcgtggagctgaccgtgtgggaccactacaagctgaccaaccagttcctgggcggcctgagaatcggcttcggcaccggcaagagctacggcaccgaggtggactggatggacagcaccagcgaggaggtggccctgtgggagaagatggtgaacagccccaacacctggatcgaggccaccctgcccctgagaatgctgctgatcgccaagatcagcaagtag

SEQ ID NO: 101533 - DNA, 483 bp, synthetic construct
  misc_feature 1..483: note = Description of Artificial Sequence: Synthetic coding sequence
  source 1..483: mol_type = other DNA
atgagcaagagcgtgcccgccttcctgcaggacgaggtgagcggcagcgtgatgagcgtgtacagcggcgacttcggcaacctggaggtgaagggcaacatccagttcgccatcgagtacgtggagagcctgaaggagctgcacgtgttcgtggcccagtgcaaggacctggccgccgccgacgtgaagaagcagagaagcgacccctacgtgaaggcctacctgctgcccgacaagggcaagatgggcaagaagaagaccctggtggtgaagaagaccctgaaccccgtgtacaacgagatcctgagatacaagatcgagaagcagatcctgaagacccagaagctgaacctgagcatctggcacagagacaccttcaagagaaacagcttcctgggcgaggtggagctggacctggagacctgggactgggacaacaagcagaacaagcagctgagatggtaccccctgaagagaaagtag

SEQ ID NO: 101534 - DNA, 2805 bp, synthetic construct
  misc_feature 1..2805: note = Description of Artificial Sequence: Synthetic coding sequence
  source 1..2805: mol_type = other DNA
atgatcgacctgagcttcctgaccgaggaggagcaggaggccatcatgaaggtgctgcagagagacgccgccctgaagagagccgaggaggagagagtgagacacctgcccgagaagatcaaggacgaccagcagctgaagaacatgagcggccagtggttctacgaggccaaggccaagagacacagagacaagatccacggcgccgacatcatcagagccagcatgagaaagaagagaccccagatcgccgccgagcagagcaaggacagagagaacggcgccaaggagagctgggtgaacaacgtgaacaaggacgccttcctgccccccgagctggccggcgtggtggaggagcccgaggaggacgccgcccccgccagccccagcagcagcgtggtgaaccccgccagcagcgtgatcgacatgagccaggagaacaccagaaagcccaacgtgagccccgagaagagaaagaaccccttcaacagcagcaagctgcccgagggccacagcagccagcagaccaagaacgagcagagcaagaacggcagaaccggcctgttccagaccagcaaggaggacgagctgagcgagagcaaggagaagagcaccgtggccgacaccagcatccagaagctggagaagagcaagcagaccctgcccggcctgagcaacggcagccagatcaaggcccccatccccaaggccagaaagatgatctacaagagcaccgacctgaacaaggacgacaaccagagcttccccagacagagaaccgacagcctgaaggccagaggcgcccccagaggcatcctgaagagaaacagcagcagcagcagcaccgacagcgagaccctgagatacaaccacaacttcgagcccaagagcaagatcgtgagccccggcctgaccatccacgagagaatcagcgagaaggagcacagcctggaggacaacagcagccccaacagcctggagcccctgaagcacgtgagattcagcgccgtgaaggacgagctgccccagagccccggcctgatccacggcagagaggtgggcgagttcagcgtgctggagagcgacagactgaagaacggcatggaggacgccggcgacaccgaggagttccagagcgaccccaagcccagccagtacagaaagcccagcctgttccaccagagcaccagcagcccctacgtgagcaagagcgagacccaccagcccatgaccagcggcagcttccccatcaacggcctgcacagccacagcgaggtgctgaccgccagaccccagagcatggagaacagccccaccatcaacgagcccaaggacaagagcagcgagctgaccagactggagagcgtgctgcccagaagccccgccgacgagctgagccactgcgtggagcccgagcccagccaggtgcccggcggcagcagcagagacagacagcagggcagcgaggaggagcccagccccgtgctgaagaccctggagagaagcgccgccagaaagatgcccagcaagagcctggaggacatcagcagcgacagcagcaaccaggccaaggtggacaaccagcccgaggagctggtgagaagcgccgaggacgtgagcaccgtgcccacccagcccgacaaccccttcagccaccccgacaagctgaagagaatgagcaagagcgtgcccgccttcctgcaggacgagagcgacgacagagagaccgacaccgccagcgagagcagctaccagctgagcagacacaagaagagccccagcagcctgaccaacctgagcagcagcagcggcatgaccagcctgagcagcgtgagcggcagcgtgatgagcgtgtacagcggcgacttcggcaacctggaggtgaagggcaacatccagttcgccatcgagtacgtggagagcctgaaggagctgcacgtgttcgtggcccagtgcaaggacctggccgccgccgacgtgaagaagcagagaagcgacccctacgtgaaggcctacctgctgcccgacaagggcaagatgggcaagaagaagaccctggtggtgaagaagaccctgaaccccgtgtacaacgagatcctgagatacaagatcgagaagcagatcctgaagacccagaagctgaacctgagcatctggcacagagacaccttcaagagaaacagcttcctgggcgaggtggagctggacctggagacctgggactgggacaacaagcagaacaagcagctgagatggtaccccctgaagagaaagaccgcccccgtggccctggaggccgagaacagaggcgagatgaagctggccctgcagtacgtgcccgagcccgtgcccggcaagaagctgcccaccaccggcgaggtgcacatctgggtgaaggagtgcctggacctgcccctgctgagaggcagccacctgaacagcttcgtgaagtgcaccatcctgcccgacaccagcagaaagagcagacagaagaccagagccgtgggcaagaccaccaaccccatcttcaaccacaccatggtgtacgacggcttcagacccgaggacctgatggaggcctgcgtggagctgaccgtgtgggaccactacaagctgaccaaccagttcctgggcggcctgagaatcggcttcggcaccggcaagagctacggcaccgaggtggactggatggacagcaccagcgaggaggtggccctgtgggagaagatggtgaacagccccaacacctggatcgaggccaccctgcccctgagaatgctgctgatcgccaagatcagcaagtag

SEQ ID NO: 101535 - DNA, 468 bp, synthetic construct
  misc_feature 1..468: note = Description of Artificial Sequence: Synthetic coding sequence
  source 1..468: mol_type = other DNA
atgagcaagagcgtgcccgccttcctgcaggacgagagcgacgacagagagaccgacaccgccagcgagagcagctaccagctgagcagacacaagaagagccccagcagcctgaccaacctgagcagcagcagcggcatgaccagcctgagcagcgtgagcggcagcgtgatgagcgtgtacagcggcgacttcggcaacctggaggtgaagggcaacatccagttcgccatcgagtacgtggagagcctgaaggagctgcacgtgttcgtggcccagtgcaaggacctggccgccgccgacgtgaagaagcagagaagcgacccctacgtgaaggcctacctgctgcccgacaagggcaagatgggcaagaagaagaccctggtggtgaagaagaccctgaaccccgtgtacaacgagatcctgagatacaagatcgagaagcagatcctgaagacccagaagtag

SEQ ID NO: 101536 - DNA, 1131 bp, synthetic construct; identical to SEQ ID NO: 101530
  misc_feature 1..1131: note = Description of Artificial Sequence: Synthetic coding sequence
  source 1..1131: mol_type = other DNA

SEQ ID NO: 101537 - DNA, 1956 bp, synthetic construct
  misc_feature 1..1956: note = Description of Artificial Sequence: Synthetic coding sequence
  source 1..1956: mol_type = other DNA
gagaccgtggagaaggccgaggcccccctgatcaccgagagcgccttcgacgccggcttcgagaagctgctgaaggagatcaccgaggcccccccctaccagccccaggtgagcgtgagagaggagacccacgagaaggagagcagccagagcgagcagaccagattcctgggcaccgtgccccacttctacagagccgccagccagaccagcgagatgaaggacaagagcaacggcctggagagccaggtgaaccagtgcgacaagatgctgggcggcgacgccctggtgaccgacctgctggtggacttctgcggcagcagaagcggcgtggagatccccagaaccccccagctgtacgtggcccacgagatcggcaccatcaagaccgtgaccccccccgaggacagagacagcgagagcggcgtggccggcggccagggcaccctgcaggagcccggcttcggcgaggccagcgaggccatcagcgtgagcagaaacagacagcccatccccctgctgatgaacaaggagaacagcaccaagaccagcaaggtggagctgaccctggccagcccctacatgaagcaggagaaggaggaggagaaggagggcttcagcgagagcgacttcagcgacggcaacaccagcagcaacgccgagagctggagaaaccccagcagcagcgaggaggagcccagccccgtgctgaagaccctggagagaagcgccgccagaaagatgcccagcaagagcctggaggacatcagcagcgacagcagcaaccaggccaaggtggacaaccagcccgaggagctggtgagaagcgccgaggacgacgagaagcccgaccagaagcccgtgaccaacgagtgcgtgcccagaatcagcaccgtgcccacccagcccgacaaccccttcagccaccccgacaagctgaagagaatgagcaagagcgtgcccgccttcctgcaggacgaggtgagcggcagcgtgatgagcgtgtacagcggcgacttcggcaacctggaggtgaagggcaacatccagttcgccatcgagtacgtggagagcctgaaggagctgcacgtgttcgtggcccagtgcaaggacctggccgccgccgacgtgaagaagcagagaagcgacccctacgtgaaggcctacctgctgcccgacaagggcaagatgggcaagaagaagaccctggtggtgaagaagaccctgaaccccgtgtacaacgagatcctgagatacaagatcgagaagcagatcctgaagacccagaagctgaacctgagcatctggcacagagacaccttcaagagaaacagcttcctgggcgaggtggagctggacctggagacctgggactgggacaacaagcagaacaagcagctgagatggtaccccctgaagagaaagaccgcccccgtggccctggaggccgagaacagaggcgagatgaagctggccctgcagtacgtgcccgagcccgtgcccggcaagaagctgcccaccaccggcgaggtgcacatctgggtgaaggagtgcctggacctgcccctgctgagaggcagccacctgaacagcttcgtgaagtgcaccatcctgcccgacaccagcagaaagagcagacagaagaccagagccgtgggcaagaccaccaaccccatcttcaaccacaccatggtgtacgacggcttcagacccgaggacctgatggaggcctgcgtggagctgaccgtgtgggaccactacaagctgaccaaccagttcctgggcggcctgagaatcggcttcggcaccggcaagagctacggcaccgaggtggactggatggacagcaccagcgaggaggtggccctgtgggagaagatggtgaacagccccaacacctggatcgaggccaccctgcccctgagaatgctgctgatcgccaagatcagcaagtag

SEQ ID NO: 101538 - DNA, 213 bp, synthetic construct
  misc_feature 1..213: note = Description of Artificial Sequence: Synthetic coding sequence
  source 1..213: mol_type = other DNA
atgagcaagagcgtgcccgccttcctgcaggacgagagcgacgacagagagaccgacaccgccagcgagagcagctaccagctgagcagacacaagaagagccccagcagcctgaccaacctgagcagcagcagcggcatgaccagcctgagcagcgtgagcggcagcgtgatgagcgtgtacagcggcgacttcggcaacctggaggtgtag

SEQ ID NO: 101539 - DNA, 1011 bp, synthetic construct
  misc_feature 1..1011: note = Description of Artificial Sequence: Synthetic coding sequence
  source 1..1011: mol_type = other DNA
atgagcaagagcgtgcccgccttcctgcaggacgaggtgagcggcagcgtgatgagcgtgtacagcggcgacttcggcaacctggaggtgaagggcaacatccagttcgccatcgagtacgtggagagcctgaaggagctgcacgtgttcgtggcccagtgcaaggacctggccgccgccgacgtgaagaagcagagaagcgacccctacgtgaaggcctacctgctgcccgacaagggcaagatgggcaagaagaagaccctggtggtgaagaagaccctgaaccccgtgtacaacgagatcctgagatacaagatcgagaagcagatcctgaagacccagaagctgaacctgagcatctggcacagagacaccttcaagagaaacagcttcctgggcgaggtggagctggacctggagacctgggactgggacaacaagcagaacaagcagctgagatggtaccccctgaagagaaagaccgcccccgtggccctggaggccgagaacagaggcgagatgaagctggccctgcagtacgtgcccgagcccgtgcccggcaagaagctgcccaccaccggcgaggtgcacatctgggtgaaggagtgcctggacctgcccctgctgagaggcagccacctgaacagcttcgtgaagtgcaccatcctgcccgacaccagcagaaagagcagacagaagaccagagccgtgggcaagaccaccaaccccatcttcaaccacaccatggtgtacgacggcttcagacccgaggacctgatggaggcctgcgtggagctgaccgtgtgggaccactacaagctgaccaaccagttcctgggcggcctgagaatcggcttcggcaccggcaagagctacggcaccgaggtggactggatggacagcaccagcgaggaggtggccctgtgggagaagatggtgaacagccccaacacctggatcgaggccaccctgcccctgagaatgctgctgatcgccaagatcagcaagtag

SEQ ID NO: 101540 - DNA, 2016 bp, synthetic construct
  misc_feature 1..2016: note = Description of Artificial Sequence: Synthetic coding sequence
  source 1..2016: mol_type = other DNA
atgagcgagctgctggacctgagcttcctgagcgaggaggagaaggacctgatcctgagcgtgctgcagagagacgaggaggtgagaaaggccgacgagaagagaatcagaagactgaagaacgagctgctggagatcaagagaaagggcgccaagagaggcagccagcactacagcgacagaacctgcgccagatgccaggagagcctgggcagactgagccccaagaccaacacctgcagaggctgcaaccacctggtgtgcagagactgcagaatccaggagagcaacggcacctggagatgcaaggtgtgcgccaaggagatcgagctgaagaaggccaccggcgactggttctacgaccagaaggtgaacagattcgcctacagaaccggcagcgagatcatcagaatgagcctgagacacaagcccgccgtgagcaagagagagaccgtgggccagagcctgctgcaccagacccagatgggcgacatctggcccggcagaaagatcatccaggagagacagaaggagcccagcgtgctgttcgaggtgcccaagctgaagagcggcaagagcgccctggaggccgagagcgagagcctggacagcttcaccgccgacagcgacagcaccagcagaagagacagcctggacaagagcggcctgttccccgagtggaagaagatgagcgcccccaagagccaggtggagaaggagacccagcccggcggccagaacgtggtgttcgtggacgagggcgagatgatcttcaagaagaacaccagaaagatcctgagacccagcgagtacaccaagagcgtgatcgacctgagacccgaggacgtggtgcacgagagcggcagcctgggcgacagaagcaagagcgtgcccggcctgaacgtggacatggaggaggaggaggaggaggaggacatcgaccacctggtgaagctgcacagacagaagctggccagaagcagcatgcagagcggcagcagcatgagcaccatcggcagcatgatgagcatctacagcgaggccggcgacttcggcaacatcttcgtgaccggcagaatcgccttcagcctgaagtacgagcagcagacccagagcctggtggtgcacgtgaaggagtgccaccagctggcctacgccgacgaggccaagaagagaagcaacccctacgtgaagacctacctgctgcccgacaagagcagacagggcaagagaaagaccagcatcaagagagacaccatcaaccccctgtacgacgagaccctgagatacgagatccccgagagcctgctggcccagagaaccctgcagttcagcgtgtggcaccacggcagattcggcagaaacaccttcctgggcgaggccgagatccagatggacagctggaagctggacaagaagctggaccactgcctgcccctgcacggcaagatcagcgccgagagccccaccggcctgcccagccacaagggcgagctggtggtgagcctgaagtacatccccgccagcaagacccccgtgggcggcgacagaaagaagagcaagggcggcgagggcggcgagctgcaggtgtggatcaaggaggccaagaacctgaccgccgccaaggccggcggcaccagcgacagcttcgtgaagggctacctgctgcccatgagaaacaaggccagcaagagaaagacccccgtgatgaagaagaccctgaacccccactacaaccacaccttcgtgtacaacggcgtgagactggaggacctgcagcacatgtgcctggagctgaccgtgtgggacagagagcccctggccagcaacgacttcctgggcggcgtgagactgggcgtgggcaccggcatcagcaacggcgaggtggtggactggatggacagcaccggcgaggaggtgagcctgtggcagaagatgagacagtaccccggcagctgggccgagggcaccctgcagctgagaagcagcatggccaagcagaagctgggcctgtag

SEQ ID NO: 101541 - DNA, 2016 bp, synthetic construct; identical to SEQ ID NO: 101540
  misc_feature 1..2016: note = Description of Artificial Sequence: Synthetic coding sequence
  source 1..2016: mol_type = other DNA

SEQ ID NO: 101542 - DNA, 1050 bp, synthetic construct
  misc_feature 1..1050: note = Description of Artificial Sequence: Synthetic coding sequence
  source 1..1050: mol_type = other DNA
atgagcgagctgctggacctgagcttcctgagcgaggaggagaaggacctgatcctgagcgtgctgcagagagacgaggaggtgagaaaggccgacgagaagagaatcagaagactgaagaacgagctgctggagatcaagagaaagggcgccaagagaggcagccagcactacagcgacagaacctgcgccagatgccaggagagcctgggcagactgagccccaagaccaacacctgcagaggctgcaaccacctggtgtgcagagactgcagaatccaggagagcaacggcacctggagatgcaaggtgtgcgccaaggagatcgagctgaagaaggccaccggcgactggttctacgaccagaaggtgaacagattcgcctacagaaccggcagcgagatcatcagaatgagcctgagacacaagcccgccgtgagcaagagagagaccgtgggccagagcctgctgcaccagacccagatgggcgacatctggcccggcagaaagatcatccaggagagacagaaggagcccagcgtgctgttcgaggtgcccaagctgaagagcggcaagagcgccctggaggccgagagcgagagcctggacagcttcaccgccgacagcgacagcaccagcagaagagacagcctggacaagagcggcctgttccccgagtggaagaagatgagcgcccccaagagccaggtggagaaggagacccagcccggcggccagaacgtggtgttcgtggacgagggcgagatgatcttcaagaagaacaccagaaagatcctgagacccagcgagtacaccaagagcgtgatcgacctgagacccgaggacgtggtgcacgagagcggcagcctgggcgacagaagcaagagcgtgcccggcctgaacgtggacatggaggaggaggaggaggaggaggacatcgaccacctggtgaagctgcacagacagaagctggccagaagcagcatgcagagcggcagcagcatggtgagcagcatcagaagcgtggtgaccggcatgctgggctactag

SEQ ID NO: 101543 - DNA, 2016 bp, synthetic construct; identical to SEQ ID NO: 101540
  misc_feature 1..2016: note = Description of Artificial Sequence: Synthetic coding sequence
  source 1..2016: mol_type = other DNA

SEQ ID NO: 101544 - DNA, 2022 bp, synthetic construct
  misc_feature 1..2022: note = Description of Artificial Sequence: Synthetic coding sequence
  source 1..2022: mol_type = other DNA
atgagcgagctgctggacctgagcttcctgagcgaggaggagaaggacctgatcctgagcgtgctgcagagagacgaggaggtgagaaaggccgacgagaagagaatcagaagactgaagaacgagctgctggagatcaagagaaagggcgccaagagaggcagccagcactacagcgacagaacctgcgccagatgccaggagagcctgggcagactgagccccaagaccaacacctgcagaggctgcaaccacctggtgtgcagagactgcagaatccaggagagcaacggcacctggagatgcaaggtgtgcgccaaggagatcgagctgaagaaggccaccggcgactggttctacgaccagaaggtgaacagattcgcctacagaaccggcagcgagatcatcagaatgagcctgagacacaagcccgccgtgagcaagagagagaccgtgggccagagcctgctgcaccagacccagatgggcgacatctggcccggcagaaagatcatccaggagagacagaaggagcccagcagcgtgctgttcgaggtgcccaagctgaagagcggcaagagcgccctggaggccgagagcgagagcctggacagcttcaccgccgacagcgacagcaccagcagaagagacagcctggacaagagcggcctgttccccgagtggaagaagatgagcgcccccaagagccaggtggagaaggagacccagcccggcggccagaacgtggtgttcgtggacgagggcgagatgatcttcaagaagaacaccagaaagatcctgagacccagcgagtacaccaagagcgtgatcgacctgagacccgaggacgtggtgcacgagagcggcagcctgggcgacagaagcaagagcgtgcccggcctgaacgtggacatggtggaggaggaggaggaggaggaggacatcgaccacctggtgaagctgcacagacagaagctggccagaagcagcatgcagagcggcagcagcatgagcaccatcggcagcatgatgagcatctacagcgaggccggcgacttcggcaacatcttcgtgaccggcagaatcgccttcagcctgaagtacgagcagcagacccagagcctggtggtgcacgtgaaggagtgccaccagctggcctacgccgacgaggccaagaagagaagcaacccctacgtgaagacctacctgctgcccgacaagagcagacagggcaagagaaagaccagcatcaagagagacaccatcaaccccctgtacgacgagaccctgagatacgagatccccgagagcctgctggcccagagaaccctgcagttcagcgtgtggcaccacggcagattcggcagaaacaccttcctgggcgaggccgagatccagatggacagctggaagctggacaagaagctggaccactgcctgcccctgcacggcaagatcagcgccgagagccccaccggcctgcccagccacaagggcgagctggtggtgagcctgaagtacatccccgccagcaagacccccgtgggcggcgacagaaagaagagcaagggcggcgagggcggcgagctgcaggtgtggatcaaggaggccaagaacctgaccgccgccaaggccggcggcaccagcgacagcttcgtgaagggctacctgctgcccatgagaaacaaggccagcaagagaaagacccccgtgatgaagaagaccctgaacccccactacaaccacaccttcgtgtacaacggcgtgagactggaggacctgcagcacatgtgcctggagctgaccgtgtgggacagagagcccctggccagcaacgacttcctgggcggcgtgagactgggcgtgggcaccggcatcagcaacggcgaggtggtggactggatggacagcaccggcgaggaggtgagcctgtggcagaagatgagacagtaccccggcagctgggccgagggcaccctgcagctgagaagcagcatggccaagcagaagctgggcctgtag

SEQ ID NO: 101545 - DNA, 2016 bp, synthetic construct; identical to SEQ ID NO: 101540
  misc_feature 1..2016: note = Description of Artificial Sequence: Synthetic coding sequence
  source 1..2016: mol_type = other DNA

SEQ ID NO: 101546 - DNA, 933 bp, synthetic construct
  misc_feature 1..933: note = Description of Artificial Sequence: Synthetic coding sequence
  source 1..933: mol_type = other DNA
atgagaagagccgccctgtggctgtggctgtgcgccctggccctgagcctgcagcccgccctgccccagatcgtggccaccaacctgccccccgaggaccaggacggcagcggcgacgacagcgacaacttcagcggcagcggcgccggcgccctgcaggacatcaccctgagccagcagacccccagcacctggaaggacacccagctgctgaccgccatccccaccagccccgagcccaccggcctggaggccaccgccgccagcaccagcaccctgcccgccggcgagggccccaaggagggcgaggccgtggtgctgcccgaggtggagcccggcctgaccgccagagagcaggaggccacccccagacccagagagaccacccagctgcccaccacccacctggccagcaccaccaccgccaccaccgcccaggagcccgccaccagccacccccacagagacatgcagcccggccaccacgagaccagcacccccgccggccccagccaggccgacctgcacaccccccacaccgaggacggcggccccagcgccaccgagagagccgccgaggacggcgccagcagccagctgcccgccgccgagggcagcggcgagcaggacttcaccttcgagaccagcggcgagaacaccgccgtggtggccgtggagcccgacagaagaaaccagagccccgtggaccagggcgccaccggcgccagccagggcctgctggacagaaaggaggtgctgggcggcgtgatcgccggcggcctggtgggcctgatcttcgccgtgtgcctggtgggcttcatgctgtacagaatgaagaagaaggacgagggcagctacagcctggaggagcccaagcaggccaacggcggcgcctaccagaagcccaccaagcaggaggagttctacgcctag

SEQ ID NO: 101547 - DNA, 933 bp, synthetic construct; identical to SEQ ID NO: 101546
  misc_feature 1..933: note = Description of Artificial Sequence: Synthetic coding sequence
  source 1..933: mol_type = other DNA

SEQ ID NO: 101548 - DNA, 606 bp, synthetic construct
  misc_feature 1..606: note = Description of Artificial Sequence: Synthetic coding sequence
  source 1..606: mol_type = other DNA
atgagaagagcctggatcctgctgaccctgggcctggtggcctgcgtgagcgccgagagcagagccgagctgaccagcgacaaggacatgtacctggacaacagcagcatcgaggaggccagcggcgtgtaccccatcgacgacgacgactacgccagcgccagcggcagcggcgccgacgaggacgtggagagccccgagctgaccaccagcagacccctgcccaagatcctgctgaccagcgccgcccccaaggtggagaccaccaccctgaacatccagaacaagatccccgcccagaccaagagccccgaggagaccgacaaggagaaggtgcacctgagcgacagcgagagaaagatggaccccgccgaggaggacaccaacgtgtacaccgagaagcacagcgacagcctgttcaagagaaccgaggtgctggccgccgtgatcgccggcggcgtgatcggcttcctgttcgccatcttcctgatcctgctgctggtgtacagaatgagaaagaaggacgagggcagctacgacctgggcgagagaaagcccagcagcgccgcctaccagaaggcccccaccaaggagttctacgcctag

SEQ ID NO: 101549 - DNA, 498 bp, synthetic construct
  misc_feature 1..498: note = Description of Artificial Sequence: Synthetic coding sequence
  source 1..498: mol_type = other DNA
atgagaagagcctggatcctgctgaccctgggcctggtggcctgcgtgagcgccgagagcgtgagagccgacgaggacgtggagagccccgagctgaccaccagcagacccctgcccaagatcctgctgaccagcgccgcccccaaggtggagaccaccaccctgaacatccagaacaagatccccgcccagaccaagagccccgaggagaccgacaaggagaaggtgcacctgagcgacagcgagagaaagatggaccccgccgaggaggacaccaacgtgtacaccgagaagcacagcgacagcctgttcaagagaaccgaggtgctggccgccgtgatcgccggcggcgtgatcggcttcctgttcgccatcttcctgatcctgctgctggtgtacagaatgagaaagaaggacgagggcagctacgacctgggcgagagaaagcccagcagcgccgcctaccagaaggcccccaccaaggagttctacgcctag

SEQ ID NO: 101550 - DNA, 519 bp, synthetic construct
  misc_feature 1..519: note = Description of Artificial Sequence: Synthetic coding sequence
  source 1..519: mol_type = other DNA
atgtacctggacaacagcagcatcgaggaggccagcggcgtgtaccccatcgacgacgacgactacgccagcgccagcggcagcggcgccgacgaggacgtggagagccccgagctgaccaccagcagacccctgcccaagatcctgctgaccagcgccgcccccaaggtggagaccaccaccctgaacatccagaacaagatccccgcccagaccaagagccccgaggagaccgacaaggagaaggtgcacctgagcgacagcgagagaaagatggaccccgccgaggaggacaccaacgtgtacaccgagaagcacagcgacagcctgttcaagagaaccgaggtgctggccgccgtgatcgccggcggcgtgatcggcttcctgttcgccatcttcctgatcctgctgctggtgtacagaatgagaaagaaggacgagggcagctacgacctgggcgagagaaagcccagcagcgccgcctaccagaaggcccccaccaaggagttctacgcctag

SEQ ID NO: 101551 - DNA, 519 bp, synthetic construct; identical to SEQ ID NO: 101550
  misc_feature 1..519: note = Description of Artificial Sequence: Synthetic coding sequence
  source 1..519: mol_type = other DNA

SEQ ID NO: 101552 - DNA, 606 bp, synthetic construct; identical to SEQ ID NO: 101548
  misc_feature 1..606: note = Description of Artificial Sequence: Synthetic coding sequence
  source 1..606: mol_type = other DNA

SEQ ID NO: 101553 - DNA, 576 bp, synthetic construct
  misc_feature 1..576: note = Description of Artificial Sequence: Synthetic coding sequence
  source 1..576: mol_type = other DNA
atgagagtggcctgcgtgagcgccgagagcagagccgagctgaccagcgacaaggacatgtacctggacaacagcagcatcgaggaggccagcggcgtgtaccccatcgacgacgacgactacgccagcgccagcggcagcggcgccgacgaggacgtggagagccccgagctgaccaccagcagacccctgcccaagatcctgctgaccagcgccgcccccaaggtggagaccaccaccctgaacatccagaacaagatccccgcccagaccaagagccccgaggagaccgacaaggagaaggtgcacctgagcgacagcgagagaaagatggaccccgccgaggaggacaccaacgtgtacaccgagaagcacagcgacagcctgttcaagagaaccgaggtgctggccgccgtgatcgccggcggcgtgatcggcttcctgttcgccatcttcctgatcctgctgctggtgtacagaatgagaaagaaggacgagggcagctacgacctgggcgagagaaagcccagcagcgccgcctaccagaaggcccccaccaaggagttctacgcctag

SEQ ID NO: 101554 - DNA, 1155 bp, synthetic construct
  misc_feature 1..1155: note = Description of Artificial Sequence: Synthetic coding sequence
  source 1..1155: mol_type = other DNA
atggccatcgcctacctgggcagcagctgccccagccagccccccagcagcctggccctgagcctgagccccacccccagcgacttcgagcaggagagcggcatcgagaccgccatgagattcagccccgacgtggccctggccgtgagcaccacccccgccgtgctgcccaccaccaacatccagcccgtgggcacccccttcgaggagctgcccagcgagagacccaccctggagcccgccaccagccccctggtggtgaccgaggtgcccgaggagcccagccagagagccaccaccgtgagcaccaccatggccaccaccgccgccaccagcaccggcgaccccaccgtggccaccgtgcccgccaccgtggccaccgccacccccagcacccccgccgccccccccttcaccgccaccaccgccgtgatcagaaccaccggcgtgagaagactgctgcccctgcccctgaccaccgtggccaccgccagagccaccacccccgaggcccccagcccccccaccaccgccgccgtgctggacaccgaggcccccacccccagactggtgagcaccgccaccagcagacccagagccctgcccagacccgccaccacccaggagcccgacatccccgagagaagcaccctgcccctgggcaccaccgcccccggccccaccgaggtggcccagacccccacccccgagaccttcctgaccaccatcagagacgagcccgaggtgcccgtgagcggcggccccagcggcgacttcgagctgcccgaggaggagaccacccagcccgacaccgccaacgaggtggtggccgtgggcggcgccgccgccaaggccagcagcccccccggcaccctgcccaagggcgccagacccggccccggcctgctggacaacgccatcgacagcggcagcagcgccgcccagctgccccagaagagcatcctggagagaaaggaggtgctggtggccgtgatcgtgggcggcgtggtgggcgccctgttcgccgccttcctggtgaccctgctgatctacagaatgaagaagaaggacgagggcagctacaccctggaggagcccaagcaggccagcgtgacctaccagaagcccgacaagcaggaggagttctacgcctag

SEQ ID NO: 101555 - DNA, 1329 bp, synthetic construct
  misc_feature 1..1329: note = Description of Artificial Sequence: Synthetic coding sequence
  source 1..1329: mol_type = other DNA
atgaagcccggccccccccacagagccggcgccgcccacggcgccggcgccggcgccggcgccgccgccggccccggcgccagaggcctgctgctgccccccctgctgctgctgctgctggccggcagagccgccggcgcccagagatggagaagcgagaacttcgagagacccgtggacctggagggcagcggcgacgacgacagcttccccgacgacgagctggacgacctgtacagcggcagcggcagcggctacttcgagcaggagagcggcatcgagaccgccatgagattcagccccgacgtggccctggccgtgagcaccacccccgccgtgctgcccaccaccaacatccagcccgtgggcacccccttcgaggagctgcccagcgagagacccaccctggagcccgccaccagccccctggtggtgaccgaggtgcccgaggagcccagccagagagccaccaccgtgagcaccaccatggccaccaccgccgccaccagcaccggcgaccccaccgtggccaccgtgcccgccaccgtggccaccgccacccccagcacccccgccgccccccccttcaccgccaccaccgccgtgatcagaaccaccggcgtgagaagactgctgcccctgcccctgaccaccgtggccaccgccagagccaccacccccgaggcccccagcccccccaccaccgccgccgtgctggacaccgaggcccccacccccagactggtgagcaccgccaccagcagacccagagccctgcccagacccgccaccacccaggagcccgacatccccgagagaagcaccctgcccctgggcaccaccgcccccggccccaccgaggtggcccagacccccacccccgagaccttcctgaccaccatcagagacgagcccgaggtgcccgtgagcggcggccccagcggcgacttcgagctgcccgaggaggagaccacccagcccgacaccgccaacgaggtggtggccgtgggcggcgccgccgccaaggccagcagcccccccggcaccctgcccaagggcgccagacccggccccggcctgctggacaacgccatcgacagcggcagcagcgccgcccagctgccccagaagagcatcctggagagaaaggaggtgctggtggccgtgatcgtgggcggcgtggtgggcgccctgttcgccgccttcctggtgaccctgctgatctacagaatgaagaagaaggacgagggcagctacaccctggaggagcccaagcaggccagcgtgacctaccagaagcccgacaagcaggaggagttctacgcctag

SEQ ID NO: 101556 - DNA, 597 bp, synthetic construct
  misc_feature 1..597: note = Description of Artificial Sequence: Synthetic coding sequence
  source 1..597: mol_type = other DNA
atggcccccgccagactgttcgccctgctgctgttcttcgtgggcggcgtggccgagagcatcagagagaccgaggtgatcgacccccaggacctgctggagggcagatacttcagcggcgccctgcccgacgacgaggacgtggtgggccccggccaggagagcgacgacttcgagctgagcggcagcggcgacctggacgacctggaggacagcatgatcggccccgaggtggtgcaccccctggtgcccctggacaaccacatccccgagagagccggcagcggcagccaggtgcccaccgagcccaagaagctggaggagaacgaggtgatccccaagagaatcagccccgtggaggagagcgaggacgtgagcaacaaggtgagcatgagcagcaccgtgcagggcagcaacatcttcgagagaaccgaggtgctggccgccctgatcgtgggcggcatcgtgggcatcctgttcgccgtgttcctgatcctgctgctgatgtacagaatgaagaagaaggacgagggcagctacgacctgggcaagaagcccatctacaagaaggcccccaccaacgagttctacgcctag

SEQ ID NO: 101557 - DNA, 381 bp, synthetic construct
  misc_feature 1..381: note = Description of Artificial Sequence: Synthetic coding sequence
  source 1..381: mol_type = other DNA
atgatcggccccgaggtggtgcaccccctggtgcccctggacaaccacatccccgagagagccggcagcggcagccaggtgcccaccgagcccaagaagctggaggagaacgaggtgatccccaagagaatcagccccgtggaggagagcgaggacgtgagcaacaaggtgagcatgagcagcaccgtgcagggcagcaacatcttcgagagaaccgaggtgctggccgccctgatcgtgggcggcatcgtgggcatcctgttcgccgtgttcctgatcctgctgctgatgtacagaatgaagaagaaggacgagggcagctacgacctgggcaagaagcccatctacaagaaggcccccaccaacgagttctacgcctag

SEQ ID NO: 101558 - DNA, 1851 bp, synthetic construct
  misc_feature 1..1851: note = Description of Artificial Sequence: Synthetic coding sequence
  source 1..1851: mol_type = other DNA
atgttcagaaccgccgtgatgatggccgccagcctggccctgaccggcgccgtggtggcccacgcctactacctgaagcaccagttctaccccaccgtggtgtacctgaccaagagcagccccagcatggccgtgctgtacatccaggccttcgtgctggtgttcctgctgggcaaggtgatgggcaaggtgttcttcggccagctgagagccgccgagatggagcacctgctggagagaagctggtacgccgtgaccgagacctgcctggccttcaccgtgttcagagacgacttcagccccagattcgtggccctgttcaccctgctgctgttcctgaagtgcttccactggctggccgaggacagagtggacttcatggagagaagccccaacatcagctggctgttccactgcagaatcgtgagcctgatgttcctgctgggcatcctggacttcctgttcgtgagccacgcctaccacagcatcctgaccagaggcgccagcgtgcagctggtgttcggcttcgagtacgccatcctgatgaccatggtgctgaccatcttcatcaagtacgtgctgcacagcgtggacctgcagagcgagaacccctgggacaacaaggccgtgtacatgctgtacaccgagctgttcaccggcttcatcaaggtgctgctgtacatggccttcatgaccatcatgatcaaggtgcacaccttccccctgttcgccatcagacccatgtacctggccatgagacagttcaagaaggccgtgaccgacgccatcatgagcagaagagccatcagaaacatgaacaccctgtaccccgacgccacccccgaggagctgcaggccatggacaacgtgtgcatcatctgcagagaggagatggtgaccggcgccaagagactgccctgcaaccacatcttccacaccagctgcctgagaagctggttccagagacagcagacctgccccacctgcagaatggacgtgctgagagccagcctgcccgcccagagcccccccccccccgagcccgccgaccagggccccccccccgccccccaccccccccccctgctgccccagccccccaacttcccccagggcctgctgccccccttcccccccggcatgttccccctgtggccccccatgggccccttcccccccgtgccccccccccccagcagcggcgaggccgtggccccccccagcaccagcgccgccctgagcagacccagcggcgccgccaccaccaccgccgccggcaccagcgccaccgccgccagcgccaccgccagcggccccggcagcggcagcgcccccgaggccggccccgcccccggcttccccttcccccccccctggatgggcatgcccctgcccccccccttcgccttcccccccatgcccgtgccccccgccggcttcgccggcctgacccccgaggagctgagagccctggagggccacgagagacagcacctggaggccagactgcagagcctgagaaacatccacaccctgctggacgccgccatgctgcagatcaaccagtacctgaccgtgctggccagcctgggcccccccagacccgccaccagcgtgaacagcaccgaggagaccgccaccaccgtggtggccgccgccagcagcaccagcatccccagcagcgaggccaccacccccacccccggcgccagcccccccgcccccgagatggagagaccccccgcccccgagagcgtgggcaccgaggagatgcccgaggacggcgagcccgacgccgccgagctgagaagaagaagactgcagaagctggagagccccgtggcccactag

SEQ ID NO: 101559 - DNA, 1698 bp, synthetic construct
  misc_feature 1..1698: note = Description of Artificial Sequence: Synthetic coding sequence
  source 1..1698: mol_type = other DNA
atgttcagaaccgccgtgatgatggccgccagcctggccctgaccggcgccgtggtggcccacgcctactacctgaagcaccagttctaccccaccgtggtgtacctgaccaagagcagccccagcatggccgtgctgtacatccaggccttcgtgctggtgttcctgctgggcaaggtgatgggcaaggtgttcttcggccagctgagagccgccgagatggagcacctgctggagagaagctggtacgccgtgaccgagacctgcctggccttcaccgtgttcagagacgacttcagccccagattcgtggccctgttcaccctgctgctgttcctgaagtgcttccactggctggccgaggacagagtggacttctacgccatcctgatgaccatggtgctgaccatcttcatcaagtacgtgctgcacagcgtggacctgcagagcgagaacccctgggacaacaaggccgtgtacatgctgtacaccgagctgttcaccggcttcatcaaggtgctgctgtacatggccttcatgaccatcatgatcaaggtgcacaccttccccctgttcgccatcagacccatgtacctggccatgagacagttcaagaaggccgtgaccgacgccatcatgagcagaagagccatcagaaacatgaacaccctgtaccccgacgccacccccgaggagctgcaggccatggacaacgtgtgcatcatctgcagagaggagatggtgaccggcgccaagagactgccctgcaaccacatcttccacaccagctgcctgagaagctggttccagagacagcagacctgccccacctgcagaatggacgtgctgagagccagcctgcccgcccagagcccccccccccccgagcccgccgaccagggccccccccccgccccccaccccccccccctgctgccccagccccccaacttcccccagggcctgctgccccccttcccccccggcatgttccccctgtggccccccatgggccccttcccccccgtgccccccccccccagcagcggcgaggccgtggccccccccagcaccagcgccgccctgagcagacccagcggcgccgccaccaccaccgccgccggcaccagcgccaccgccgccagcgccaccgccagcggccccggcagcggcagcgcccccgaggccggccccgcccccggcttccccttcccccccccctggatgggcatgcccctgcccccccccttcgccttcccccccatgcccgtgccccccgccggcttcgccggcctgacccccgaggagctgagagccctggagggccacgagagacagcacctggaggccagactgcagagcctgagaaacatccacaccctgctggacgccgccatgctgcagatcaaccagtacctgaccgtgctggccagcctgggcccccccagacccgccaccagcgtgaacagcaccgaggagaccgccaccaccgtggtggccgccgccagcagcaccagcatccccagcagcgaggccaccacccccacccccggcgccagcccccccgcccccgagatggagagaccccccgcccccgagagcgtgggcaccgaggagatgcccgaggacggcgagcccgacgccgccgagctgagaagaagaagactgcagaagctggagagccccgtggcccactag

SEQ ID NO: 101560 - DNA, 1854 bp, synthetic construct
  misc_feature 1..1854: note = Description of Artificial Sequence: Synthetic coding sequence
  source 1..1854: mol_type = other DNA
atgttcagaaccgccgtgatgatggccgccagcctggccctgaccggcgccgtggtggcccacgcctactacctgaagcaccagttctaccccaccgtggtgtacctgaccaagagcagccccagcatggccgtgctgtacatccaggccttcgtgctggtgttcctgctgggcaaggtgatgggcaaggtgttcttcggccagctgagagccgccgagatggagcacctgctggagagaagctggtacgccgtgaccgagacctgcctggccttcaccgtgttcagagacgacttcagccccagattcgtggccctgttcaccctgctgctgttcctgaagtgcttccactggctggccgaggacagagtggacttcatggagagaagccccaacatcagctggctgttccactgcagaatcgtgagcctgatgttcctgctgggcatcctggacttcctgttcgtgagccacgcctaccacagcatcctgaccagaggcgccagcgtgcagctggtgttcggcttcgagtacgccatcctgatgaccatggtgctgaccatcttcatcaagtacgtgctgcacagcgtggacctgcagagcgagaacccctgggacaacaaggccgtgtacatgctgtacaccgagctgttcaccggcttcatcaaggtgctgctgtacatggccttcatgaccatcatgatcaaggtgcacaccttccccctgttcgccatcagacccatgtacctggccatgagacagttcaagaaggccgtgaccgacgccatcatgagcagaagagccatcagaaacatgaacaccctgtaccccgacgccacccccgaggagctgcaggccatggacaacgtgtgcatcatctgcagagaggagatggtgaccggcgccaagagactgccctgcaaccacatcttccacaccagctgcctgagaagctggttccagagacagcagacctgccccacctgcagaatggacgtgctgagagccagcctgcccgcccagagcccccccccccccgagcccgccgaccagggccccccccccgccccccaccccccccccctgctgccccagccccccaacttcccccagggcctgctgccccccttcccccccggcatgttccccctgtggccccccatgggccccttcccccccgtgccccccccccccagcagcggcgaggccgtggccccccccagcaccagcgccgccgccctgagcagacccagcggcgccgccaccaccaccgccgccggcaccagcgccaccgccgccagcgccaccgccagcggccccggcagcggcagcgcccccgaggccggccccgcccccggcttccccttcccccccccctggatgggcatgcccctgcccccccccttcgccttcccccccatgcccgtgccccccgccggcttcgccggcctgacccccgaggagctgagagccctggagggccacgagagacagcacctggaggccagactgcagagcctgagaaacatccacaccctgctggacgccgccatgctgcagatcaaccagtacctgaccgtgctggccagcctgggcccccccagacccgccaccagcgtgaacagcaccgaggagaccgccaccaccgtggtggccgccgccagcagcaccagcatccccagcagcgaggccaccacccccacccccggcgccagcccccccgcccccgagatggagagaccccccgcccccgagagcgtgggcaccgaggagatgcccgaggacggcgagcccgacgccgccgagctgagaagaagaagactgcagaagctggagagccccgtggcccactag

SEQ ID NO: 101561 - DNA, 1890 bp, synthetic construct
  misc_feature 1..1890: note = Description of Artificial Sequence: Synthetic coding sequence
  source 1..1890: mol_type = other DNA
atgttcagaaccgccgtgatgatggccgccagcctggccctgaccggcgccgtggtggcccacgcctactacctgaagcaccagttctaccccaccgtggtgtacctgaccaagagcagccccagcatggccgtgctgtacatccaggccttcgtgctggtgttcctgctgggcaaggtgatgggcaaggtgttcttcggccagctgagagccgccgagatggagcacctgctggagagaagctggtacgccgtgaccgagacctgcctggccttcaccgtgttcagagacgacttcagccccagattcgtggccctgttcaccctgctgctgttcctgaagtgcttccactggctggccgaggacagagtggacttcatggagagaagccccaacatcagctggctgttccactgcagaatcgtgagcctgatgttcctgctgggcatcctggacttcctgttcgtgagccacgcctaccacagcatcctgaccagaggcgccagcgtgcagctggtgttcggcttcgagtacgccatcctgatgaccatggtgctgaccatcttcatcaagtacgtgctgcacagcgtggacctgcagagcgagaacccctgggacaacaaggccgtgtacatgctgtacaccgagctgttcaccggcttcatcaaggtgctgctgtacatggccttcatgaccatcatgatcaaggtgcacaccttccccctgttcgccatcagacccatgtacctggccatgagacagttcaagaaggccgtgaccgacgccatcatgagcagaagagccatcagaaacatgaacaccctgtaccccgacgccacccccgaggagctgcaggccatggacaacgtgtgcatcatctgcagagaggagatggtgaccggcgccaagagactgccctgcaaccacatcttccacaccagctgcctgagaagctggttccagagacagcagacctgccccacctgcagaatggacgtgctgagagccagcctgcccgcccagagcccccccccccccgagcccgccgaccagggccccccccccgccccccaccccccccccctgctgccccagccccccaacttcccccagggcctgctgccccccttcccccccggcatgttccccctgtggccccccatgggccccttcccccccgtgccccccccccccagcagcggcgaggccgtggccccccccagcaccagcgccgccgccctgagcagacccagcggcgccgccaccaccaccgccgccggcaccagcgccaccgccgccagcgccaccgccagcggccccggcagcggcagcgcccccgaggccggccccgcccccggcttccccttcccccccccctggatgggcatgcccctgcccccccccttcgccttcccccccatgcccgtgccccccgccggcttcgccggcctgacccccgaggagctgagagccctggagggccacgagagacagcacctggaggccagactgcagagcctgagaaacatccacaccctgctggacgccgccatgctgcagatcaaccagtacctgaccgtgctggccagcctgggcccccccggcctgcccctgcagagcacccccctgagaagactgcccctgcagctgctgctgctgccccccccccccgccagcctggcccagagacccagaccccagccccaggagcccccccaccagcccctgaagtggaagggcctgcagctgctgagccagtgggcccagagaagatgcctgagaatggagagccccatgcagcagagcagcgccggcgccgcctgcagaagctggagcctgctgctgcccaccgacaccgcccccgcccagccccagcccctgctgttctag

SEQ ID NO: 101562 - DNA, 1851 bp, synthetic construct; identical to SEQ ID NO: 101558
  misc_feature 1..1851: note = Description of Artificial Sequence: Synthetic coding sequence
  source 1..1851: mol_type = other DNA

SEQ ID NO: 101563 - DNA, 1191 bp, synthetic construct
  misc_feature 1..1191: note = Description of Artificial Sequence: Synthetic coding sequence
  source 1..1191: mol_type = other DNA
atgagcgtggccttcgccagcgccagacccagaggcaagggcgaggtgacccagcagaccatccagaagatgctggacgagaaccaccacctgatccagtgcatcctggagtaccagagcaagggcaagaccgccgagtgcacccagtaccagcagatcctgcacagaaacctggtgtacctggccaccatcgccgacagcaaccagaacatgcagagcctgctgcccgccccccccacccagaacatgaacctgggccccggcgccctgacccagagcggcagcagccagggcctgcacagccagggcagcctgagcgacgccatcagcaccggcctgccccccagcagcctgctgcagggccagatcggcaacggccccagccacgtgagcatgcagcagaccgcccccaacaccctgcccaccaccagcatgagcatcagcggccccggctacagccacgccggccccgccagccagggcgtgcccatgcagggccagggcaccatcggcaactacgtgagcagaaccaacatcaacatgcagagcaaccccgtgagcatgatgcagcagcaggccgccaccagccactacagcagcgcccagggcggcagccagcactaccagggccagagcagcatcgccatgatgggccagggcagccagggcagcagcatgatgggccagagacccatggccccctacagacccagccagcagggcagcagccagcagtacctgggccaggaggagtactacggcgagcagtacagccacagccagggcgccgccgagcccatgggccagcagtactaccccgacggccacggcgactacgcctaccagcagagcagctacaccgagcagagctacgacagaagcttcgaggagagcacccagcactactacgagggcggcaacagccagtacagccagcagcaggccggctaccagcagggcgccgcccagcagcagacctacagccagcagcagtaccccagccagcagagctaccccggccagcagcagggctacggcagcgcccagggcgcccccagccagtaccccggctaccagcagggccagggccagcagtacggcagctacagagccccccagaccgcccccagcgcccagcagcagagaccctacggctacgagcagggccagtacggcaactaccagcagtag

SEQ ID NO: 101564 - DNA, 1200 bp, synthetic construct
  misc_feature 1..1200: note = Description of Artificial Sequence: Synthetic coding sequence
  source 1..1200: mol_type = other DNA
atgcagagcctgagcaccgaggccagatacgtgcccagagtgccccagcacagagaccagatcagccccagaagcccccagcacggcggccagatctgccccagaagccccctgcacagaggccagatctgccccagaagcccccccgccagaagataccagcagatcctgcacagaaacctggtgtacctggccaccatcgccgacagcaaccagaacatgcagagcctgctgcccgccccccccacccagaacatgaacctgggccccggcgccctgacccagagcggcagcagccagggcctgcacagccagggcagcctgagcgacgccatcagcaccggcctgccccccagcagcctgctgcagggccagatcggcaacggccccagccacgtgagcatgcagcagaccgcccccaacaccctgcccaccaccagcatgagcatcagcggccccggctacagccacgccggccccgccagccagggcgtgcccatgcagggccagggcaccatcggcaactacgtgagcagaaccaacatcaacatgcagagcaaccccgtgagcatgatgcagcagcaggccgccaccagccactacagcagcgcccagggcggcagccagcactaccagggccagagcagcatcgccatgatgggccagggcagccagggcagcagcatgatgggccagagacccatggccccctacagacccagccagcagggcagcagccagcagtacctgggccaggaggagtactacggcgagcagtacagccacagccagggcgccgccgagcccatgggccagcagtactaccccgacggccacggcgactacgcctaccagcagagcagctacaccgagcagagctacgacagaagcttcgaggagagcacccagcactactacgagggcggcaacagccagtacagccagcagcaggccggctaccagcagggcgccgcccagcagcagacctacagccagcagcagtaccccagccagcagagctaccccggccagcagcagggctacggcagcgcccagggcgcccccagccagtaccccggctaccagcagggccagggccagcagtacggcagctacagagccccccagaccgcccccagcgcccagcagcagagaccctacggctacgagcagggccagtacggcaactaccagcagtag

SEQ ID NO: 101565 - DNA, 1191 bp, synthetic construct; identical to SEQ ID NO: 101563
  misc_feature 1..1191: note = Description of Artificial Sequence: Synthetic coding sequence
  source 1..1191: mol_type = other DNA

SEQ ID NO: 101566 - DNA, 387 bp, synthetic construct
  misc_feature 1..387: note = Description of Artificial Sequence: Synthetic coding sequence
  source 1..387: mol_type = other DNA
atgcagagcctgagcaccgaggccagatacgtgcccagagtgccccagcacagagaccagatcagccccagaagcccccagcacggcggccagatctgccccagaagccccctgcacagaggccagatctgccccagaagcccccccgccagaagataccagcagatcctgcacagaaacctggtgtacctggccaccatcgccgacagcaaccagaacatgcagagcctgctgcccgccccccccacccagaacatgaacctgggccccggcgccctgacccagagcggcagcagccagggcctgcacagccagggcagcctgagcgacgccatcagcaccggcctgccccccagcagcctgctgcagggccagatcggcaactag

SEQ ID NO: 101567 - DNA, 234 bp, synthetic construct
  misc_feature 1..234: note = Description of Artificial Sequence: Synthetic coding sequence
  source 1..234: mol_type = other DNA
atgagcgtggccttcgtgcccgactggctgagaggcaaggccgaggtgaaccaggagaccatccagagactgctggaggagaacgaccagctgatcagatgcatcgtggagtaccagaacaagggcagaggcaacgagtgcgtgcagtaccagcacgtgctgcacagaaacctgatctacctggccaccatcgccgacgccagccccaccagcaccagcaaggccatggagtag

SEQ ID NO: 101568 - DNA, 234 bp, synthetic construct; identical to SEQ ID NO: 101567
  misc_feature 1..234: note = Description of Artificial Sequence: Synthetic coding sequence
  source 1..234: mol_type = other DNA

SEQ ID NO: 101569 - DNA, 1164 bp, synthetic construct
  misc_feature 1..1164: note = Description of Artificial Sequence: Synthetic coding sequence
  source 1..1164: mol_type = other DNA
atgagcgtggccttcgccgcccccagacagagaggcaagggcgagatcacccccgccgccatccagaagatgctggacgacaacaaccacctgatccagtgcatcatggacagccagaacaagggcaagaccagcgagtgcagccagtaccagcagatgctgcacaccaacctggtgtacctggccaccatcgccgacagcaaccagaacatgcagagcctgctgcccgccccccccacccagaacatgcccatgggccccggcggcatgaaccagagcggccccccccccccccccagaagccacaacatgcccagcgacggcatggtgggcggcggcccccccgccccccacatgcagaaccagatgaacggccagatgcccggccccaaccacatgcccatgcagggccccggccccaaccagctgaacatgaccaacagcagcatgaacatgcccagcagcagccacggcagcatgggcggctacaaccacagcgtgcccagcagccagagcatgcccgtgcagaaccagatgaccatgagccagggccagcccatgggcaactacggccccagacccaacatgagcatgcagcccaaccagggccccatgatgcaccagcagccccccagccagcagtacaacatgccccagggcggcggccagcactaccagggccagcagccccccatgggcatgatgggccaggtgaaccagggcaaccacatgatgggccagagacagatccccccctacagacccccccagcagggccccccccagcagtacagcggccaggaggactactacggcgaccagtacagccacggcggccagggcccccccgagggcatgaaccagcagtactaccccgacggcaacagccagtacggccagcagcaggacgcctaccagggcccccccccccagcagggctaccccccccagcagcagcagtaccccggccagcagggctaccccggccagcagcagggctacggccccagccagggcggccccggcccccagtaccccaactacccccagggccagggccagcagtacggcggctacagacccacccagcccggccccccccagcccccccagcagagaccctacggctacgaccagggccagtacggcaactaccagcagtag

SEQ ID NO: 101570 - DNA, 1257 bp, synthetic construct
  misc_feature 1..1257: note = Description of Artificial Sequence: Synthetic coding sequence
  source 1..1257: mol_type = other DNA
atgagcgtggccttcgccgcccccagacagagaggcaagggcgagatcacccccgccgccatccagaagatgctggacgacaacaaccacctgatccagtgcatcatggacagccagaacaagggcaagaccagcgagtgcagccagtaccagcagatgctgcacaccaacctggtgtacctggccaccatcgccgacagcaaccagaacatgcagagcctgctgcccgccccccccacccagaacatgcccatgggccccggcggcatgaaccagagcggccccccccccccccccagaagccacaacatgcccagcgacggcatggtgggcggcggcccccccgccccccacatgcagaaccagatgaacggccagatgcccggccccaaccacatgcccatgcagggccccggccccaaccagctgaacatgaccaacagcagcatgaacatgcccagcagcagccacggcagcatgggcggctacaaccacagcgtgcccagcagccagagcatgcccgtgcagaaccagatgaccatgagccagggccagcccatgggcaactacggccccagacccaacatgagcatgcagcccaaccagggccccatgatgcaccagcagccccccagccagcagtacaacatgccccagggcggcggccagcactaccagggccagcagccccccatgggcatgatgggccaggtgaaccagggcaaccacatgatgggccagagacagatccccccctacagacccccccagcagggccccccccagcagtacagcggccaggaggactactacggcgaccagtacagccacggcggccagggcccccccgagggcatgaaccagcagtactaccccgacggccacaacgactacggctaccagcagcccagctaccccgagcagggctacgacagaccctacgaggacagcagccagcactactacgagggcggcaacagccagtacggccagcagcaggacgcctaccagggcccccccccccagcagggctaccccccccagcagcagcagtaccccggccagcagggctaccccggccagcagcagggctacggccccagccagggcggccccggcccccagtaccccaactacccccagggccagggccagcagtacggcggctacagacccacccagcccggccccccccagcccccccagcagagaccctacggctacgaccagggccagtacggcaactaccagcagtag

SEQ ID NO: 101571 - DNA, 1266 bp, synthetic construct
  misc_feature 1..1266: note = Description of Artificial Sequence: Synthetic coding sequence
  source 1..1266: mol_type = other DNA
ggcggcaacatgagcgtggccttcgccgcccccagacagagaggcaagggcgagatcacccccgccgccatccagaagatgctggacgacaacaaccacctgatccagtgcatcatggacagccagaacaagggcaagaccagcgagtgcagccagtaccagcagatgctgcacaccaacctggtgtacctggccaccatcgccgacagcaaccagaacatgcagagcctgctgcccgccccccccacccagaacatgcccatgggccccggcggcatgaaccagagcggccccccccccccccccagaagccacaacatgcccagcgacggcatggtgggcggcggcccccccgccccccacatgcagaaccagatgaacggccagatgcccggccccaaccacatgcccatgcagggccccggccccaaccagctgaacatgaccaacagcagcatgaacatgcccagcagcagccacggcagcatgggcggctacaaccacagcgtgcccagcagccagagcatgcccgtgcagaaccagatgaccatgagccagggccagcccatgggcaactacggccccagacccaacatgagcatgcagcccaaccagggccccatgatgcaccagcagccccccagccagcagtacaacatgccccagggcggcggccagcactaccagggccagcagccccccatgggcatgatgggccaggtgaaccagggcaaccacatgatgggccagagacagatccccccctacagacccccccagcagggccccccccagcagtacagcggccaggaggactactacggcgaccagtacagccacggcggccagggcccccccgagggcatgaaccagcagtactaccccgacggccacaacgactacggctaccagcagcccagctaccccgagcagggctacgacagaccctacgaggacagcagccagcactactacgagggcggcaacagccagtacggccagcagcaggacgcctaccagggcccccccccccagcagggctaccccccccagcagcagcagtaccccggccagcagggctaccccggccagcagcagggctacggccccagccagggcggccccggcccccagtaccccaactacccccagggccagggccagcagtacggcggctacagacccacccagcccggccccccccagcccccccagcagagaccctacggctacgaccagggccagtacggcaactaccagcagtag

SEQ ID NO: 101572 - DNA, 399 bp, synthetic construct
  misc_feature 1..399: note = Description of Artificial Sequence: Synthetic coding sequence
  source 1..399: mol_type = other DNA
atgaaccagcagtactaccccgacggccacaacgactacggctaccagcagcccagctaccccgagcagggctacgacagaccctacgaggacagcagccagcactactacgagggcggcaacagccagtacggccagcagcaggacgcctaccagggcccccccccccagcagggctaccccccccagcagcagcagtaccccggccagcagggctaccccggccagcagcagggctacggccccagccagggcggccccggcccccagtaccccaactacccccagggccagggccagcagtacggcggctacagacccacccagcccggccccccccagcccccccagcagagaccctacggctacgaccagaacagcagatggaccgtgtgctag

SEQ ID NO: 101573 - DNA, 1011 bp, synthetic construct
  misc_feature 1..1011: note = Description of Artificial Sequence: Synthetic coding sequence
  source 1..1011: mol_type = other DNA
atgcccatgggccccggcggcatgaaccagagcggccccccccccccccccagaagccacaacatgcccagcgacggcatggtgggcggcggcccccccgccccccacatgcagaaccagatgaacggccagatgcccggccccaaccacatgcccatgcagggccccggccccaaccagctgaacatgaccaacagcagcatgaacatgcccagcagcagccacggcagcatgggcggctacaaccacagcgtgcccagcagccagagcatgcccgtgcagaaccagatgaccatgagccagggccagcccatgggcaactacggccccagacccaacatgagcatgcagcccaaccagggccccatgatgcaccagcagccccccagccagcagtacaacatgccccagggcggcggccagcactaccagggccagcagccccccatgggcatgatgggccaggtgaaccagggcaaccacatgatgggccagagacagatccccccctacagacccccccagcagggccccccccagcagtacagcggccaggaggactactacggcgaccagtacagccacggcggccagggcccccccgagggcatgaaccagcagtactaccccgacggccacaacgactacggctaccagcagcccagctaccccgagcagggctacgacagaccctacgaggacagcagccagcactactacgagggcggcaacagccagtacggccagcagcaggacgcctaccagggcccccccccccagcagggctaccccccccagcagcagcagtaccccggccagcagggctaccccggccagcagcagggctacggccccagccagggcggccccggcccccagtaccccaactacccccagggccagggccagcagtacggcggctacagacccacccagcccggccccccccagcccccccagcagagaccctacggctacgaccagggccagtacggcaactaccagcagtag

SEQ ID NO: 101574 - DNA, 1188 bp, synthetic construct
  misc_feature 1..1188: note = Description of Artificial Sequence: Synthetic coding sequence
  source 1..1188: mol_type = other DNA
atgctggacgacaacaaccacctgatccagtgcatcatggacagccagaacaagggcaagaccagcgagtgcagccagtaccagcagatgctgcacaccaacctggtgtacctggccaccatcgccgacagcaaccagaacatgcagagcctgctgcccgccccccccacccagaacatgcccatgggccccggcggcatgaaccagagcggccccccccccccccccagaagccacaacatgcccagcgacggcatggtgggcggcggcccccccgccccccacatgcagaaccagatgaacggccagatgcccggccccaaccacatgcccatgcagggccccggccccaaccagctgaacatgaccaacagcagcatgaacatgcccagcagcagccacggcagcatgggcggctacaaccacagcgtgcccagcagccagagcatgcccgtgcagaaccagatgaccatgagccagggccagcccatgggcaactacggccccagacccaacatgagcatgcagcccaaccagggccccatgatgcaccagcagccccccagccagcagtacaacatgccccagggcggcggccagcactaccagggccagcagccccccatgggcatgatgggccaggtgaaccagggcaaccacatgatgggccagagacagatccccccctacagacccccccagcagggccccccccagcagtacagcggccaggaggactactacggcgaccagtacagccacggcggccagggcccccccgagggcatgaaccagcagtactaccccgacggccacaacgactacggctaccagcagcccagctaccccgagcagggctacgacagaccctacgaggacagcagccagcactactacgagggcggcaacagccagtacggccagcagcaggacgcctaccagggcccccccccccagcagggctaccccccccagcagcagcagtaccccggccagcagggctaccccggccagcagcagggctacggccccagccagggcggccccggcccccagtaccccaactacccccagggccagggccagcagtacggcggctacagacccacccagcccggccccccccagcccccccagcagagaccctacggctacgaccagggccagtacggcaactaccagcagtag

SEQ ID NO: 101575 - DNA, 1008 bp, synthetic construct
  misc_feature 1..1008: note = Description of Artificial Sequence: Synthetic coding sequence
  source 1..1008: mol_type = other DNA
atgctgcacaccaacctggtgtacctggccaccatcgccgacagcaaccagaacatgcagagcctgctgcccgccccccccacccagaacatgcccatgggccccggcggcatgaaccagagcggccccccccccccccccagaagccacaacatgcccagcgacggcatggtgggcggcggcccccccgccccccacatgcagaaccagatgaacggccagatgcccggccccaaccacatgcccatgcagggccccggccccaaccagctgaacatgaccaacagcagcatgaacatgcccagcagcagccacggcagcatgggcggctacaaccacagcgtgcccagcagccagagcatgcccgtgcagaaccagatgaccatgagccagggccagcccatgggcaactacggccccagacccaacatgagcatgcagcccaaccagggccccatgatgcaccagcagccccccagccagcagtacaacatgccccagggcggcggccagcactaccagggccagcagccccccatgggcatgatgggccaggtgaaccagggcaaccacatgatgggccagagacagatccccccctacagacccccccagcagggccccccccagcagtacagcggccaggaggactactacggcgaccagtacagccacggcggccagggcccccccgagggcatgaaccagcagtactaccccgacggcaacagccagtacggccagcagcaggacgcctaccagggcccccccccccagcagggctaccccccccagcagcagcagtaccccggccagcagggctaccccggccagcagcagggctacggccccagccagggcggccccggcccccagtaccccaactacccccagggccagggccagcagtacggcggctacagacccacccagcccggccccccccagcccccccagcagagaccctacggctacgaccagggccagtacggcaactaccagcagtag

SEQ ID NO: 101576 - DNA, 1008 bp, synthetic construct; identical to SEQ ID NO: 101575
  misc_feature 1..1008: note = Description of Artificial Sequence: Synthetic coding sequence
  source 1..1008: mol_type = other DNA

SEQ ID NO: 101577 - DNA, 567 bp, synthetic construct
  misc_feature 1..567: note = Description of Artificial Sequence: Synthetic coding sequence
  source 1..567: mol_type = other DNA
atgaacggcgacgacaccttcgccaagagacccagagacgacgccaaggccagcgagaagagaagcaaggccttcgacgacatcgccacctacttcagcaagaaggagtggaagaagatgaagtacagcgagaagatcagctacgtgtacatgaagagaaactacaaggccatgaccaagctgggcttcaaggtgaccctgccccccttcatgtgcaacaagcaggccaccgacttccagggcaacgacttcgacaacgaccacaacagaagaatccaggtggagcacccccagatgaccttcggcagactgcacagaatcatccccaagatcatgcccaagaagcccgccgaggacgagaacgacagcaagggcgtgagcgaggccagcggcccccagaacgacggcaagcagctgcacccccccggcaaggccaacatcagcgagaagatcaacaagagaagcggccccaagagaggcaagcacgcctggacccacagactgagagagagaaagcagctggtgatctacgaggagatcagcgaccccgaggaggacgacgagtag

SEQ ID NO: 101578 - DNA, 672 bp, synthetic construct
  misc_feature 1..672: note = Description of Artificial Sequence: Synthetic coding sequence
  source 1..672: mol_type = other DNA
atgaacggcgacgacgccttcgccagaagacccaccgtgggcgcccagatccccgagaagatccagaaggccttcgacgacatcgccaagtacttcagcaaggaggagtgggagaagatgaaggccagcgagaagatcttctacgtgtacatgaagagaaagtacgaggccatgaccaagctgggcttcaaggccaccctgccccccttcatgtgcaacaagagagccgaggacttccagggcaacgacctggacaacgaccccaacagaggcaaccaggtggagagaccccagatgaccttcggcagactgcagggcatcagccccaagatcatgcccaagaagcccgccgaggagggcaacgacagcgaggaggtgcccgaggccagcggcccccagaacgacggcaaggagctgtgcccccccggcaagcccaccaccagcgagaagatccacgagagaagcggcaacagagaggcccaggagaaggaggagagaagaggcaccgcccacagatggagcagccagaacacccacaacatcggcagattcagcctgagcaccagcatgggcgccgtgcacggcacccccaagaccatcacccacaacagagaccccaagggcggcaacatgcccggccccaccgactgcgtgagagagaacagctggtag

SEQ ID NO: 101579 - DNA, 567 bp, synthetic construct
  misc_feature 1..567: note = Description of Artificial Sequence: Synthetic coding sequence
  source 1..567: mol_type = other DNA
atgaacggcgacgacgccttcgccagaagacccaccgtgggcgcccagatccccgagaagatccagaaggccttcgacgacatcgccaagtacttcagcaaggaggagtgggagaagatgaaggccagcgagaagatcttctacgtgtacatgaagagaaagtacgaggccatgaccaagctgggcttcaaggccaccctgccccccttcatgtgcaacaagagagccgaggacttccagggcaacgacctggacaacgaccccaacagaggcaaccaggtggagagaccccagatgaccttcggcagactgcagggcatcagccccaagatcatgcccaagaagcccgccgaggagggcaacgacagcgaggaggtgcccgaggccagcggcccccagaacgacggcaaggagctgtgcccccccggcaagcccaccaccagcgagaagatccacgagagaagcggccccaagagaggcgagcacgcctggacccacagactgagagagagaaagcagctggtgatctacgaggagatcagcgaccccgaggaggacgacgagtag

SEQ ID NO: 101580 - DNA, 567 bp, synthetic construct
  misc_feature 1..567: note = Description of Artificial Sequence: Synthetic coding sequence
  source 1..567: mol_type = other DNA
atgaacggcgacgacaccttcgccagaagacccaccgtgggcgcccagatccccgagaagatccagaaggccttcgacgacatcgccaagtacttcagcaaggaggagtgggagaagatgaaggtgagcgagaagatcgtgtacgtgtacatgaagagaaagtacgaggccatgaccaagctgggcttcaaggccatcctgcccagcttcatgagaaacaagagagtgaccgacttccagggcaacgacttcgacaacgaccccaacagaggcaaccaggtgcagagaccccagatgaccttcggcagactgcagggcatcttccccaagatcatgcccaagaagcccgccgaggagggcaacgtgagcaaggaggtgcccgaggccagcggcccccagaacgacggcaagcagctgtgcccccccggcaagcccaccaccagcgagaagatcaacatgatcagcggccccaagagaggcgagcacgcctggacccacagactgagagagagaaagcagctggtgatctacgaggagatcagcgaccccgaggaggacgacgagtag

SEQ ID NO: 101581 - DNA, 513 bp, synthetic construct
  misc_feature 1..513: note = Description of Artificial Sequence: Synthetic coding sequence
  source 1..513: mol_type = other DNA
atgaacggcgacgacaccttcgccagaagacccaccgtgggcgcccagatccccgagaagatccagaaggccttcgacgacatcgccaagtacttcagcaaggaggagtgggagaagatgaaggtgagcgagaagatcgtgtacgtgtacatgaagagaaagtacgaggccatgaccaagctgggcttcaaggccatcctgcccagcttcatgagaaacaagagagtgaccgacttccagggcaacgacttcgacaacgaccccaacagaggcaaccaggtgcagagaccccagatgaccttcggcagactgcagggcatcttccccaagatcatgcccaagaagcccgccgaggagggcaacgtgagcaaggaggtgcccgaggccagcggcccccagaacgacggcaagcagctgtgcccccccggcaagcccaccaccagcgagaagatcaacatgatcagcggcgtgctgcagagatactgcagattcggcagcagacccctgcagtag

SEQ ID NO: 101582 - DNA, 303 bp, synthetic construct
  misc_feature 1..303: note = Description of Artificial Sequence: Synthetic coding sequence
  source 1..303: mol_type = other DNA
atgtacagcctgagcgtgcagagaccccagatgaccttcggcagactgcagggcatcttccccaagatcatgcccaagaagcccgccgaggagggcaacgtgagcaaggaggtgcccgaggccagcggcccccagaacgacggcaagcagctgtgcccccccggcaagcccaccaccagcgagaagatcaacatgatcagcggccccaagagaggcgagcacgcctggacccacagactgagagagagaaagcagctggtgatctacgaggagatcagcgaccccgaggaggacgacgagtag

SEQ ID NO: 101583 - DNA, 462 bp, synthetic construct
  misc_feature 1..462: note = Description of Artificial Sequence: Synthetic coding sequence
  source 1..462: mol_type = other DNA
atgaacggcgacgacgccttcgccagaagacccagagacgacgcccagatcagcgagaagctgagaaaggccttcgacgacatcgccaagtacttcagcaagaaggagtgggagaagatgaagagcagcgagaagatcgtgtacgtgtacatgaagctgaactacgaggtgatgaccaagctgggcttcaaggtgaccctgccccccttcatgagaagcaagagagccgccgacttccacggcaacgacttcggcaacgacagaaaccacagaaaccaggtggagagaccccagatgaccttcggcagcctgcagagaatcttccccaaggaccccaagggcggcaacatgcccggccccaccgactgcgtgagagagagcagctggtggttcatgaagagaagcgccaccctgagaaagatgaccagcaacagccccagaggctacgacacctgcccctag

SEQ ID NO: 101584 - DNA, 567 bp, synthetic construct
  misc_feature 1..567: note = Description of Artificial Sequence: Synthetic coding sequence
  source 1..567: mol_type = other DNA
atgaacggcgacgacgccttcgccagaagacccagagacgacgcccagatcagcgagaagctgagaaaggccttcgacgacatcgccaagtacttcagcaagaaggagtgggagaagatgaagagcagcgagaagatcgtgtacgtgtacatgaagctgaactacgaggtgatgaccaagctgggcttcaaggtgaccctgccccccttcatgagaagcaagagagccgccgacttccacggcaacgacttcggcaacgacagaaaccacagaaaccaggtggagagaccccagatgaccttcggcagcctgcagagaatcttccccaagatcatgcccaagaagcccgccgaggaggagaacggcctgaaggaggtgcccgaggccagcggcccccagaacgacggcaagcagctgtgcccccccggcaaccccagcaccctggagaagatcaacaagaccagcggccccaagagaggcaagcacgcctggacccacagactgagagagagaaagcagctggtggtgtacgaggagatcagcgaccccgaggaggacgacgagtag

SEQ ID NO: 101585 - DNA, 1992 bp, synthetic construct
  misc_feature 1..1992: note = Description of Artificial Sequence: Synthetic coding sequence
  source 1..1992: mol_type = other DNA
atgggccccctgagagagagcaagaaggagcacagagtgcagcaccacgacaaggagatcagcagaagcagaatccccagactgatcctgagaccccacatgccccagcagcagcacaaggtgagccccgccagcgagagccccttcagcgaggaggagagcagagagttcaaccccagcagcagcggcagaagcgccagaaccgtgagcagcaacagcttctgcagcgacgacaccggctgccccagcagccagagcgtgagccccgtgaagacccccagcgacgccggcaacagccccatcggcttctgccccggcagcgacgagggcttcaccagaaagaagtgcaccatcggcatggtgggcgagggcagcatccagagcagcagatacaagaaggagagcaagagcggcctggtgaagcccggcagcgaggccgacttcagcagcagcagcagcaccggcagcatcagcgcccccgaggtgcacatgagcaccgccggcagcaagagaagcagcagcagcagaaacagaggcccccacggcagaagcaacggcgccagcagccacaagcccggcagcagccccagcagccccagagagaaggacctgctgagcatgctgtgcagaaaccagctgagccccgtgaacatccaccccagctacgcccccagcagccccagcagcagcaacagcggcagctacaagggcagcgactgcagccccatcatgagaagaagcggcagatacatgagctgcggcgagaaccacggcgtgagaccccccaaccccgagcagtacctgacccccctgcagcagaaggaggtgaccgtgagacacctgaagaccaagctgaaggagagcgagagaagactgcacgagagagagagcgagatcgtggagctgaagagccagctggccagaatgagagaggactggatcgaggaggagtgccacagagtggaggcccagctggccctgaaggaggccagaaaggagatcaagcagctgaagcaggtgatcgagaccatgagaagcagcctggccgacaaggacaagggcatccagaagtacttcgtggacatcaacatccagaacaagaagctggagagcctgctgcagagcatggagatggcccacagcggcagcctgagagacgagctgtgcctggacttcccctgcgacagccccgagaagagcctgaccctgaacccccccctggacaccatggccgacggcctgagcctggaggagcaggtgaccggcgagggcgccgacagagagctgctggtgggcgacagcatcgccaacagcaccgacctgttcgacgagatcgtgaccgccaccaccaccgagagcggcgacctggagctggtgcacagcacccccggcgccaacgtgctggagctgctgcccatcgtgatgggccaggaggagggcagcgtggtggtggagagagccgtgcagaccgacgtggtgccctacagccccgccatcagcgagctgatccagagcgtgctgcagaagctgcaggacccctgccccagcagcctggccagccccgacgagagcgagcccgacagcatggagagcttccccgagagcctgagcgccctggtggtggacctgacccccagaaaccccaacagcgccatcctgctgagccccgtggagaccccctacgccaacgtggacgccgaggtgcacgccaacagactgatgagagagctggacttcgccgcctgcgtggaggagagactggacggcgtgatccccctggccagaggcggcgtggtgagacagtactggagcagcagcttcctggtggacctgctggccgtggccgcccccgtggtgcccaccgtgctgtgggccttcagcacccagagaggcggcaccgaccccgtgtacaacatcggcgccctgctgagaggctgctgcgtggtggccctgcacagcctgagaagaaccgccttcagaatcaagacctag

SEQ ID NO: 101586 - DNA, 1983 bp, synthetic construct
  misc_feature 1..1983: note = Description of Artificial Sequence: Synthetic coding sequence
  source 1..1983: mol_type = other DNA
atgagcaacttcgagaaggagcacagagtgcagcaccacgacaaggagatcagcagaagcagaatccccagactgatcctgagaccccacatgccccagcagcagcacaaggtgagccccgccagcgagagccccttcagcgaggaggagagcagagagttcaaccccagcagcagcggcagaagcgccagaaccgtgagcagcaacagcttctgcagcgacgacaccggctgccccagcagccagagcgtgagccccgtgaagacccccagcgacgccggcaacagccccatcggcttctgccccggcagcgacgagggcttcaccagaaagaagtgcaccatcggcatggtgggcgagggcagcatccagagcagcagatacaagaaggagagcaagagcggcctggtgaagcccggcagcgaggccgacttcagcagcagcagcagcaccggcagcatcagcgcccccgaggtgcacatgagcaccgccggcagcaagagaagcagcagcagcagaaacagaggcccccacggcagaagcaacggcgccagcagccacaagcccggcagcagccccagcagccccagagagaaggacctgctgagcatgctgtgcagaaaccagctgagccccgtgaacatccaccccagctacgcccccagcagccccagcagcagcaacagcggcagctacaagggcagcgactgcagccccatcatgagaagaagcggcagatacatgagctgcggcgagaaccacggcgtgagaccccccaaccccgagcagtacctgacccccctgcagcagaaggaggtgaccgtgagacacctgaagaccaagctgaaggagagcgagagaagactgcacgagagagagagcgagatcgtggagctgaagagccagctggccagaatgagagaggactggatcgaggaggagtgccacagagtggaggcccagctggccctgaaggaggccagaaaggagatcaagcagctgaagcaggtgatcgagaccatgagaagcagcctggccgacaaggacaagggcatccagaagtacttcgtggacatcaacatccagaacaagaagctggagagcctgctgcagagcatggagatggcccacagcggcagcctgagagacgagctgtgcctggacttcccctgcgacagccccgagaagagcctgaccctgaacccccccctggacaccatggccgacggcctgagcctggaggagcaggtgaccggcgagggcgccgacagagagctgctggtgggcgacagcatcgccaacagcaccgacctgttcgacgagatcgtgaccgccaccaccaccgagagcggcgacctggagctggtgcacagcacccccggcgccaacgtgctggagctgctgcccatcgtgatgggccaggaggagggcagcgtggtggtggagagagccgtgcagaccgacgtggtgccctacagccccgccatcagcgagctgatccagagcgtgctgcagaagctgcaggacccctgccccagcagcctggccagccccgacgagagcgagcccgacagcatggagagcttccccgagagcctgagcgccctggtggtggacctgacccccagaaaccccaacagcgccatcctgctgagccccgtggagaccccctacgccaacgtggacgccgaggtgcacgccaacagactgatgagagagctggacttcgccgcctgcgtggaggagagactggacggcgtgatccccctggccagaggcggcgtggtgagacagtactggagcagcagcttcctggtggacctgctggccgtggccgcccccgtggtgcccaccgtgctgtgggccttcagcacccagagaggcggcaccgaccccgtgtacaacatcggcgccctgctgagaggctgctgcgtggtggccctgcacagcctgagaagaaccgccttcagaatcaagacctag

SEQ ID NO: 101587 - DNA, 1635 bp, synthetic construct
  misc_feature 1..1635: note = Description of Artificial Sequence: Synthetic coding sequence
  source 1..1635: mol_type = other DNA
atggtgggcgagggcagcatccagagcagcagatacaagaaggagagcaagagcggcctggtgaagcccggcagcgaggccgacttcagcagcagcagcagcaccggcagcatcagcgcccccgaggtgcacatgagcaccgccggcagcaagagaagcagcagcagcagaaacagaggcccccacggcagaagcaacggcgccagcagccacaagcccggcagcagccccagcagccccagagagaaggacctgctgagcatgctgtgcagaaaccagctgagccccgtgaacatccaccccagctacgcccccagcagccccagcagcagcaacagcggcagctacaagggcagcgactgcagccccatcatgagaagaagcggcagatacatgagctgcggcgagaaccacggcgtgagaccccccaaccccgagcagtacctgacccccctgcagcagaaggaggtgaccgtgagacacctgaagaccaagctgaaggagagcgagagaagactgcacgagagagagagcgagatcgtggagctgaagagccagctggccagaatgagagaggactggatcgaggaggagtgccacagagtggaggcccagctggccctgaaggaggccagaaaggagatcaagcagctgaagcaggtgatcgagaccatgagaagcagcctggccgacaaggacaagggcatccagaagtacttcgtggacatcaacatccagaacaagaagctggagagcctgctgcagagcatggagatggcccacagcggcagcctgagagacgagctgtgcctggacttcccctgcgacagccccgagaagagcctgaccctgaacccccccctggacaccatggccgacggcctgagcctggaggagcaggtgaccggcgagggcgccgacagagagctgctggtgggcgacagcatcgccaacagcaccgacctgttcgacgagatcgtgaccgccaccaccaccgagagcggcgacctggagctggtgcacagcacccccggcgccaacgtgctggagctgctgcccatcgtgatgggccaggaggagggcagcgtggtggtggagagagccgtgcagaccgacgtggtgccctacagccccgccatcagcgagctgatccagagcgtgctgcagaagctgcaggacccctgccccagcagcctggccagccccgacgagagcgagcccgacagcatggagagcttccccgagagcctgagcgccctggtggtggacctgacccccagaaaccccaacagcgccatcctgctgagccccgtggagaccccctacgccaacgtggacgccgaggtgcacgccaacagactgatgagagagctggacttcgccgcctgcgtggaggagagactggacggcgtgatccccctggccagaggcggcgtggtgagacagtactggagcagcagcttcctggtggacctgctggccgtggccgcccccgtggtgcccaccgtgctgtgggccttcagcacccagagaggcggcaccgaccccgtgtacaacatcggcgccctgctgagaggctgctgcgtggtggccctgcacagcctgagaagaaccgccttcagaatcaagacctag

SEQ ID NO: 101588 - DNA, 1992 bp, synthetic construct; identical to SEQ ID NO: 101585
  misc_feature 1..1992: note = Description of Artificial Sequence: Synthetic coding sequence
  source 1..1992: mol_type = other DNA

SEQ ID NO: 101589 - DNA, 1989 bp, synthetic construct
  misc_feature 1..1989: note = Description of Artificial Sequence: Synthetic coding sequence
  source 1..1989: mol_type = other DNA
atgggccccctgagagagagcaaggagcacagagtgcagcaccacgacaaggagatcagcagaagcagaatccccagactgatcctgagaccccacatgccccagcagcagcacaaggtgagccccgccagcgagagccccttcagcgaggaggagagcagagagttcaaccccagcagcagcggcagaagcgccagaaccgtgagcagcaacagcttctgcagcgacgacaccggctgccccagcagccagagcgtgagccccgtgaagacccccagcgacgccggcaacagccccatcggcttctgccccggcagcgacgagggcttcaccagaaagaagtgcaccatcggcatggtgggcgagggcagcatccagagcagcagatacaagaaggagagcaagagcggcctggtgaagcccggcagcgaggccgacttcagcagcagcagcagcaccggcagcatcagcgcccccgaggtgcacatgagcaccgccggcagcaagagaagcagcagcagcagaaacagaggcccccacggcagaagcaacggcgccagcagccacaagcccggcagcagccccagcagccccagagagaaggacctgctgagcatgctgtgcagaaaccagctgagccccgtgaacatccaccccagctacgcccccagcagccccagcagcagcaacagcggcagctacaagggcagcgactgcagccccatcatgagaagaagcggcagatacatgagctgcggcgagaaccacggcgtgagaccccccaaccccgagcagtacctgacccccctgcagcagaaggaggtgaccgtgagacacctgaagaccaagctgaaggagagcgagagaagactgcacgagagagagagcgagatcgtggagctgaagagccagctggccagaatgagagaggactggatcgaggaggagtgccacagagtggaggcccagctggccctgaaggaggccagaaaggagatcaagcagctgaagcaggtgatcgagaccatgagaagcagcctggccgacaaggacaagggcatccagaagtacttcgtggacatcaacatccagaacaagaagctggagagcctgctgcagagcatggagatggcccacagcggcagcctgagagacgagctgtgcctggacttcccctgcgacagccccgagaagagcctgaccctgaacccccccctggacaccatggccgacggcctgagcctggaggagcaggtgaccggcgagggcgccgacagagagctgctggtgggcgacagcatcgccaacagcaccgacctgttcgacgagatcgtgaccgccaccaccaccgagagcggcgacctggagctggtgcacagcacccccggcgccaacgtgctggagctgctgcccatcgtgatgggccaggaggagggcagcgtggtggtggagagagccgtgcagaccgacgtggtgccctacagccccgccatcagcgagctgatccagagcgtgctgcagaagctgcaggacccctgccccagcagcctggccagccccgacgagagcgagcccgacagcatggagagcttccccgagagcctgagcgccctggtggtggacctgacccccagaaaccccaacagcgccatcctgctgagccccgtggagaccccctacgccaacgtggacgccgaggtgcacgccaacagactgatgagagagctggacttcgccgcctgcgtggaggagagactggacggcgtgatccccctggccagaggcggcgtggtgagacagtactggagcagcagcttcctggtggacctgctggccgtggccgcccccgtggtgcccaccgtgctgtgggccttcagcacccagagaggcggcaccgaccccgtgtacaacatcggcgccctgctgagaggctgctgcgtggtggccctgcacagcctgagaagaaccgccttcagaatcaagacctag

SEQ ID NO: 101590 - DNA, 1992 bp, synthetic construct; identical to SEQ ID NO: 101585
  misc_feature 1..1992: note = Description of Artificial Sequence: Synthetic coding sequence
  source 1..1992: mol_type = other DNA

SEQ ID NO: 101591 - DNA, 1992 bp, synthetic construct; identical to SEQ ID NO: 101585
  misc_feature 1..1992: note = Description of Artificial Sequence: Synthetic coding sequence
  source 1..1992: mol_type = other DNA

SEQ ID NO: 101592 - DNA, 1992 bp, synthetic construct; identical to SEQ ID NO: 101585
  misc_feature 1..1992: note = Description of Artificial Sequence: Synthetic coding sequence
  source 1..1992: mol_type = other DNA

SEQ ID NO: 101593 - DNA, 1989 bp, synthetic construct; identical to SEQ ID NO: 101589
  misc_feature 1..1989: note = Description of Artificial Sequence: Synthetic coding sequence
  source 1..1989: mol_type = other DNA

SEQ ID NO: 101594 - DNA, 414 bp, synthetic construct
  misc_feature 1..414: note = Description of Artificial Sequence: Synthetic coding sequence
  source 1..414: mol_type = other DNA
atgggccccctgagagagagcaagaaggagcacagagtgcagcaccacgacaaggagatcagcagaagcagaatccccagactgatcctgagaccccacatgccccagcagcagcacaaggtgagccccgccagcgagagccccttcagcgaggaggagagcagagagttcaaccccagcagcagcggcagaagcgccagaaccgtgagcagcaacagcttctgcagcgacgacaccggctgccccagcagccagagcgtgagccccgtgaagacccccagcgacgccggcaacagccccatcggcttctgccccggcagcgacgagggcttcaccagaaagaagtgcaccatcggcatggtgggcgagggcagcatccagagcagcagatacaagaaggagagcaagagctag

SEQ ID NO: 101595 - DNA, 231 bp, synthetic construct
  misc_feature 1..231: note = Description of Artificial Sequence: Synthetic coding sequence
  source 1..231: mol_type = other DNA
atgggccccctgagagagagcaagaaggagcacagagtgcagcaccacgacaaggagatcagcagaagcagaatccccagactgatcctgagaccccacatgccccagcagcagcacaaggtgagccccgccagcgagagccccttcagcgaggaggagagcagagagttcaaccccagcagcagcggcagaagcgccagaaccgtgagcagcaacagcttctgcagctag

SEQ ID NO: 101596 - DNA, 222 bp, synthetic construct
  misc_feature 1..222: note = Description of Artificial Sequence: Synthetic coding sequence
  source 1..222: mol_type = other DNA
atgggccccctgagagagagcaagaaggagcacagagtgcagcaccacgacaaggagatcagcagaagcagaatccccagactgatcctgagaccccacatgccccagcagcagcacaaggtgagccccgccagcgagagccccttcagcgaggaggagagcagagagttcaaccccagcagcagcggcagaagcgccagaaccgtgagcagcaacagctag

SEQ ID NO: 101597 - DNA, 378 bp, synthetic construct
  misc_feature 1..378: note = Description of Artificial Sequence: Synthetic coding sequence
  source 1..378: mol_type = other DNA
atggtgggcgagggcagcatccagagcagcagatacaagaaggagagcaagagcggcctggtgaagcccggcagcgaggccgacttcagcagcagcagcagcaccggcagcatcagcgcccccgaggtgcacatgagcaccgccggcagcaagagaagcagcagcagcagaaacagaggcccccacggcagaagcaacggcgccagcagccacaagcccggcagcagccccagcagccccagagagaaggacctgctgagcatgctgtgcagaaaccagctgagccccgtgaacatccaccccagctacgcccccagcagccccagcagcagcaacagcggcagctacaagggcagcgactgcagccccatcatgtag

SEQ ID NO: 101598 - DNA, 1635 bp, synthetic construct; identical to SEQ ID NO: 101587
  misc_feature 1..1635: note = Description of Artificial Sequence: Synthetic coding sequence
  source 1..1635: mol_type = other DNA

SEQ ID NO: 101599 - DNA, 243 bp, synthetic construct
  misc_feature 1..243: note = Description of Artificial Sequence: Synthetic coding sequence
  source 1..243: mol_type = other DNA
atggtgggcgagggcagcatccagagcagcagatacaagaaggagagcaagagcggcctggtgaagcccggcagcgaggccgacttcagcagcagcagcagcaccggcagcatcagcgcccccgaggtgcacatgagcaccgccggcagcaagagaagcagcagcagcagaaacagaggcccccacggcagaagcaacggcgccagcagccacaagcccggcagcagccccagcagcccctag

SEQ ID NO: 101600 - DNA, 1989 bp, synthetic construct; identical to SEQ ID NO: 101589
  misc_feature 1..1989: note = Description of Artificial Sequence: Synthetic coding sequence
  source 1..1989: mol_type = other DNA

SEQ ID NO: 101601 - DNA, 288 bp, synthetic construct
  misc_feature 1..288: note = Description of Artificial Sequence: Synthetic coding sequence
  source 1..288: mol_type = other DNA
atgggccccctgagagagagcaagaaggagcacagagtgcagcaccacgacaaggagatcagcagaagcagaatccccagactgatcctgagaccccacatgccccagcagcagcacaaggtgagccccgccagcgagagccccttcagcgaggaggagagcagagagttcaaccccagcagcagcggcagaagcgccagaaccgtgagcagcaacagcttctgcagcgacgacaccggctgccccagcagccagagcgtgagccccgtgaagacccccagcgactag

SEQ ID NO: 101602 - DNA, 615 bp, synthetic construct
  misc_feature 1..615: note = Description of Artificial Sequence: Synthetic coding sequence
  source 1..615: mol_type = other DNA
atgggccccctgagagagagcaaggagcacagagtgcagcaccacgacaaggagatcagcagaagcagaatccccagactgatcctgagaccccacatgccccagcagcagcacaaggtgagccccgccagcgagagccccttcagcgaggaggagagcagagagttcaaccccagcagcagcggcagaagcgccagaaccgtgagcagcaacagcttctgcagcgacgacaccggctgccccagcagccagagcgtgagccccgtgaagacccccagcgacgccggcaacagccccatcggcttctgccccggcagcgacgagggcttcaccagaaagaagtgcaccatcggcatggtgggcgagggcagcatccagagcagcagatacaagaaggagagcaagagcggcctggtgaagcccggcagcgaggccgacttcagcagcagcagcagcaccggcagcatcagcgcccccgaggtgcacatgagcaccgccggcagcaagagaagcagcagcagcagaaacagaggcccccacggcagaagcaacggcgccagcagccacaagcccggcagcagccccagcagccccagagagaaggacctgctgtag

SEQ ID NO: 101603 - DNA, 108 bp, synthetic construct
  misc_feature 1..108: note = Description of Artificial Sequence: Synthetic coding sequence
  source 1..108: mol_type = other DNA
atggtgggcgagggcagcatccagagcagcagatacaagaaggagagcaagagcggcctggtgaagcccggcagcgaggccgacttcagcagcagcagcagcacctag

SEQ ID NO: 101604 - DNA, 105 bp, synthetic construct
  misc_feature 1..105: note = Description of Artificial Sequence: Synthetic coding sequence
  source 1..105: mol_type = other DNA
atggtgggcgagggcagcatccagagcagcagatacaagaaggagagcaagagcggcctggtgaagcccggcagcgaggccgacttcagcagcagcagcagctag

SEQ ID NO: 101605 - DNA, 243 bp, synthetic construct; identical to SEQ ID NO: 101599
  misc_feature 1..243: note = Description of Artificial Sequence: Synthetic coding sequence
  source 1..243: mol_type = other DNA

SEQ ID NO: 101606 - DNA, 1788 bp, synthetic construct
  misc_feature 1..1788: note = Description of Artificial Sequence: Synthetic coding sequence
  source 1..1788: mol_type = other DNA
atgggccccttctgggccagaaaggacgacaccggctgccccagcagccagagcgtgagccccgtgaagacccccagcgacgccggcaacagccccatcggcttctgccccggcagcgacgagggcttcaccagaaagaagtgcaccatcggcatggtgggcgagggcagcatccagagcagcagatacaagaaggagagcaagagcggcctggtgaagcccggcagcgaggccgacttcagcagcagcagcagcaccggcagcatcagcgcccccgaggtgcacatgagcaccgccggcagcaagagaagcagcagcagcagaaacagaggcccccacggcagaagcaacggcgccagcagccacaagcccggcagcagccccagcagccccagagagaaggacctgctgagcatgctgtgcagaaaccagctgagccccgtgaacatccaccccagctacgcccccagcagccccagcagcagcaacagcggcagctacaagggcagcgactgcagccccatcatgagaagaagcggcagatacatgagctgcggcgagaaccacggcgtgagaccccccaaccccgagcagtacctgacccccctgcagcagaaggaggtgaccgtgagacacctgaagaccaagctgaaggagagcgagagaagactgcacgagagagagagcgagatcgtggagctgaagagccagctggccagaatgagagaggactggatcgaggaggagtgccacagagtggaggcccagctggccctgaaggaggccagaaaggagatcaagcagctgaagcaggtgatcgagaccatgagaagcagcctggccgacaaggacaagggcatccagaagtacttcgtggacatcaacatccagaacaagaagctggagagcctgctgcagagcatggagatggcccacagcggcagcctgagagacgagctgtgcctggacttcccctgcgacagccccgagaagagcctgaccctgaacccccccctggacaccatggccgacggcctgagcctggaggagcaggtgaccggcgagggcgccgacagagagctgctggtgggcgacagcatcgccaacagcaccgacctgttcgacgagatcgtgaccgccaccaccaccgagagcggcgacctggagctggtgcacagcacccccggcgccaacgtgctggagctgctgcccatcgtgatgggccaggaggagggcagcgtggtggtggagagagccgtgcagaccgacgtggtgccctacagccccgccatcagcgagctgatccagagcgtgctgcagaagctgcaggacccctgccccagcagcctggccagccccgacgagagcgagcccgacagcatggagagcttccccgagagcctgagcgccctggtggtggacctgacccccagaaaccccaacagcgccatcctgctgagccccgtggagaccccctacgccaacgtggacgccgaggtgcacgccaacagactgatgagagagctggacttcgccgcctgcgtggaggagagactggacggcgtgatccccctggccagaggcggcgtggtgagacagtactggagcagcagcttcctggtggacctgctggccgtggccgcccccgtggtgcccaccgtgctgtgggccttcagcacccagagaggcggcaccgaccccgtgtacaacatcggcgccctgctgagaggctgctgcgtggtggccctgcacagcctgagaagaaccgccttcagaatcaagacctag

SEQ ID NO: 101607 - DNA, 1635 bp, synthetic construct; identical to SEQ ID NO: 101587
  misc_feature 1..1635: note = Description of Artificial Sequence: Synthetic coding sequence
  source 1..1635: mol_type = other DNA

SEQ ID NO: 101608 - DNA, 1992 bp, synthetic construct; identical to SEQ ID NO: 101585
  misc_feature 1..1992: note = Description of Artificial Sequence: Synthetic coding sequence
  source 1..1992: mol_type = other DNA

SEQ ID NO: 101609 - DNA, 489 bp, synthetic construct
  misc_feature 1..489: note = Description of Artificial Sequence: Synthetic coding sequence
  source 1..489: mol_type = other DNA
atgggccccctgagagagagcaaggagcacagagtgcagcaccacgacaaggagatcagcagaagcagaatccccagactgatcctgagaccccacatgccccagcagcagcacaaggtgagccccgccagcgagagccccttcagcgaggaggagagcagagagttcaaccccagcagcagcggcagaagcgccagaaccgtgagcagcaacagcttctgcagcgacgacaccggctgccccagcagccagagcgtgagccccgtgaagacccccagcgacgccggcaacagccccatcggcttctgccccggcagcgacgagggcttcaccagaaagaagtgcaccatcggcatggtgggcgagggcagcatccagagcagcagatacaagaaggagagcaagagcggcctggtgaagcccggcagcgaggccgacttcagcagcagcagcagcaccggcagcatcagcgcccccgaggtgcactag

SEQ ID NO: 101610 - DNA, 1989 bp, synthetic construct; identical to SEQ ID NO: 101589
  misc_feature 1..1989: note = Description of Artificial Sequence: Synthetic coding sequence
  source 1..1989: mol_type = other DNA

SEQ ID NO: 101611 - DNA, 315 bp, synthetic construct
  misc_feature 1..315: note = Description of Artificial Sequence: Synthetic coding sequence
  source 1..315: mol_type = other DNA
atgggccccctgagagagagcaaggagcacagagtgcagcaccacgacaaggagatcagcagaagcagaatccccagactgatcctgagaccccacatgccccagcagcagcacaaggtgagccccgccagcgagagccccttcagcgaggaggagagcagagagttcaaccccagcagcagcggcagaagcgccagaaccgtgagcagcaacagcttctgcagcgacgacaccggctgccccagcagccagagcgtgagccccgtgaagacccccagcgacgccggcaacagccccatcggcttctgcccctag

SEQ ID NO: 101612 - DNA, 456 bp, synthetic construct
  misc_feature 1..456: note = Description of Artificial Sequence: Synthetic coding sequence
  source 1..456: mol_type = other DNA
atgggccccctgagagagagcaagaaggagcacagagtgcagcaccacgacaaggagatcagcagaagcagaatccccagactgatcctgagaccccacatgccccagcagcagcacaaggtgagccccgccagcgagagccccttcagcgaggaggagagcagagagttcaaccccagcagcagcggcagaagcgccagaaccgtgagcagcaacagcttctgcagcgacgacaccggctgccccagcagccagagcgtgagccccgtgaagacccccagcgacgccggcaacagccccatcggcttctgccccggcagcgacgagggcttcaccagaaagaagtgcaccatcggcatggtgggcgagggcagcatccagagcagcagatacaagaaggagagcaagagcggcctggtgaagcccggcagcgaggccgacttcagcagcagctag

SEQ ID NO: 101613 - DNA, 231 bp, synthetic construct; identical to SEQ ID NO: 101595
  misc_feature 1..231: note = Description of Artificial Sequence: Synthetic coding sequence
  source 1..231: mol_type = other DNA

SEQ ID NO: 101614 - DNA, 1617 bp, synthetic construct
  misc_feature 1..1617: note = Description of Artificial Sequence: Synthetic coding sequence
  source 1..1617: mol_type = other DNA
atgcccggcagcggccccagcgagagaatgacctggcccggccccgccctgagcgccggcccccccaccagacccctgagcagcgcccccggcatcccccccatcccccccctgaccagaacccacagcctgatggccatgagcctgcccggcagcagaagaaccagcgccggcagcagaagaagaaccagcccccccgtgagcgtgagagacgcctacggcaccagcagcctgagcagcagcagcaacagcggcagctacaagggcagcgacagcagccccacccccagaagaagcatgaagtacaccctgtgcagcgacaaccacggcatcaagccccccacccccgagcagtacctgacccccctgcagcagaaggaggtgtgcatcagacacctgaaggccagactgaaggacacccaggacagactgcaggacagagacaccgagatcgacgacctgaagacccagctgagcagaatgcaggaggactggatcgaggaggagtgccacagagtggaggcccagctggccctgaaggaggccagaaaggagatcaagcagctgaagcaggtgatcgacaccgtgaagaacaacctgatcgacaaggacaagggcctgcagaagtacttcgtggacatcaacatccagaacaagaagctggagaccctgctgcacagcatggaggtggcccagaacggcatggccaaggaggacggcaccggcgagagcgccggcggcagccccgccagaagcctgaccagaagcagcacctacaccaagctgagcgaccccgccgtgtgcggcgacagacagcccggcgaccccagcagcggcagcgccgaggacggcgccgacagcggcttcgccgccgccgacgacaccctgagcagaaccgacgccctggaggccagcagcctgctgagcagcggcgtggactgcggcaccgaggagaccagcctgcacagcagcttcggcctgggccccagattccccgccagcaacacctacgagaagctgctgtgcggcatggaggccggcgtgcaggccagctgcatgcaggagagagccatccagaccgacttcgtgcagtaccagcccgacctggacaccatcctggagaaggtgacccaggcccaggtgtgcggcaccgaccccgagagcggcgacagatgccccgagctggacgcccaccccagcggccccagagaccccaacagcgccgtggtggtgaccgtgggcgacgagctggaggcccccgagcccatcaccagaggccccaccccccagagacccggcgccaaccccaaccccggccagagcgtgagcgtggtgtgccccatggaggaggaggaggaggccgccgtggccgagaaggagcccaagagctactggagcagacactacatcgtggacctgctggccgtggtggtgcccgccgtgcccaccgtggcctggctgtgcagaagccagagaagacagggccagcccatctacaacatcagcagcctgctgagaggctgctgcaccgtggccctgcacagcatcagaagaatcagctgcagaagcctgagccagcccagccccagccccgccggcggcggcagccagctgtag

SEQ ID NO: 101615 - DNA, 1485 bp, synthetic construct
  misc_feature 1..1485: note = Description of Artificial Sequence: Synthetic coding sequence
  source 1..1485: mol_type = other DNA
atggccatgagcctgcccggcagcagaagaaccagcgccggcagcagaagaagaaccagcccccccgtgagcgtgagagacgcctacggcaccagcagcctgagcagcagcagcaacagcggcagctacaagggcagcgacagcagccccacccccagaagaagcatgaagtacaccctgtgcagcgacaaccacggcatcaagccccccacccccgagcagtacctgacccccctgcagcagaaggaggtgtgcatcagacacctgaaggccagactgaaggacacccaggacagactgcaggacagagacaccgagatcgacgacctgaagacccagctgagcagaatgcaggaggactggatcgaggaggagtgccacagagtggaggcccagctggccctgaaggaggccagaaaggagatcaagcagctgaagcaggtgatcgacaccgtgaagaacaacctgatcgacaaggacaagggcctgcagaagtacttcgtggacatcaacatccagaacaagaagctggagaccctgctgcacagcatggaggtggcccagaacggcatggccaaggaggacggcaccggcgagagcgccggcggcagccccgccagaagcctgaccagaagcagcacctacaccaagctgagcgaccccgccgtgtgcggcgacagacagcccggcgaccccagcagcggcagcgccgaggacggcgccgacagcggcttcgccgccgccgacgacaccctgagcagaaccgacgccctggaggccagcagcctgctgagcagcggcgtggactgcggcaccgaggagaccagcctgcacagcagcttcggcctgggccccagattccccgccagcaacacctacgagaagctgctgtgcggcatggaggccggcgtgcaggccagctgcatgcaggagagagccatccagaccgacttcgtgcagtaccagcccgacctggacaccatcctggagaaggtgacccaggcccaggtgtgcggcaccgaccccgagagcggcgacagatgccccgagctggacgcccaccccagcggccccagagaccccaacagcgccgtggtggtgaccgtgggcgacgagctggaggcccccgagcccatcaccagaggccccaccccccagagacccggcgccaaccccaaccccggccagagcgtgagcgtggtgtgccccatggaggaggaggaggaggccgccgtggccgagaaggagcccaagagctactggagcagacactacatcgtggacctgctggccgtggtggtgcccgccgtgcccaccgtggcctggctgtgcagaagccagagaagacagggccagcccatctacaacatcagcagcctgctgagaggctgctgcaccgtggccctgcacagcatcagaagaatcagctgcagaagcctgagccagcccagccccagccccgccggcggcggcagccagctgtag

SEQ ID NO: 101616 - DNA, 864 bp, synthetic construct
  misc_feature 1..864: note = Description of Artificial Sequence: Synthetic coding sequence
  source 1..864: mol_type = other DNA
atgaaggacagactggccgagctgctggacctgagcaagcagtacgaccagcagttccccgacggcgacgacgagttcgacagcccccacgaggacatcgtgttcgagaccgaccacatcctggagagcctgtacagagacatcagagacatccaggacgagaaccagctgctggtggccgacgtgaagagactgggcaagcagaacgccagattcctgaccagcatgagaagactgagcagcatcaagagagacaccaacagcatcgccaaggccatcaaggccagaggcgaggtgatccactgcaagctgagagccatgaaggagctgagcgaggccgccgaggcccagcacggcccccacagcgccgtggccagaatcagcagagcccagtacaacgccctgaccctgaccttccagagagccatgcacgactacaaccaggccgagatgaagcagagagacaactgcaagatcagaatccagagacagctggagatcatgggcaaggaggtgagcggcgaccagatcgaggacatgttcgagcagggcaagtgggacgtgttcagcgagaacctgctggccgacgtgaagggcgccagagccgccctgaacgagatcgagagcagacacagagagctgctgagactggagagcagaatcagagacgtgcacgagctgttcctgcagatggccgtgctggtggagaagcaggccgacaccctgaacgtgatcgagctgaacgtgcagaagaccgtggactacaccggccaggccaaggcccaggtgagaaaggccgtgcagtacgaggagaagaacccctgcagaaccctgtgctgcttctgctgcccctgcctgaagtag

SEQ ID NO: 101617 - DNA, 615 bp, synthetic construct
  misc_feature 1..615: note = Description of Artificial Sequence: Synthetic coding sequence
  source 1..615: mol_type = other DNA
atggccctggtgagcggcatcagcctggaccccgaggccgccatcggcgtgaccaagagacccccccccaagtgggtggacggcgtggacgagatccagtacgacgtgggcagaatcaagcagaagatgaaggagctggccagcctgcacgacaagcacctgaacagacccaccctggacgacagcagcgaggaggagcacgccatcgagatcaccacccaggagatcacccagctgttccacagatgccagagagccgtgcaggccctgcccagcagagccagagcctgcagcgagcaggagggcagactgctgggcaacgtggtggccagcctggcccaggccctgcaggagctgagcaccagcttcagacacgcccagagcggctacctgaagagaatgaagaacagagaggagagaagccagcacttcttcgacaccagcgtgcccctgatggacgacggcgacgacaacaccctgtaccacagaggcttcaccgaggaccagctggtgctggtggagcagaacaccctgatggtggaggagagagagagagagatcagacagatcgtgcagagcatcagcgacctgaacgagatcttcagagacctgtag

SEQ ID NO: 101618 - DNA, 927 bp, synthetic construct
  misc_feature 1..927: note = Description of Artificial Sequence: Synthetic coding sequence
  source 1..927: mol_type = other DNA
atggccaccagaagactgaccgacgccttcctgctgctgagaaacaacagcatccagaacagacagctgctggccgagcaggagctggacgagctggccgacgacagaatggccctggtgagcggcatcagcctggaccccgaggccgccatcggcgtgaccaagagacccccccccaagtgggtggacggcgtggacgagatccagtacgacgtgggcagaatcaagcagaagatgaaggagctggccagcctgcacgacaagcacctgaacagacccaccctggacgacagcagcgaggaggagcacgccatcgagatcaccacccaggagatcacccagctgttccacagatgccagagagccgtgcaggccctgcccagcagagccagagcctgcagcgagcaggagggcagactgctgggcaacgtggtggccagcctggcccaggccctgcaggagctgagcaccagcttcagacacgcccagagcggctacctgaagagaatgaagaacagagaggagagaagccagcacttcttcgacaccagcgtgcccctgatggacgacggcgacgacaacaccctgtaccacagaggcttcaccgaggaccagctggtgctggtggagcagaacaccctgatggtggaggagagagagagagagatcagacagatcgtgcagagcatcagcgacctgaacgagatcttcagagacctgggcgccatgatcgtggagcagggcaccgtgctggacagaatcgactacaacgtggagcagagctgcatcaagaccgaggacggcctgaagcagctgcacaaggccgagcagtaccagaagaagaacagaaagatgctggtgatcctgatcctgttcgtgatcatcatcgtgctgatcgtggtgctggtgggcgtgaagagcagatag

SEQ ID NO: 101619 - DNA, 966 bp, synthetic construct
  misc_feature 1..966: note = Description of Artificial Sequence: Synthetic coding sequence
  source 1..966: mol_type = other DNA
atggccaccagaagactgaccgacgccttcctgctgctgagaaacaacagcatccagaacagacagctgctggccgagcaggtgagcagccacatcaccagcagccccctgcacagcagaagcatcgccgccctggccgacgacagaatggccctggtgagcggcatcagcctggaccccgaggccgccatcggcgtgaccaagagacccccccccaagtgggtggacggcgtggacgagatccagtacgacgtgggcagaatcaagcagaagatgaaggagctggccagcctgcacgacaagcacctgaacagacccaccctggacgacagcagcgaggaggagcacgccatcgagatcaccacccaggagatcacccagctgttccacagatgccagagagccgtgcaggccctgcccagcagagccagagcctgcagcgagcaggagggcagactgctgggcaacgtggtggccagcctggcccaggccctgcaggagctgagcaccagcttcagacacgcccagagcggctacctgaagagaatgaagaacagagaggagagaagccagcacttcttcgacaccagcgtgcccctgatggacgacggcgacgacaacaccctgtaccacagaggcttcaccgaggaccagctggtgctggtggagcagaacaccctgatggtggaggagagagagagagagatcagacagatcgtgcagagcatcagcgacctgaacgagatcttcagagacctgggcgccatgatcgtggagcagggcaccgtgctggacagaatcgactacaacgtggagcagagctgcatcaagaccgaggacggcctgaagcagctgcacaaggccgagcagtaccagaagaagaacagaaagatgctggtgatcctgatcctgttcgtgatcatcatcgtgctgatcgtggtgctggtgggcgtgaagagcagatag

SEQ ID NO: 101620 - DNA, 756 bp, synthetic construct
  misc_feature 1..756: note = Description of Artificial Sequence: Synthetic coding sequence
  source 1..756: mol_type = other DNA
atggccctggtgagcggcatcagcctggaccccgaggccgccatcggcgtgaccaagagacccccccccaagtgggtggacggcgtggacgagatccagtacgacgtgggcagaatcaagcagaagatgaaggagctggccagcctgcacgacaagcacctgaacagacccaccctggacgacagcagcgaggaggagcacgccatcgagatcaccacccaggagatcacccagctgttccacagatgccagagagccgtgcaggccctgcccagcagagccagagcctgcagcgagcaggagggcagactgctgggcaacgtggtggccagcctggcccaggccctgcaggagctgagcaccagcttcagacacgcccagagcggctacctgaagagaatgaagaacagagaggagagaagccagcacttcttcgacaccagcgtgcccctgatggacgacggcgacgacaacaccctgtaccacagaggcttcaccgaggaccagctggtgctggtggagcagaacaccctgatggtggaggagagagagagagagatcagacagatcgtgcagagcatcagcgacctgaacgagatcttcagagacctgggcgccatgatcgtggagcagggcaccgtgctggacagaatcgactacaacgtggagcagagctgcatcaagaccgaggacggcctgaagcagctgcacaaggccgagcagtaccagaagaagaacagaaagatgctggtgtag

SEQ ID NO: 101621 - DNA, 927 bp, synthetic construct
  misc_feature 1..927: note = Description of Artificial Sequence: Synthetic coding sequence
  source 1..927: mol_type = other DNA
atggccaccagaagactgaccgacgccttcctgctgctgagaaacaacagcatccagaacagacagctgctggccgagcagcagctgagcaagctggccgacgacagaatggccctggtgagcggcatcagcctggaccccgaggccgccatcggcgtgaccaagagacccccccccaagtgggtggacggcgtggacgagatccagtacgacgtgggcagaatcaagcagaagatgaaggagctggccagcctgcacgacaagcacctgaacagacccaccctggacgacagcagcgaggaggagcacgccatcgagatcaccacccaggagatcacccagctgttccacagatgccagagagccgtgcaggccctgcccagcagagccagagcctgcagcgagcaggagggcagactgctgggcaacgtggtggccagcctggcccaggccctgcaggagctgagcaccagcttcagacacgcccagagcggctacctgaagagaatgaagaacagagaggagagaagccagcacttcttcgacaccagcgtgcccctgatggacgacggcgacgacaacaccctgtaccacagaggcttcaccgaggaccagctggtgctggtggagcagaacaccctgatggtggaggagagagagagagagatcagacagatcgtgcagagcatcagcgacctgaacgagatcttcagagacctgggcgccatgatcgtggagcagggcaccgtgctggacagaatcgactacaacgtggagcagagctgcatcaagaccgaggacggcctgaagcagctgcacaaggccgagcagtaccagaagaagaacagaaagatgctggtgatcctgatcctgttcgtgatcatcatcgtgctgatcgtggtgctggtgggcgtgaagagcagatag

SEQ ID NO: 101622 - DNA, 978 bp, synthetic construct
  misc_feature 1..978: note = Description of Artificial Sequence: Synthetic coding sequence
  source 1..978: mol_type = other DNA
atggccaccagaagactgaccgacgccttcctgctgctgagaaacaacagcatccagaacagacagctgctggccgagcaggtgagcagccacatcaccagcagccccctgcacagcagaagcatcgccgccgccctggacgagctggccgacgacagaatggccctggtgagcggcatcagcctggaccccgaggccgccatcggcgtgaccaagagacccccccccaagtgggtggacggcgtggacgagatccagtacgacgtgggcagaatcaagcagaagatgaaggagctggccagcctgcacgacaagcacctgaacagacccaccctggacgacagcagcgaggaggagcacgccatcgagatcaccacccaggagatcacccagctgttccacagatgccagagagccgtgcaggccctgcccagcagagccagagcctgcagcgagcaggagggcagactgctgggcaacgtggtggccagcctggcccaggccctgcaggagctgagcaccagcttcagacacgcccagagcggctacctgaagagaatgaagaacagagaggagagaagccagcacttcttcgacaccagcgtgcccctgatggacgacggcgacgacaacaccctgtaccacagaggcttcaccgaggaccagctggtgctggtggagcagaacaccctgatggtggaggagagagagagagagatcagacagatcgtgcagagcatcagcgacctgaacgagatcttcagagacctgggcgccatgatcgtggagcagggcaccgtgctggacagaatcgactacaacgtggagcagagctgcatcaagaccgaggacggcctgaagcagctgcacaaggccgagcagtaccagaagaagaacagaaagatgctggtgatcctgatcctgttcgtgatcatcatcgtgctgatcgtggtgctggtgggcgtgaagagcagatag

SEQ ID NO: 101623 - DNA, 915 bp, synthetic construct
  misc_feature 1..915: note = Description of Artificial Sequence: Synthetic coding sequence
  source 1..915: mol_type = other DNA
atggccaccagaagactgaccgacgccttcctgctgctgagaaacaacagcatccagaacagacagctgctggccgagcagctggccgacgacagaatggccctggtgagcggcatcagcctggaccccgaggccgccatcggcgtgaccaagagacccccccccaagtgggtggacggcgtggacgagatccagtacgacgtgggcagaatcaagcagaagatgaaggagctggccagcctgcacgacaagcacctgaacagacccaccctggacgacagcagcgaggaggagcacgccatcgagatcaccacccaggagatcacccagctgttccacagatgccagagagccgtgcaggccctgcccagcagagccagagcctgcagcgagcaggagggcagactgctgggcaacgtggtggccagcctggcccaggccctgcaggagctgagcaccagcttcagacacgcccagagcggctacctgaagagaatgaagaacagagaggagagaagccagcacttcttcgacaccagcgtgcccctgatggacgacggcgacgacaacaccctgtaccacagaggcttcaccgaggaccagctggtgctggtggagcagaacaccctgatggtggaggagagagagagagagatcagacagatcgtgcagagcatcagcgacctgaacgagatcttcagagacctgggcgccatgatcgtggagcagggcaccgtgctggacagaatcgactacaacgtggagcagagctgcatcaagaccgaggacggcctgaagcagctgcacaaggccgagcagtaccagaagaagaacagaaagatgctggtgatcctgatcctgttcgtgatcatcatcgtgctgatcgtggtgctggtgggcgtgaagagcagatag

SEQ ID NO: 101624 - DNA, 819 bp, synthetic construct
  misc_feature 1..819: note = Description of Artificial Sequence: Synthetic coding sequence
  source 1..819: mol_type = other DNA
atggccctggtgagcggcatcagcctggaccccgaggccgccatcggcgtgaccaagagacccccccccaagtgggtggacggcgtggacgagatccagtacgacgtgggcagaatcaagcagaagatgaaggagctggccagcctgcacgacaagcacctgaacagacccaccctggacgacagcagcgaggaggagcacgccatcgagatcaccacccaggagatcacccagctgttccacagatgccagagagccgtgcaggccctgcccagcagagccagagcctgcagcgagcaggagggcagactgctgggcaacgtggtggccagcctggcccaggccctgcaggagctgagcaccagcttcagacacgcccagagcggctacctgaagagaatgaagaacagagaggagagaagccagcacttcttcgacaccagcgtgcccctgatggacgacggcgacgacaacaccctgtaccacagaggcttcaccgaggaccagctggtgctggtggagcagaacaccctgatggtggaggagagagagagagagatcagacagatcgtgcagagcatcagcgacctgaacgagatcttcagagacctgggcgccatgatcgtggagcagggcaccgtgctggacagaatcgactacaacgtggagcagagctgcatcaagaccgaggacggcctgaagcagctgcacaaggccgagcagtaccagaagaagaacagaaagatgctggtgatcctgatcctgttcgtgatcatcatcgtgctgatcgtggtgctggtgggcgtgaagagcagatag

SEQ ID NO: 101625 - DNA, 978 bp, synthetic construct
  misc_feature 1..978: note = Description of Artificial Sequence: Synthetic coding sequence
  source 1..978: mol_type = other DNA
atggccaccagaagactgaccgacgccttcctgctgctgagaaacaacagcatccagaacagacagctgctggccgagcaggtgagcagccacatcaccagcagccccctgcacagcagaagcatcgccgccgagctggacgagctggccgacgacagaatggccctggtgagcggcatcagcctggaccccgaggccgccatcggcgtgaccaagagacccccccccaagtgggtggacggcgtggacgagatccagtacgacgtgggcagaatcaagcagaagatgaaggagctggccagcctgcacgacaagcacctgaacagacccaccctggacgacagcagcgaggaggagcacgccatcgagatcaccacccaggagatcacccagctgttccacagatgccagagagccgtgcaggccctgcccagcagagccagagcctgcagcgagcaggagggcagactgctgggcaacgtggtggccagcctggcccaggccctgcaggagctgagcaccagcttcagacacgcccagagcggctacctgaagagaatgaagaacagagaggagagaagccagcacttcttcgacaccagcgtgcccctgatggacgacggcgacgacaacaccctgtaccacagaggcttcaccgaggaccagctggtgctggtggagcagaacaccctgatggtggaggagagagagagagagatcagacagatcgtgcagagcatcagcgacctgaacgagatcttcagagacctgggcgccatgatcgtggagcagggcaccgtgctggacagaatcgactacaacgtggagcagagctgcatcaagaccgaggacggcctgaagcagctgcacaaggccgagcagtaccagaagaagaacagaaagatgctggtgatcctgatcctgttcgtgatcatcatcgtgctgatcgtggtgctggtgggcgtgaagagcagatag

SEQ ID NO: 101626 - DNA, 366 bp, synthetic construct
  misc_feature 1..366: note = Description of Artificial Sequence: Synthetic coding sequence
  source 1..366: mol_type = other DNA
atggccctggtgagcggcatcagcctggaccccgaggccgccatcggcgtgaccaagagacccccccccaagtgggtggacggcgtggacgagatccagtacgacgtgggcagaatcaagcagaagatgaaggagctggccagcctgcacgacaagcacctgaacagacccaccctggacgacagcagcgaggaggagcacgccatcgagatcaccacccaggagatcacccagctgttccacagatgccagagagccgtgcaggccctgcccagcagagccagagcctgcagcgagcaggagggcagactgctgggcaacgtggtggccagcctggcccaggccctgcaggagctgagcacctag

SEQ ID NO: 101627 - DNA, 420 bp, synthetic construct
  misc_feature 1..420: note = Description of Artificial Sequence: Synthetic coding sequence
  source 1..420: mol_type = other DNA
atgaagaacagagaggagagaagccagcacttcttcgacaccagcgtgcccctgatggacgacggcgacgacaacaccctgtaccacagaggcttcaccgaggaccagctggtgctggtggagcagaacaccctgatggtggaggagagagagagagagatcagacagatcgtgcagagcatcagcgacctgaacgagatcttcagagacctgggcgccatgatcgtggagcagggcaccgtgctggacagaatcgactacaacgtggagcagagctgcatcaagaccgaggacggcctgaagcagctgcacaaggccgagcagtaccagaagaagaacagaaagatgctggtgatcctgatcctgttcgtgatcatcatcgtgctgatcgtggtgctggtgggcgtgaagagcagatag

SEQ ID NO: 101628 - DNA, 660 bp, synthetic construct
  misc_feature 1..660: note = Description of Artificial Sequence: Synthetic coding sequence
  source 1..660: mol_type = other DNA
ggcatcagcctggaccccgaggccgccatcggcgtgaccaagagacccccccccaagtgggtggacggcgtggacgagatccagtacgacgtgggcagaatcaagcagaagatgaaggagctggccagcctgcacgacaagcacctgaacagacccaccctggacgacagcagcgaggaggagcacgccatcgagatcaccacccaggagatcacccagctgttccacagatgccagagagccgtgcaggccctgcccagcagagccagagcctgcagcgagcaggagggcagactgctgggcaacgtggtggccagcctggcccaggccctgcaggagctgagcaccagcttcagacacgcccagagcggctacctgaagagaatgaagaacagagaggagagaagccagcacttcttcgacaccagcgtgcccctgatggacgacggcgacgacaacaccctgtaccacagaggcaccgtgctggacagaatcgactacaacgtggagcagagctgcatcaagaccgaggacggcctgaagcagctgcacaaggccgagcagtaccagaagaagaacagaaagatgctggtgatcctgatcctgttcgtgatcatcatcgtgctgatcgtggtgctggtgggcgtgaagagcagatag

SEQ ID NO: 101629 - DNA, 369 bp, synthetic construct
  misc_feature 1..369: note = Description of Artificial Sequence: Synthetic coding sequence
  source 1..369: mol_type = other DNA
atggccctggtgagcggcatcagcctggaccccgaggccgccatcggcgtgaccaagagacccccccccaagtgggtggacggcgtggacgagatccagtacgacgtgggcagaatcaagcagaagatgaaggagctggccagcctgcacgacaagcacctgaacagacccaccctggacgacagcagcgaggaggagcacgccatcgagatcaccacccaggagatcacccagctgttccacagatgccagagagccgtgcaggccctgcccagcagagccagagcctgcagcgagcaggagggcagactgctgggcaacgtggtggccagcctggcccaggccctgcaggagctgagcaccagctag

SEQ ID NO: 101630 - DNA, 609 bp, synthetic construct
  misc_feature 1..609: note = Description of Artificial Sequence: Synthetic coding sequence
  source 1..609: mol_type = other DNA
atggccaccagaagactgaccgacgccttcctgctgctgagaaacaacagcatccagaacagacagctgctggccgagcaggagctggacgagctggccgacgacagaatggccctggtgagcggcatcagcctggaccccgaggccgccatcggcgtgaccaagagacccccccccaagtgggtggacggcgtggacgagatccagtacgacgtgggcagaatcaagcagaagatgaaggagctggccagcctgcacgacaagcacctgaacagacccaccctggacgacagcagcgaggaggagcacgccatcgagatcaccacccaggagatcacccagctgttccacagatgccagagagccgtgcaggccctgcccagcagagccagagcctgcagcgagcaggagggcagactgctgggcaacgtggtggccagcctggcccaggccctgcaggagctgagcaccagcttcagacacgcccagagcggctacctgaagagaatgaagaacagagaggagagaagccagcacttcttcgacaccagcgtgcccctgatggacgacggcgacgacaacaccctgtaccacagaagaaccagctag

SEQ ID NO: 101631 - DNA, 909 bp, synthetic construct
  misc_feature 1..909: note = Description of Artificial Sequence: Synthetic coding sequence
  source 1..909: mol_type = other DNA
atgagcgaggacgaggagaaggtgaagctgagaagactggagcccgccatccagaagttcatcaagatcgtgatccccaccgacctggagagactgagaaagcaccagatcaacatcgagaagtaccagagatgcagaatctgggacaagctgcacgaggagcacatcaacgccggcagaaccgtgcagcagctgagaagcaacatcagagagatcgagaagctgtgcctgaaggtgagaaaggacgacctggtgctgctgaagagaatgatcgaccccgtgaaggaggaggccagcgccgccaccgccgagttcctgcagctgcacctggagagcgtggaggagctgaagaagcagttcaacgacgaggagaccctgctgcagccccccctgaccagaagcatgaccgtgggcggcgccttccacaccaccgaggccgaggccagcagccagagcctgacccagatctacgccctgcccgagatcccccaggaccagaacgccgccgagagctgggagaccctggaggccgacctgatcgagctgagccagctggtgaccgacttcagcctgctggtgaacagccagcaggagaagatcgacagcatcgccgaccacgtgaacagcgccgccgtgaacgtggaggagggcaccaagaacctgggcaaggccgccaagtacaagctggccgccctgcccgtggccggcgccctgatcggcggcatggtgggcggccccatcggcctgctggccggcttcaaggtggccggcatcgccgccgccctgggcggcggcgtgctgggcttcaccggcggcaagctgatccagagaaagaagcagaagatgatggagaagctgaccagcagctgccccgacctgcccagccagaccgacaagaagtgcagctag

SEQ ID NO: 101632 - DNA, 909 bp, synthetic construct; identical to SEQ ID NO: 101631
  misc_feature 1..909: note = Description of Artificial Sequence: Synthetic coding sequence
  source 1..909: mol_type = other DNA

SEQ ID NO: 101633 - DNA, 126 bp, synthetic construct
  misc_feature 1..126: note = Description of Artificial Sequence: Synthetic coding sequence
  source 1..126: mol_type = other DNA
atgagcgaggacgaggagaaggtgaagctgagaagactggagcccgccatccagaagttcatcaagatcgtgatccccaccgacctggagagactgagaaagcaccagatcaacatcgagaagtag

SEQ ID NO: 101634 - DNA, 126 bp, synthetic construct; identical to SEQ ID NO: 101633
  misc_feature 1..126: note = Description of Artificial Sequence: Synthetic coding sequence
  source 1..126: mol_type = other DNA

SEQ ID NO: 101635 - DNA, 909 bp, synthetic construct; identical to SEQ ID NO: 101631
  misc_feature 1..909: note = Description of Artificial Sequence: Synthetic coding sequence
  source 1..909: mol_type = other DNA

SEQ ID NO: 101636 - DNA, 636 bp, synthetic construct
  misc_feature 1..636: note = Description of Artificial Sequence: Synthetic coding sequence
  source 1..636: mol_type = other DNA
atgagactgttcctgtggaacgccgtgctgaccctgttcgtgaccagcctgatcggcgccctgatccccgagcccgaggtgaagatcgaggtgctgcagaagcccttcatctgccacagaaagaccaagggcggcgacctgatgctggtgcactacgagggctacctggagaaggacggcagcctgttccacagcacccacaagcacaacaacggccagcccatctggttcaccctgggcatcctggaggccctgaagggctgggaccagggcctgaagggcatgtgcgtgggcgagaagagaaagctgatcatcccccccgccctgggctacggcaaggagggcaagggcaagatcccccccgagagcaccctgatcttcaacatcgacctgctggagatcagaaacggccccagaagccacgagagcttccaggagatggacctgaacgacgactggaagctgagcaaggacgaggtgaaggcctacctgaagaaggagttcgagaagcacggcgccgtggtgaacgagagccaccacgacgccctggtggaggacatcttcgacaaggaggacgaggacaaggacggcttcatcagcgccagagagttcacctacaagcacgacgagctgtag

SEQ ID NO: 101637 - DNA, 783 bp, synthetic construct
  misc_feature 1..783: note = Description of Artificial Sequence: Synthetic coding sequence
  source 1..783: mol_type = other DNA
atgaaggacagaacccaggagctgagaaccgccaaggacagcgacgacgacgacgacgtggccgtgaccgtggacagagacagattcatggacgagttcttcgagcaggtggaggagatcagaggcttcatcgacaagatcgccgagaacgtggaggaggtgaagagaaagcacagcgccatcctggccagccccaaccccgacgagaagaccaaggaggagctggaggagctgatgagcgacatcaagaagaccgccaacaaggtgagaagcaagctgaagagcatcgagcagagcatcgagcaggaggagggcctgaacagaagcagcgccgacctgagaatcagaaagacccagcacagcaccctgagcagaaagttcgtggaggtgatgagcgagtacaacgccacccagagcgactacagagagagatgcaagggcagaatccagagacagctggagatcaccggcagaaccaccaccagcgaggagctggaggacatgctggagagcggcaaccccgccatcttcgccagcggcatcatcatggacagcagcatcagcaagcaggccctgagcgagatcgagaccagacacagcgagatcatcaagctggagaacagcatcagagagctgcacgacatgttcatggacatggccatgctggtggagagccagccccagggcgccttcctgaagagctgccccgagccccagcccaaccccgaggagggcgccctgtggagcagcggcgcccccggccccgccggcagagacgactag

SEQ ID NO: 101638 - DNA, 516 bp, synthetic construct
  misc_feature 1..516: note = Description of Artificial Sequence: Synthetic coding sequence
  source 1..516: mol_type = other DNA
atgaaggacagaacccaggagctgagaaccgccaaggacagcgacgacgacgacgacgtggccgtgaccgtggacagagacagattcatggacgagttcttcgagcaggtggaggtgatgagcgagtacaacgccacccagagcgactacagagagagatgcaagggcagaatccagagacagctggagatcaccggcagaaccaccaccagcgaggagctggaggacatgctggagagcggcaaccccgccatcttcgccagcggcatcatcatggacagcagcatcagcaagcaggccctgagcgagatcgagaccagacacagcgagatcatcaagctggagatcgagtacaacgtggagcacgccgtggactacgtggagagagccgtgagcgacaccaagaaggccgtgaagtaccagagcaaggccagaagaaagaagatcatgatcatcatctgctgcgtgatcctgggcatcgtgatcgccagcaccgtgggcggcatcttcgcctag

SEQ ID NO: 101639 - DNA, 756 bp, synthetic construct
  misc_feature 1..756: note = Description of Artificial Sequence: Synthetic coding sequence
  source 1..756: mol_type = other DNA
atgaaggacagaacccaggagctgagaaccgccaaggacagcgacgacgacgacgacgtggccgtgaccgtggacagagacagattcatggacgagttcttcgagcaggtggaggagatcagaggcttcatcgacaagatcgccgagaacgtggaggaggtgaagagaaagcacagcgccatcctggccagccccaaccccgacgagaagaccaaggaggagctggaggagctgatgagcgacatcaagaagaccgccaacaaggtgagaagcaagctgaagagcatcgagcagagcatcgagcaggaggagggcctgaacagaagcagcgccgacctgagaatcagaaagacccagcacagcaccctgagcagaaagttcgtggaggtgatgagcgagtacaacgccacccagagcgactacagagagagatgcaagggcagaatccagagacagctggagatcaccggcagaaccaccaccagcgaggagctggaggacatgctggagagcggcaaccccgccatcttcgccagcggcatcatcatggacagcagcatcagcaagcaggccctgagcgagatcgagaccagacacagcgagatcatcaagctggagaacagcatcagagagctgcacgacatgttcatggacatggccatgctggtggagagccagaccatgtggagaggcccctgcctgacccccagaagacccagcagcaccagagccagaagagccggcagaaagagctag

SEQ ID NO: 101640 - DNA, 1053 bp, synthetic construct
  misc_feature 1..1053: note = Description of Artificial Sequence: Synthetic coding sequence
  source 1..1053: mol_type = other DNA
atgttcatcaagggcagagcccccagagccccccccagagagagaagaagagccaccagaggcggcctgagacaggtggtggccccccccagagccctgggcagcaccagcagaccccacttcagaagagccagcgtgtgcagaagaagatgcagaaagagcggcggcctgctggccgccagcagaaagatggccgccgccgccgtgaacggcgccgccggcttcagcagcagcggccccgccgccaccagcggcgccgtgctgcaggccgccaccggcatgtacgagcagctgaagggcgagtggaacagaaagagccccaacctgagcaagtgcggcgaggagctgggcagactgaagctggtgctgctggagctgaacttcctgcccaccaccggcaccaagctgaccaagcagcagctgatcctggccagagacatcctggagatcggcgcccagtggagcatcctgagaaaggacatccccagcttcgagagatacatggcccagctgaagtgctactacttcgactacaaggagcagctgcccgagagcgcctacatgcaccagctgctgggcctgaacctgctgttcctgctgagccagaacagagtggccgagttccacaccgagctggagagactgcccgccaaggacatccagaccaacgtgtacatcaagcaccccgtgagcctggagcagtacctgatggagggcagctacaacaaggtgttcctggccaagggcaacatccccgccgagagctacaccttcttcatcgacatcctgctggacaccatcagagacgagatcgccggctgcatcgagaaggcctacgagaagatcctgttcaccgaggccaccagaatcctgttcttcaacacccccaagaagatgaccgactacgccaagaagagaggctgggtgctgggccccaacaactactacagcttcgccagccagcagcagaagcccgaggacaccaccatccccagcaccgagctggccaagcaggtgatcgagtacgccagacagctggagatgatcgtgtag

SEQ ID NO: 101641 - DNA, 864 bp, synthetic construct
  misc_feature 1..864: note = Description of Artificial Sequence: Synthetic coding sequence
  source 1..864: mol_type = other DNA
atgagagacagactgcccgacctgaccgcctgcagaaagaacgacgacggcgacaccgtggtggtggtggagaaggaccacttcatggacgacttcttccaccaggtggaggagatcagaaacagcatcgacaagatcacccagtacgtggaggaggtgaagaagaaccacagcatcatcctgagcgcccccaaccccgagggcaagatcaaggaggagctggaggacctgaacaaggagatcaagaagaccgccaacaagatcagagccaagctgaaggccatcgagcagagcttcgaccaggacgagagcggcaacagaaccagcgtggacctgagaatcagaagaacccagcacagcgtgctgagcagaaagttcgtggaggccatggccgagtacaacgaggcccagaccctgttcagagagagaagcaagggcagaatccagagacagctggagatcaccggcagaaccaccaccgacgacgagctggaggagatgctggagagcggcaagcccagcatcttcaccagcgacatcatcagcgacagccagatcaccagacaggccctgaacgagatcgagagcagacacaaggacatcatgaagctggagaccagcatcagagagctgcacgagatgttcatggacatggccatgttcgtggagacccagggcgagatgatcaacaacatcgagagaaacgtgatgaacgccaccgactacgtggagcacgccaaggaggagaccaagaaggccatcaagtaccagagcaaggccagaagaaagctgatgttcatcatcatctgcgtgatcgtgctgctggtgatcctgggcatcatcctggccaccaccctgagctag

SEQ ID NO: 101642 - DNA, 867 bp, synthetic construct
  misc_feature 1..867: note = Description of Artificial Sequence: Synthetic coding sequence
  source 1..867: mol_type = other DNA
atgagagacagactgcccgacctgaccgcctgcagaaagaacgacgacggcgacaccgtggtggtggtggagaaggaccacttcatggacgacttcttccaccaggtggaggagatcagaaacagcatcgacaagatcacccagtacgtggaggaggtgaagaagaaccacagcatcatcctgagcgcccccaaccccgagggcaagatcaaggaggagctggaggacctgaacaaggagatcaagaagaccgccaacaagatcagagccaagctgaaggccatcgagcagagcttcgaccaggacgagagcggcaacagaaccagcgtggacctgagaatcagaagaacccagcacagcgtgctgagcagaaagttcgtggaggccatggccgagtacaacgaggcccagaccctgttcagagagagaagcaagggcagaatccagagacagctggagatcaccggcagaaccaccaccgacgacgagctggaggagatgctggagagcggcaagcccagcatcttcaccagcgacatcatcagcgacagccagatcaccagacaggccctgaacgagatcgagagcagacacaaggacatcatgaagctggagaccagcatcagagagctgcacgagatgttcatggacatggccatgttcgtggagacccagggcgagatgatcaacaacatcgagagaaacgtgatgaacgccaccgactacgtggagcacgccaaggaggagaccaagaaggccatcaagtaccagagcaaggccagaagaaagaagtggatcatcatcgccgtgagcgtggtgctggtggccatcatcgccctgatcatcggcctgagcgtgggcaagtag

SEQ ID NO: 101643 - DNA, 777 bp, synthetic construct
  misc_feature 1..777: note = Description of Artificial Sequence: Synthetic coding sequence
  source 1..777: mol_type = other DNA
atggacgagttcttcagcgagatcgaggagaccagactgaacatcgacaagatcagcgagcacgtggaggaggccaagaagctgtacagcatcatcctgagcgcccccatccccgagcccaagaccaaggacgacctggagcagctgaccaccgagatcaagaagagagccaacaacgtgagaaacaagctgaagagcatggagaagcacatcgaggaggacgaggtgagaagcagcgccgacctgagaatcagaaagagccagcacagcgtgctgagcagaaagttcgtggaggtgatgaccaagtacaacgaggcccaggtggacttcagagagagaagcaagggcagaatccagagacagctggagatcaccggcaagaagaccaccgacgaggagctggaggagatgctggagagcggcaaccccgccatcttcaccagcggcatcatcgacagccagatcagcaagcaggccctgagcgagatcgagggcagacacaaggacatcgtgagactggagagcagcatcaaggagctgcacgacatgttcatggacatcgccatgctggtggagaaccagggcgagatgctggacaacatcgagctgaacgtgatgcacaccgtggaccacgtggagaaggccagagacgagaccaagaaggccgtgaagtaccagagccaggccagaaagaagctgatcatcatcatcgtgctggtggtggtgctgctgggcatcctggccctgatcatcggcctgagcgtgggcctgaactag

SEQ ID NO: 101644 - DNA, 870 bp, synthetic construct
  misc_feature 1..870: note = Description of Artificial Sequence: Synthetic coding sequence
  source 1..870: mol_type = other DNA
atgaaggacagactggagcagctgaaggccaagcagctgacccaggacgacgacaccgacgccgtggagatcgccatcgacaacaccgccttcatggacgagttcttcagcgagatcgaggagaccagactgaacatcgacaagatcagcgagcacgtggaggaggccaagaagctgtacagcatcatcctgagcgcccccatccccgagcccaagaccaaggacgacctggagcagctgaccaccgagatcaagaagagagccaacaacgtgagaaacaagctgaagagcatggagaagcacatcgaggaggacgaggtgagaagcagcgccgacctgagaatcagaaagagccagcacagcgtgctgagcagaaagttcgtggaggtgatgaccaagtacaacgaggcccaggtggacttcagagagagaagcaagggcagaatccagagacagctggagatcaccggcaagaagaccaccgacgaggagctggaggagatgctggagagcggcaaccccgccatcttcaccagcggcatcatcgacagccagatcagcaagcaggccctgagcgagatcgagggcagacacaaggacatcgtgagactggagagcagcatcaaggagctgcacgacatgttcatggacatcgccatgctggtggagaaccagggcgagatgctggacaacatcgagctgaacgtgatgcacaccgtggaccacgtggagaaggccagagacgagaccaagaaggccgtgaagtaccagagccaggccagaaagaagctgatcatcatcatcgtgctggtggtggtgctgctgggcatcctggccctgatcatcggcctgagcgtgggcctgaactag

SEQ ID NO: 101645 - DNA, 543 bp, synthetic construct
  misc_feature 1..543: note = Description of Artificial Sequence: Synthetic coding sequence
  source 1..543: mol_type = other DNA
atggagaagcacatcgaggaggacgaggtgagaagcagcgccgacctgagaatcagaaagagccagcacagcgtgctgagcagaaagttcgtggaggtgatgaccaagtacaacgaggcccaggtggacttcagagagagaagcaagggcagaatccagagacagctggagatcaccggcaagaagaccaccgacgaggagctggaggagatgctggagagcggcaaccccgccatcttcaccagcggcatcatcgacagccagatcagcaagcaggccctgagcgagatcgagggcagacacaaggacatcgtgagactggagagcagcatcaaggagctgcacgacatgttcatggacatcgccatgctggtggagaaccagggcagcatgatcgacagaatcgagaacaacatggaccagagcgtgggcttcgtggagagagccgtggccgacaccaagaaggccgtgaagtaccagagcgaggccagaagaaagctgatcagcctgcagaccggcgtggccaccctggtgttcagatag

SEQ ID NO: 101646 - DNA, 834 bp, synthetic construct
  misc_feature 1..834: note = Description of Artificial Sequence: Synthetic coding sequence
  source 1..834: mol_type = other DNA
atgaaggacagactggagcagctgaaggccaagcagctgacccaggacgacgacaccgacgccgtggagatcgccatcgacaacaccgccttcatggacgagttcttcagcgagatcgaggagaccagactgaacatcgacaagatcagcgagcacgtggaggaggccaagaagctgtacagcatcatcctgagcgcccccatccccgagcccaagaccaaggacgacctggagcagctgaccaccgagatcaagaagagagccaacaacgtgagaaacaagctgaagagcatggagaagcacatcgaggaggacgaggtgagaagcagcgccgacctgagaatcagaaagagccagcacagcgtgctgagcagaaagttcgtggaggtgatgaccaagtacaacgaggcccaggtggacttcagagagagaagcaagggcagaatccagagacagctggagatcaccggcaagaagaccaccgacgaggagctggaggagatgctggagagcggcaaccccgccatcttcaccagcggcatcatcgacagccagatcagcaagcaggccctgagcgagatcgagggcagacacaaggacatcgtgagactggagagcagcatcaaggagctgcacgacatgttcatggacatcgccatgctggtggagaaccagggcgagatgctggacaacatcgagctgaacgtgatgcacaccgtggaccacgtggagaaggccagagacgagaccaagaaggccgtgaagtaccagagccaggccagaaagaagctgatcagcctgcagaccggcgtggccaccctggtgttcagatag

SEQ ID NO: 101647 - DNA, 231 bp, synthetic construct
  misc_feature 1..231: note = Description of Artificial Sequence: Synthetic coding sequence
  source 1..231: mol_type = other DNA
atgttcatggacatcgccatgctggtggagaaccagggcgagatgctggacaacatcgagctgaacgtgatgcacaccgtggaccacgtggagaaggccagagacgagaccaagaaggccgtgaagtaccagagccaggccagaaagaagctgatcatcatcatcgtgctggtggtggtgctgctgggcatcctggccctgatcatcggcctgagcgtgggcctgaactag

SEQ ID NO: 101648 - DNA, 759 bp, synthetic construct
  misc_feature 1..759: note = Description of Artificial Sequence: Synthetic coding sequence
  source 1..759: mol_type = other DNA
atgaaggacagactggagcagctgaaggccaagcagctgacccaggacgacgacaccgacgccgtggagatcgccatcgacaacaccgccttcatggacgagttcttcagcgagatcgaggagaccagactgaacatcgacaagatcagcgagcacgtggaggaggccaagaagctgtacagcatcatcctgagcgcccccatccccgagcccaagaccaaggacgacctggagcagctgaccaccgagatcaagaagagagccaacaacgtgagaaacaagctgaagagcatggagaagcacatcgaggaggacgaggtgagaagcagcgccgacctgagaatcagaaagagccagcacagcgtgctgagcagaaagttcgtggaggtgatgaccaagtacaacgaggcccaggtggacttcagagagagaagcaagggcagaatccagagacagctggagatcaccggcaagaagaccaccgacgaggagctggaggagatgctggagagcggcaaccccgccatcttcaccagcggcatcatcgacagccagatcagcaagcaggccctgagcgagatcgagggcagacacaaggacatcgtgagactggagagcagcatcaaggagctgcacgacatgttcatggacatcgccatgctggtggagaaccagaagctgatcatcatcatcgtgctggtggtggtgctgctgggcatcctggccctgatcatcggcctgagcgtgggcctgaactag

SEQ ID NO: 101649 - DNA, 894 bp, synthetic construct
  misc_feature 1..894: note = Description of Artificial Sequence: Synthetic coding sequence
  source 1..894: mol_type = other DNA
atgagagacagaacccacgagctgagacagggcgacgacagcagcgacgaggaggacaaggagagagtggccctggtggtgcaccccggcaccgccagactgggcagccccgacgaggagttcttccacaaggtgagaaccatcagacagaccatcgtgaagctgggcaacaaggtgcaggagctggagaagcagcaggtgaccatcctggccacccccctgcccgaggagagcatgaagcaggagctgcagaacctgagagacgagatcaagcagctgggcagagagatcagactgcagctgaaggccatcgagccccagaaggaggaggccgacgagaactacaacagcgtgaacaccagaatgagaaagacccagcacggcgtgctgagccagcagttcgtggagctgatcaacaagtgcaacagcatgcagagcgagtacagagagaagaacgtggagagaatcagaagacagctgaagatcaccaacgccggcatggtgagcgacgaggagctggagcagatgctggacagcggccagagcgaggtgttcgtgagcaacatcctgaaggacacccaggtgaccagacaggccctgaacgagatcagcgccagacacagcgagatccagcagctggagagaagcatcagagagctgcacgacatcttcaccttcctggccaccgaggtggagatgcagggcgagatgatcaacagaatcgagaagaacatcctgagcagcgccgactacgtggagagaggccaggagcacgtgaagaccgccctggagaaccagaagaaggccagaaagaagaaggtgctgatcgccatctgcgtgagcatcaccgtggtgctgctggccgtgatcatcggcgtgaccgtggtgggctag

SEQ ID NO: 101650 - DNA, 888 bp, synthetic construct
  misc_feature 1..888: note = Description of Artificial Sequence: Synthetic coding sequence
  source 1..888: mol_type = other DNA
atgggcatgaccgccagaaccaagagaaccagaagcggcagcagatggtggtgcaccagagccagacacggctggggcgccagaaccagaagcagcagcaccagccccctgggccaccccccccaggtgagaaccatcagacagaccatcgtgaagctgggcaacaaggtgcaggagctggagaagcagcaggtgaccatcctggccacccccctgcccgaggagagcatgaagcaggagctgcagaacctgagagacgagatcaagcagctgggcagagagatcagactgcagctgaaggccatcgagccccagaaggaggaggccgacgagaactacaacagcgtgaacaccagaatgagaaagacccagcacggcgtgctgagccagcagttcgtggagctgatcaacaagtgcaacagcatgcagagcgagtacagagagaagaacgtggagagaatcagaagacagctgaagatcaccaacgccggcatggtgagcgacgaggagctggagcagatgctggacagcggccagagcgaggtgttcgtgagcaacatcctgaaggacacccaggtgaccagacaggccctgaacgagatcagcgccagacacagcgagatccagcagctggagagaagcatcagagagctgcacgacatcttcaccttcctggccaccgaggtggagatgcagggcgagatgatcaacagaatcgagaagaacatcctgagcagcgccgactacgtggagagaggccaggagcacgtgaagaccgccctggagaaccagaagaaggccagaaagaagaaggtgctgatcgccatctgcgtgagcatcaccgtggtgctgctggccgtgatcatcggcgtgaccgtggtgggctag

SEQ ID NO: 101651 - DNA, 1068 bp, synthetic construct
  misc_feature 1..1068: note = Description of Artificial Sequence: Synthetic coding sequence
  source 1..1068: mol_type = other DNA
atgatccccagaaagagatacggcagcaagaacaccgaccagggcgtgtacctgggcctgagcaagacccaggtgctgagccccgccaccgccggcagcagcagcagcgacatcgcccccctgcccccccccgtgaccctggtgccccccccccccgacaccatgagctgcagagacagaacccaggagttcctgagcgcctgcaagagcctgcagaccagacagaacggcatccagaccaacaagcccgccctgagagccgtgagacagagaagcgagttcaccctgatggccaagagaatcggcaaggacctgagcaacaccttcgccaagctggagaagctgaccatcctggccaagagaaagagcctgttcgacgacaaggccgtggagatcgaggagctgacctacatcatcaagcaggacatcaacagcctgaacaagcagatcgcccagctgcaggacttcgtgagagccaagggcagccagagcggcagacacctgcagacccacagcaacaccatcgtggtgagcctgcagagcaagctggccagcatgagcaacgacttcaagagcgtgctggaggtgagaaccgagaacctgaagcagcagagaagcagaagagagcagttcagcagagcccccgtgagcgccctgcccctggcccccaaccacctgggcggcggcgccgtggtgctgggcgccgagagccacgccagcaaggacgtggccatcgacatgatggacagcagaaccagccagcagctgcagctgatcgacgagcaggacagctacatccagagcagagccgacaccatgcagaacatcgagagcaccatcgtggagctgggcagcatcttccagcagctggcccacatggtgaaggagcaggaggagaccatccagagaatcgacgagaacgtgctgggcgcccagctggacgtggaggccgcccacagcgagatcctgaagtacttccagagcgtgaccagcaacagatggctgatggtgaagatcttcctgatcctgatcgtgttcttcatcatcttcgtggtgttcctggcctag

SEQ ID NO: 101652 - DNA, 966 bp, synthetic construct
  misc_feature 1..966: note = Description of Artificial Sequence: Synthetic coding sequence
  source 1..966: mol_type = other DNA
atgatccccagaaagagatacggcagcaagaacaccgaccagggcgtgtacctgggcctgagcaagacccaggtgctgagccccgccaccgccggcagcagcagcagcgacatcgcccccctgcccccccccgtgaccctggtgccccccccccccgacaccatgagctgcagagacagaacccaggagttcctgagcgcctgcaagagcctgcagaccagacagaacggcatccagaccaacaagcccgccctgagagccgtgagacagagaagcgagttcaccctgatggccaagagaatcggcaaggacctgagcaacaccttcgccaagctggagaagctgaccatcctggccaagagaaagagcctgttcgacgacaaggccgtggagatcgaggagctgacctacatcatcaagcaggacatcaacagcctgaacaagcagatcgcccagctgcaggacttcgtgagagccaagggcagccagagcggcagacacctgcagacccacagcaacaccatcgtggtgagcctgcagagcaagctggccagcatgagcaacgacttcaagagcgtgctggaggtgagaaccgagaacctgaagcagcagagaagcagaagagagcagttcagcagagcccccgtgagcgccctgcccctggcccccaaccacctgggcggcggcgccgtggtgctgggcgccgagagccacgccagcaaggacgtggccatcgacatgatggacagcagaaccagccagcagctgcagctgatcgacgagcaggacagctacatccagagcagagccgacaccatgcagaacatcgagagcaccatcgtggagctgggcagcatcttccagcagctggcccacatggtgaaggagcaggaggagaccatccagagcgtgctgctgttccccctgctgcccgccctgagccccggcagcaccagaacctgctag

SEQ ID NO: 101653 - DNA, 906 bp, synthetic construct
  misc_feature 1..906: note = Description of Artificial Sequence: Synthetic coding sequence
  source 1..906: mol_type = other DNA
atgagctgcagagacagaacccaggagttcctgagcgcctgcaagagcctgcagaccagacagaacggcatccagaccaacaagcccgccctgagagccgtgagacagagaagcgagttcaccctgatggccaagagaatcggcaaggacctgagcaacaccttcgccaagctggagaagctgaccatcctggccaagagaaagagcctgttcgacgacaaggccgtggagatcgaggagctgacctacatcatcaagcaggacatcaacagcctgaacaagcagatcgcccagctgcaggacttcgtgagagccaagggcagccagagcggcagacacctgcagacccacagcaacaccatcgtggtgagcctgcagagcaagctggccagcatgagcaacgacttcaagagcgtgctggaggtgagaaccgagaacctgaagcagcagagaagcagaagagagcagttcagcagagcccccgtgagcgccctgcccctggcccccaaccacctgggcggcggcgccgtggtgctgggcgccgagagccacgccagcaaggacgtggccatcgacatgatggacagcagaaccagccagcagctgcagctgatcgacgagcaggacagctacatccagagcagagccgacaccatgcagaacatcgagagcaccatcgtggagctgggcagcatcttccagcagctggcccacatggtgaaggagcaggaggagaccatccagagaatcgacgagaacgtgctgggcgcccagctggacgtggaggccgcccacagcgagatcctgaagtacttccagagcgtgaccagcaacagatggctgatggtgaagatcttcctgatcctgatcgtgttcttcatcatcttcgtggtgttcctggcctag

SEQ ID NO: 101654 - DNA, 780 bp, synthetic construct
  misc_feature 1..780: note = Description of Artificial Sequence: Synthetic coding sequence
  source 1..780: mol_type = other DNA
atggccaagagaatcggcaaggacctgagcaacaccttcgccaagctggagaagctgaccatcctggccaagagaaagagcctgttcgacgacaaggccgtggagatcgaggagctgacctacatcatcaagcaggacatcaacagcctgaacaagcagatcgcccagctgcaggacttcgtgagagccaagggcagccagagcggcagacacctgcagacccacagcaacaccatcgtggtgagcctgcagagcaagctggccagcatgagcaacgacttcaagagcgtgctggaggtgagaaccgagaacctgaagcagcagagaagcagaagagagcagttcagcagagcccccgtgagcgccctgcccctggcccccaaccacctgggcggcggcgccgtggtgctgggcgccgagagccacgccagcaaggacgtggccatcgacatgatggacagcagaaccagccagcagctgcagctgatcgacgagcaggacagctacatccagagcagagccgacaccatgcagaacatcgagagcaccatcgtggagctgggcagcatcttccagcagctggcccacatggtgaaggagcaggaggagaccatccagagaatcgacgagaacgtgctgggcgcccagctggacgtggaggccgcccacagcgagatcctgaagtacttccagagcgtgaccagcaacagatggctgatggtgaagatcttcctgatcctgatcgtgttcttcatcatcttcgtggtgttcctggcctag

SEQ ID NO: 101655 - DNA, 720 bp, synthetic construct
  misc_feature 1..720: note = Description of Artificial Sequence: Synthetic coding sequence
  source 1..720: mol_type = other DNA
atgagctacacccccggcgtgggcggcgaccccgcccagctggcccagagaatcagcagcaacatccagaagatcacccagtgcagcgtggagatccagagaaccctgaaccagctgggcaccccccaggacagccccgagctgagacagcagctgcagcagaagcagcagtacaccaaccagctggccaaggagaccgacaagtacatcaaggagttcggcagcctgcccaccacccccagcgagcagagacagagaaagatccagaaggacagactggtggccgagttcaccaccagcctgaccaacttccagaaggtgcagagacaggccgccgagagagagaaggagttcgtggccagagtgagagccagcagcagagtgagcggcagcttccccgaggacagcagcaaggagagaaacctggtgagctgggagagccagacccagccccaggtgcaggtgcaggacgaggagatcaccgaggacgacctgagactgatccacgagagagagagcagcatcagacagctggaggccgacatcatggacatcaacgagatcttcaaggacctgggcatgatgatccacgagcagggcgacgtgatcgacagcatcgaggccaacgtggagaacgccgaggtgcacgtgcagcaggccaaccagcagctgagcagagccgccgactaccagaagaaggacagctgcatgctgatgtag

SEQ ID NO: 101656 - DNA, 786 bp, synthetic construct
  misc_feature 1..786: note = Description of Artificial Sequence: Synthetic coding sequence
  source 1..786: mol_type = other DNA
atgagctacacccccggcgtgggcggcgaccccgcccagctggcccagagaatcagcagcaacatccagaagatcacccagtgcagcgtggagatccagagaaccctgaaccagctgggcaccccccaggacagccccgagctgagacagcagctgcagcagaagcagcagtacaccaaccagctggccaaggagaccgacaagtacatcaaggagttcggcagcctgcccaccacccccagcgagcagagacagagaaagatccagaaggacagactggtggccgagttcaccaccagcctgaccaacttccagaaggtgcagagacaggccgccgagagagagaaggagttcgtggccagagtgagagccagcagcagagtgagcggcagcttccccgaggacagcagcaaggagagaaacctggtgagctgggagagccagacccagccccaggtgcaggtgcaggacgaggagatcaccgaggacgacctgagactgatccacgagagagagagcagcatcagacagctggaggccgacatcatggacatcaacgagatcttcaaggacctgggcatgatgatccacgagcagggcgacgtgatcgacagcatcgaggccaacgtggagaacgccgaggtgcacgtgcagcaggccaaccagcagctgagcagagccgccgactaccagagaaagagcagaaagaccctgtgcatcatcatcctgatcctggtgatcggcgtggccatcatcagcctgatcatctggggcctgaaccactag

SEQ ID NO: 101657 - DNA, 786 bp, synthetic construct; identical to SEQ ID NO: 101656
  misc_feature 1..786: note = Description of Artificial Sequence: Synthetic coding sequence
  source 1..786: mol_type = other DNA

SEQ ID NO: 101658 - DNA, 711 bp, synthetic construct
  misc_feature 1..711: note = Description of Artificial Sequence: Synthetic coding sequence
  source 1..711: mol_type = other DNA
atggcccccgacccctggttcagcacctacgacagcacctgccagatcgcccaggagatcgccgagaagatccagcagagaaaccagtacgagagaaagggcgagaaggcccccaagctgaccgtgaccatcagagccctgctgcagaacctgaaggagaagatcgccctgctgaaggacctgctgctgagagccgtgagcacccaccagatcacccagctggagggcgacagaagacagaacctgctggacgacctggtgaccagagagagactgctgctggccagcttcaagaacgagggcgccgagcccgacctgatcagaagcagcctgatgagcgaggaggccaagagaggcgcccccaacccctggctgttcgaggagcccgaggagaccagaggcctgggcttcgacgagatcagacagcagcagcagaagatcatccaggagcaggacgccggcctggacgccctgagcagcatcatcagcagacagaagcagatgggccaggagatcggcaacgagctggacgagcagaacgagatcatcgacgacctggccaacctggtggagaacaccgacgagaagctgagaaacgagaccagaagagtgaacatggtggacagaaagagcgccagctgcggcatgatcatggtgatcctgctgctgctggtggccatcgtggtggtggccgtgtggcccaccaactag

SEQ ID NO: 101659 - DNA, 1785 bp, synthetic construct
  misc_feature 1..1785: note = Description of Artificial Sequence: Synthetic coding sequence
  source 1..1785: mol_type = other DNA
atggcccccatcggcctgaaggccgtggtgggcgagaagatcatgcacgacgtgatcaagaaggtgaagaagaagggcgagtggaaggtgctggtggtggaccagctgagcatgagaatgctgagcagctgctgcaagatgaccgacatcatgaccgagggcatcaccatcgtggaggacatcaacaagagaagagagcccctgcccagcctggaggccgtgtacctgatcacccccagcgagaagagcgtgcacagcctgatcagcgacttcaaggacccccccaccgccaagtacagagccgcccacgtgttcttcaccgacagctgccccgacgccctgttcaacgagctggtgaagagcagagccgccaaggtgatcaagaccctgaccgagatcaacatcgccttcctgccctacgagagccaggtgtacagcctggacagcgccgacagcttccagagcttctacagcccccacaaggcccagatgaagaaccccatcctggagagactggccgagcagatcgccaccctgtgcgccaccctgaaggagtaccccgccgtgagatacagaggcgagtacaaggacaacgccctgctggcccagctgatccaggacaagctggacgcctacaaggccgacgaccccaccatgggcgagggccccgacaaggccagaagccagctgctgatcctggacagaggcttcgaccccagcagccccgtgctgcacgagctgaccttccaggccatgagctacgacctgctgcccatcgagaacgacgtgtacaagtacgagaccagcggcatcggcgaggccagagtgaaggaggtgctgctggacgaggacgacgacctgtggatcgccctgagacacaagcacatcgccgaggtgagccaggaggtgaccagaagcctgaaggacttcagcagcagcaagagaatgaacaccggcgagaagaccaccatgagagacctgagccagatgctgaagaagatgccccagtaccagaaggagctgagcaagtacagcacccacctgcacctggccgaggactgcatgaagcactaccagggcaccgtggacaagctgtgcagagtggagcaggacctggccatgggcaccgacgccgagggcgagaagatcaaggaccccatgagagccatcgtgcccatcctgctggacgccaacgtgagcacctacgacaagatcagaatcatcctgctgtacatcttcctgaagaacggcatcaccgaggagaacctgaacaagctgatccagcacgcccagatcccccccgaggacagcgagatcatcaccaacatggcccacctgggcgtgcccatcgtgaccgacagcaccctgagaagaagaagcaagcccgagagaaaggagagaatcagcgagcagacctaccagctgagcagatggacccccatcatcaaggacatcatggaggacaccatcgaggacaagctggacaccaagcactacccctacatcagcaccagaagcagcgccagcttcagcaccaccgccgtgagcgccagatacggccactggcacaagaacaaggcccccggcgagtacagaagcggccccagactgatcatcttcatcctgggcggcgtgagcctgaacgagatgagatgcgcctacgaggtgacccaggccaacggcaagtgggaggtgctgatcggcagcacccacatcctgaccccccagaagctgctggacaccctgaagaagctgaacaagaccgacgaggagatcagcagctag

SEQ ID NO: 101660 - DNA, 1674 bp, synthetic construct
  misc_feature 1..1674: note = Description of Artificial Sequence: Synthetic coding sequence
  source 1..1674: mol_type = other DNA
atgaccgacatcatgaccgagggcatcaccatcgtggaggacatcaacaagagaagagagcccctgcccagcctggaggccgtgtacctgatcacccccagcgagaagagcgtgcacagcctgatcagcgacttcaaggacccccccaccgccaagtacagagccgcccacgtgttcttcaccgacagctgccccgacgccctgttcaacgagctggtgaagagcagagccgccaaggtgatcaagaccctgaccgagatcaacatcgccttcctgccctacgagagccaggtgtacagcctggacagcgccgacagcttccagagcttctacagcccccacaaggcccagatgaagaaccccatcctggagagactggccgagcagatcgccaccctgtgcgccaccctgaaggagtaccccgccgtgagatacagaggcgagtacaaggacaacgccctgctggcccagctgatccaggacaagctggacgcctacaaggccgacgaccccaccatgggcgagggccccgacaaggccagaagccagctgctgatcctggacagaggcttcgaccccagcagccccgtgctgcacgagctgaccttccaggccatgagctacgacctgctgcccatcgagaacgacgtgtacaagtacgagaccagcggcatcggcgaggccagagtgaaggaggtgctgctggacgaggacgacgacctgtggatcgccctgagacacaagcacatcgccgaggtgagccaggaggtgaccagaagcctgaaggacttcagcagcagcaagagaatgaacaccggcgagaagaccaccatgagagacctgagccagatgctgaagaagatgccccagtaccagaaggagctgagcaagtacagcacccacctgcacctggccgaggactgcatgaagcactaccagggcaccgtggacaagctgtgcagagtggagcaggacctggccatgggcaccgacgccgagggcgagaagatcaaggaccccatgagagccatcgtgcccatcctgctggacgccaacgtgagcacctacgacaagatcagaatcatcctgctgtacatcttcctgaagaacggcatcaccgaggagaacctgaacaagctgatccagcacgcccagatcccccccgaggacagcgagatcatcaccaacatggcccacctgggcgtgcccatcgtgaccgacagcaccctgagaagaagaagcaagcccgagagaaaggagagaatcagcgagcagacctaccagctgagcagatggacccccatcatcaaggacatcatggaggacaccatcgaggacaagctggacaccaagcactacccctacatcagcaccagaagcagcgccagcttcagcaccaccgccgtgagcgccagatacggccactggcacaagaacaaggcccccggcgagtacagaagcggccccagactgatcatcttcatcctgggcggcgtgagcctgaacgagatgagatgcgcctacgaggtgacccaggccaacggcaagtgggaggtgctgatcggcagcacccacatcctgacccccaccaagttcctgatggacctgagacaccccgacttcagagagagcagcagagtgagcttcgaggaccaggcccccaccatggagtag

SEQ ID NO: 101661 - DNA, 1308 bp, synthetic construct
  misc_feature 1..1308: note = Description of Artificial Sequence: Synthetic coding sequence
  source 1..1308: mol_type = other DNA
atggcccccatcggcctgaaggccgtggtgggcgagaagatcatgcacgacgtgatcaagaaggtgaagaagaagggcgagtggaaggtgctggtggtggaccagctgagcatgagaatgctgagcagctgctgcaagatgaccgacatcatgaccgagggccccgacaaggccagaagccagctgctgatcctggacagaggcttcgaccccagcagccccgtgctgcacgagctgaccttccaggccatgagctacgacctgctgcccatcgagaacgacgtgtacaagtacgagaccagcggcatcggcgaggccagagtgaaggaggtgctgctggacgaggacgacgacctgtggatcgccctgagacacaagcacatcgccgaggtgagccaggaggtgaccagaagcctgaaggacttcagcagcagcaagagaatgaacaccggcgagaagaccaccatgagagacctgagccagatgctgaagaagatgccccagtaccagaaggagctgagcaagtacagcacccacctgcacctggccgaggactgcatgaagcactaccagggcaccgtggacaagctgtgcagagtggagcaggacctggccatgggcaccgacgccgagggcgagaagatcaaggaccccatgagagccatcgtgcccatcctgctggacgccaacgtgagcacctacgacaagatcagaatcatcctgctgtacatcttcctgaagaacggcatcaccgaggagaacctgaacaagctgatccagcacgcccagatcccccccgaggacagcgagatcatcaccaacatggcccacctgggcgtgcccatcgtgaccgacagcaccctgagaagaagaagcaagcccgagagaaaggagagaatcagcgagcagacctaccagctgagcagatggacccccatcatcaaggacatcatggaggacaccatcgaggacaagctggacaccaagcactacccctacatcagcaccagaagcagcgccagcttcagcaccaccgccgtgagcgccagatacggccactggcacaagaacaaggcccccggcgagtacagaagcggccccagactgatcatcttcatcctgggcggcgtgagcctgaacgagatgagatgcgcctacgaggtgacccaggccaacggcaagtgggaggtgctgatcggcagcacccacatcctgacccccaccaagttcctgatggacctgagacaccccgacttcagagagagcagcagagtgagcttcgaggaccaggcccccaccatggagtag

SEQ ID NO: 101662 - DNA, 1812 bp, synthetic construct
  misc_feature 1..1812: note = Description of Artificial Sequence: Synthetic coding sequence
  source 1..1812: mol_type = other DNA
atggcccccatcggcctgaaggccgtggtgggcgagaagatcatgcacgacgtgatcaagaaggtgaagaagaagggcgagtggaaggtgctggtggtggaccagctgagcatgagaatgctgagcagctgctgcaagatgaccgacatcatgaccgagggcatcaccatcgtggaggacatcaacaagagaagagagcccctgcccagcctggaggccgtgtacctgatcacccccagcgagaagagcgtgcacagcctgatcagcgacttcaaggacccccccaccgccaagtacagagccgcccacgtgttcttcaccgacagctgccccgacgccctgttcaacgagctggtgaagagcagagccgccaaggtgatcaagaccctgaccgagatcaacatcgccttcctgccctacgagagccaggtgtacagcctggacagcgccgacagcttccagagcttctacagcccccacaaggcccagatgaagaaccccatcctggagagactggccgagcagatcgccaccctgtgcgccaccctgaaggagtaccccgccgtgagatacagaggcgagtacaaggacaacgccctgctggcccagctgatccaggacaagctggacgcctacaaggccgacgaccccaccatgggcgagggccccgacaaggccagaagccagctgctgatcctggacagaggcttcgaccccagcagccccgtgctgcacgagctgaccttccaggccatgagctacgacctgctgcccatcgagaacgacgtgtacaagtacgagaccagcggcatcggcgaggccagagtgaaggaggtgctgctggacgaggacgacgacctgtggatcgccctgagacacaagcacatcgccgaggtgagccaggaggtgaccagaagcctgaaggacttcagcagcagcaagagaatgaacaccggcgagaagaccaccatgagagacctgagccagatgctgaagaagatgccccagtaccagaaggagctgagcaagtacagcacccacctgcacctggccgaggactgcatgaagcactaccagggcaccgtggacaagctgtgcagagtggagcaggacctggccatgggcaccgacgccgagggcgagaagatcaaggaccccatgagagccatcgtgcccatcctgctggacgccaacgtgagcacctacgacaagatcagaatcatcctgctgtacatcttcctgaagaacggcatcaccgaggagaacctgaacaagctgatccagcacgcccagatcccccccgaggacagcgagatcatcaccaacatggcccacctgggcgtgcccatcgtgaccgacagcaccctgagaagaagaagcaagcccgagagaaaggagagaatcagcgagcagacctaccagctgagcagatggacccccatcatcaaggacatcatggaggacaccatcgaggacaagctggacaccaagcactacccctacatcagcaccagaagcagcgccagcttcagcaccaccgccgtgagcgccagatacggccactggcacaagaacaaggcccccggcgagtacagaagcggccccagactgatcatcttcatcctgggcggcgtgagcctgaacgagatgagatgcgcctacgaggtgacccaggccaacggcaagtgggaggtgctgatcggcagcacccacatcctgacccccaccaagttcctgatggacctgagacaccccgacttcagagagagcagcagagtgagcttcgaggaccaggcccccaccatggagtag

SEQ ID NO: 101663 - DNA, 1389 bp, synthetic construct
  misc_feature 1..1389: note = Description of Artificial Sequence: Synthetic coding sequence
  source 1..1389: mol_type = other DNA
atggcccccaccatccagacccaggcccagagagaggacggccacagaagcggcgtggtgtgcagagtgaagtactgcaacagcctgcccgacatccccttcgaccccaagttcatcacctaccccttcgaccagaacagattcgtgcagtacaaggccaccagcctggagaagcagcacaagcacgacctgctgaccgagcccgacctgggcgtgaccatcgacctgatcaaccccgacacctacagaatcgaccccaacgtgctgctggaccccgccgacgagaagctgctggaggaggagatccaggcccccaccagcagcaagagaagccagcagcacgccaaggtggtgccctggatgagaaagaccgagtacatcagcaccgagttcaacagatacggcatcagcaacgagaagcccgaggtgaagatcggcgtgagcgtgaagcagcagttcaccgaggaggagatctacaaggacagagacagccagatcaccgccatcgagaagaccttcgaggacgcccagaagagcatgtggatcaacccctgcgcccaggtgatcttcgacagcgaccccgcccccaaggacaccagcggcgccgccgccctggagatgatgagccaggccatgatcagaggcatgatggacgaggagggcaaccagttcgtggcctacttcctgcccgtggaggagaccctgaagaagagaaagagagaccaggaggaggagatggactacgcccccgacgacgtgtacgactacaagatcgccagagagtacaactggaacgtgaagaacaaggccagcaagggctacgaggagaactacttcttcatcttcagagagggcgacggcgtgtactacaacgagctggagaccagagtgagactgagcaagagaagagccaaggccggcgtgcagagcggcaccaacgccctgctggtggtgaagcacagagacatgaacgagaaggagctggaggcccaggaggccagaaaggcccagctggagaaccacgagcccgaggaggaggaggaggaggagatggagaccgaggagaaggaggccggcggcagcgtgatgctgatcctgagaaccatgcccaccctgatgatgagaaccgaggacagacccaaggtggccgtgaccatgatccagaccgccgccgccatgggcgtggccagcggcgccggcgccaccgccgccgcccccgtgcccagccccgtggccgccagcaccagacccagaagaatggccgtgaagctgcagctgctgatccccgtgaagctgatcgtgaccgtgaccgagagccagggcatccagggctggttcagacaccactactgcgagcagcagagcaccttcctggtggtgtgcctgtag

SEQ ID NO: 101664 - DNA, 1197 bp, synthetic construct
  misc_feature 1..1197: note = Description of Artificial Sequence: Synthetic coding sequence
  source 1..1197: mol_type = other DNA
atgtgcatcagagtgcacgtgagcatgtgcatgtgcatgtgcgtgcacgtgtgcgtgcacctgtgcatgcacgtgtgcgccgtgtgcatgtgcgtgtacgtgtgcgtgtgcgtgcacgtgcacgtgtgcgccagcgtgtgcgccttcgtgtgcatgtgcgtgtgcgtgtgcgtgtgcggcagcgtgtgcgccttcgtgagcgtgcacgtgtgcatgagagtgtacgtgtgcgtgtgcatctgcgtgcacctgtacgtgtgcgtgtgcgtgtgcctgtgcgcctgcgtgtacgcctgcgtgtgcatgtgcctgagactgtgcgtgagactgtgcgtgagcgtgtgcgcctgcgtgtacgcctgcatctgcatgtgcatctgcgtgcacgtgagcatgtacgtgtgcgccagcgtgtgcgcctgcgtgtgcgtgtgcgtgtgcgtgtgcgtgtgcatgagagtgtgcgcccaccagtgcctgcacgtgtgcatctgcgtgtacgtgtgcgccagaatctgcgtgtgcgcctgcgtgtacgtgtgcgtgtgcatcagcgtgtgcgcctgcgtgtacgtgtgcgtgcacctgtgcgtgtgcgcctgcgtgcacgcctgcgtgtgcgtgtgcgcctgcgtgcacctgtgcgtgtgcgcctgcgcccacgtgggcgccaccctggtgtgcatctgcacctacacctgccccagacccagcatgttcgcccacggcggcagatggggcgtggccggcagacccagacagcccatgagcctgggcgtgcaggcccaggcccagagagtgatccacctgccccagagcgtgcaggccctgatcaaggacttccagggcacccccaccttcacctacaaggccgcccacatcttcttcaccgacacctgccccgagcccctgttcagcgagctgggcagaagcagactggccaaggtggtgaagaccctgaaggagatccacctggccttcctgccctacgaggcccaggtgagacccggcctgatcctgggcagaggctggggcttcgtgaccaagtgccccctgttcccccagaagcagaccctgagactgggcgccgtggcccacacctgcaaccccagcgccgtgggcggccagggcagaagaatcacctggggccaggagttcgagaccagcctgggcaccgagcaggaccccgtgagctag

SEQ ID NO: 101665 - DNA, 1773 bp, synthetic construct
  misc_feature 1..1773: note = Description of Artificial Sequence: Synthetic coding sequence
  source 1..1773: mol_type = other DNA
atggcccccagcggcctgaaggccgtggtgggcgagaagatcctgagcggcgtgatcagaagcgtgaagaaggacggcgagtggaaggtgctgatcatggaccaccccagcatgagaatcctgagcagctgctgcaagatgagcgacatcctggccgagggcatcaccatcgtggaggacatcaacaagagaagagagcccatccccagcctggaggccatctacctgctgagccccaccgagaaggccctgatcaaggacttccagggcacccccaccttcacctacaaggccgcccacatcttcttcaccgacacctgccccgagcccctgttcagcgagctgggcagaagcagactggccaaggtggtgaagaccctgaaggagatccacctggccttcctgccctacgaggcccaggtgttcagcctggacgccccccacagcacctacaacctgtactgccccttcagagccgaggagagaaccagacagctggaggtgctggcccagcagatcgccaccctgtgcgccaccctgcaggagtaccccgccatcagatacagaaagggccccgaggacaccgcccagctggcccacgccgtgctggccaagctgaacgccttcaaggccgacacccccagcctgggcgagggccccgagaagaccagaagccagctgctgatcatggacagagccgccgaccccgtgagccccctgctgcacgagctgaccttccaggccatggcctacgacctgctggacatcgagcaggacacctacagatacgagaccaccggcctgagcgaggccagagagaaggccgtgctgctggacgaggacgacgacctgtgggtggagctgagacacatgcacatcgccgacgtgagcaagaaggtgaccgagctgctgagaaccttctgcgagagcaagagactgaccaccgacaaggccaacatcaaggacctgagccagatcctgaagaagatgccccagtaccagaaggagctgaacaagtacagcacccacctgcacctggccgacgactgcatgaagcacttcaagggcagcgtggagaagctgtgcagcgtggagcaggacctggccatgggcagcgacgccgagggcgagaagatcaaggacagcatgaagctgatcgtgcccgtgctgctggacgccgccgtgcccgcctacgacaagatcagagtgctgctgctgtacatcctgctgagaaacggcgtgagcgaggagaacctggccaagctgatccagcacgccaacgtgcaggcccacagcagcctgatcagaaacctggagcagctgggcggcaccgtgaccaaccccggcggcagcggcaccagcagcagactggagcccagagagagaatggagcccacctaccagctgagcagatggacccccgtgatcaaggacgtgatggaggacgccgtggaggacagactggacagaaacctgtggcccttcgtgagcgaccccgcccccaccgccagcagccaggccgccgtgagcgccagattcggccactggcacaagaacaaggccggcatcgaggccagagccggccccagactgatcgtgtacgtgatgggcggcgtggccatgagcgagatgagagccgcctacgaggtgaccagagccaccgagggcaagtgggaggtgctgatcggcagcagccacatcctgacccccaccagattcctggacgacctgaaggccctggacaagaagctggaggacatcgccctgccctag

SEQ ID NO: 101666 - DNA, 1815 bp, synthetic construct
  misc_feature 1..1815: note = Description of Artificial Sequence: Synthetic coding sequence
  source 1..1815: mol_type = other DNA
atggcccccagcggcctgaaggccgtggtgggcgagaagatcctgagcggcgtgatcagaagcgtgaagaaggacggcgagtggaaggtgctgatcatggaccaccccagcatgagaatcctgagcagctgctgcaagatgagcgacatcctggccgagggcatcaccatcgtggaggacatcaacaagagaagagagcccatccccagcctggaggccatctacctgctgagccccaccgagaaggcccaggcccagagagtgatccacctgccccagagcgtgcaggccctgatcaaggacttccagggcacccccaccttcacctacaaggccgcccacatcttcttcaccgacacctgccccgagcccctgttcagcgagctgggcagaagcagactggccaaggtggtgaagaccctgaaggagatccacctggccttcctgccctacgaggcccaggtgttcagcctggacgccccccacagcacctacaacctgtactgccccttcagagccgaggagagaaccagacagctggaggtgctggcccagcagatcgccaccctgtgcgccaccctgcaggagtaccccgccatcagatacagaaagggccccgaggacaccgcccagctggcccacgccgtgctggccaagctgaacgccttcaaggccgacacccccagcctgggcgagggccccgagaagaccagaagccagctgctgatcatggacagagccgccgaccccgtgagccccctgctgcacgagctgaccttccaggccatggcctacgacctgctggacatcgagcaggacacctacagatacgagaccaccggcctgagcgaggccagagagaaggccgtgctgctggacgaggacgacgacctgtgggtggagctgagacacatgcacatcgccgacgtgagcaagaaggtgaccgagctgctgagaaccttctgcgagagcaagagactgaccaccgacaaggccaacatcaaggacctgagccagatcctgaagaagatgccccagtaccagaaggagctgaacaagtacagcacccacctgcacctggccgacgactgcatgaagcacttcaagggcagcgtggagaagctgtgcagcgtggagcaggacctggccatgggcagcgacgccgagggcgagaagatcaaggacagcatgaagctgatcgtgcccgtgctgctggacgccgccgtgcccgcctacgacaagatcagagtgctgctgctgtacatcctgctgagaaacggcgtgagcgaggagaacctggccaagctgatccagcacgccaacgtgcaggcccacagcagcctgatcagaaacctggagcagctgggcggcaccgtgaccaaccccggcggcagcggcaccagcagcagactggagcccagagagagaatggagcccacctaccagctgagcagatggacccccgtgatcaaggacgtgatggaggacgccgtggaggacagactggacagaaacctgtggcccttcgtgagcgaccccgcccccaccgccagcagccaggccgccgtgagcgccagattcggccactggcacaagaacaaggccggcatcgaggccagagccggccccagactgatcgtgtacgtgatgggcggcgtggccatgagcgagatgagagccgcctacgaggtgaccagagccaccgagggcaagtgggaggtgctgatcggcagcagccacatcctgacccccaccagattcctggacgacctgaaggccctggacaagaagctggaggacatcgccctgccctag

SEQ ID NO: 101667 - DNA, 1740 bp, synthetic construct
  misc_feature 1..1740: note = Description of Artificial Sequence: Synthetic coding sequence
  source 1..1740: mol_type = other DNA
atggcccccagcggcctgaaggccgtggtgggcgagaagatcctgagcggcgtgatcagaagcgtgaagaaggacggcgagtggaaggtgctgatcatggaccaccccagcatgagaatcctgagcagctgctgcaagatgagcgacatcctggccgagggcatcaccatcgtggaggacatcaacaagagaagagagcccatccccagcctggaggccatctacctgctgagccccaccgagaagagcgtgcaggccctgatcaaggacttccagggcacccccaccttcacctacaaggccgcccacatcttcttcaccgacacctgccccgagcccctgttcagcgagctgggcagaagcagactggccaaggtggtgaagaccctgaaggagatccacctggccttcctgccctacgaggcccaggtgttcagcctggacgccccccacagcacctacaacctgtactgccccttcagagccgaggagagaaccagacagctggaggtgctggcccagcagatcgccaccctgtgcgccaccctgcaggagtaccccgccatcagatacagaaagggccccgaggacaccgcccagctggcccacgccgtgctggccaagctgaacgccttcaaggccgacacccccagcctgggcgagggccccgagaagaccagaagccagctgctgatcatggacagagccgccgaccccgtgagccccctgctgcacgagctgaccttccaggccatggcctacgacctgctggacatcgagcaggacacctacagatacgagaccaccggcctgagcgaggccagagagaaggccgtgctgctggacgaggacgacgacctgtgggtggagctgagacacatgcacatcgccgacgtgagcaagaaggtgaccgagctgctgagaaccttctgcgagagcaagagactgaccaccgacaaggccaacatcaaggacctgagccagatcctgaagaagatgccccagtaccagaaggagctgaacaagtacagcacccacctgcacctggccgacgactgcatgaagcacttcaagggcagcgtggagaagctgtgcagcgtggagcaggacctggccatgggcagcgacgccgagggcgagaagatcaaggacagcatgaagctgatcgtgcccgtgctgctggacgccgccgtgcccgcctacgacaagatcagagtgctgctgctgtacatcctgctgagaaacggcgtgagcgaggagaacctggccaagctgatccagcacgccaacgtgcaggcccacagcagcctgatcagaaacctggagcagctgggcggcaccgtgaccaaccccggcggcagcggcaccagcagcagactggagcccagagagagaatggagcccacctaccagctgagcagatggacccccgtgatcaaggacgtgatggaggacgccgtggaggacagactggacagaaacctgtggcccttcgtgagcgaccccgcccccaccgccagcagccaggccgccgtgagcgccagattcggccactggcacaagaacaaggccggcatcgaggccagagccggccccagactgatcgtgtacgtgatgggcggcgtggccatgagcgagatgagagccgcctacgaggtgaccagagccaccgagggcagcggcagatgcagcctggccccccacaccagcagccccagacccgccagctggatgacctag

SEQ ID NO: 101668 - DNA, 2421 bp, synthetic construct
  misc_feature 1..2421: note = Description of Artificial Sequence: Synthetic coding sequence
  source 1..2421: mol_type = other DNA
atgcacggcaagagcaccgccgtgctggagatggactacagcatcgtggacttcctgaccctgtgcgagaccccctaccccaacgacttccaggagccctacgccgtggtggtgctgctggagaaggacctggtgctgatcgacctggcccagaacggctaccccatcttcgagaacccctaccccctgagcatccacgagagccccgtgacctgctgcgagtacttcgccgactgccccgtggacctgatccccgccctgtacagcgtgggcgccagacagaagagacagggctacagcaagaaggagtggcccatcaacggcggcaactggggcctgggcgcccagagctaccccgagatcatcatcaccggccacgccgacggcagcgtgaagttctgggacgccagcgccatcaccctgcaggtgctgtacaagctgaagaccagcaaggtgttcgagaagagcagaaacaaggacgacagacccaacaccgacatcgtggacgaggacccctacgccatccagatcatcagctggtgccccgagagcagaatgctgtgcatcgccggcgtgagcgcccacgtgatcatctacagattcagcaagcaggaggtgatcaccgaggtgatccccatgctggaggtgagactgctgtacgagatcaacgacgtggagacccccgagggcgagcagcccccccccctgcccacccccgtgggcggcagcaacccccagcccatccccccccagagccaccccagcaccagcagcagcagcagcgacggcctgagagacaacgtgccctgcctgaaggtgaagaacagccccctgaagcagagccccggctaccagaccgagctggtgatccagctggtgtgggtgggcggcgagcccccccagcagatcaccagcctggccgtgaacagcagctacggcctggtggtgttcggcaactgcaacggcatcgccatggtggactacctgcagaaggccgtgctgctgaacctgggcaccatcgagctgtacggcagcaacgacccctacagaagagagcccagaagccccagaaagagcagacagcccagcggcgccggcctgtgcgacatcagcgagggcaccgtggtgcccgaggacagatgcaagagccccaccagcggcagcagcagcccccacaacagcgacgacgagcagaagatgaacaacttcatcgagaaggccaagatgagcagaaagctgagcctgcccaccgacctgaagcccgacctggacgtgaaggacaacagcttcagcagaagcagaagcagcagcgtgaccagcatcgacaaggagagcagagaggccatcagcgccctgcacttctgcgagaccttcaccagaaagaccgacagcagccccagcccctgcctgtgggtgggcaccaccctgggcaccgtgctggtgatcgccctgaacctgccccccggcggcgagcagagactgctgcagcccgtgatcgtgagccccagcggcaccatcctgagactgaagggcgccatcctgagaatggccttcctggacaccaccggctgcctgatcccccccgcctacgagccctggagagagcacaacgtgcccgaggagaaggacgagaaggagaagctgaagaagagaagacccgtgagcgtgagccccagcagcagccaggagatcagcgagaaccagtacgccgtgatctgcagcgagaagcaggccaaggtgatcagcctgcccacccagaactgcgcctacaagcagaacatcaccgagaccagcttcgtgctgagaggcgacatcgtggccctgagcaacagcatctgcctggcctgcttctgcgccaacggccacatcatgaccttcagcctgcccagcctgagacccctgctggacgtgtactacctgcccctgaccaacatgagaatcgccagaaccttctgcttcaccaacaacggccaggccctgtacctggtgagccccaccgagatccagagactgacctacagccaggagacctgcgagaacctgcaggagatgctgggcgagctgttcacccccgtggagacccccgaggcccccaacagaggcttcttcaagggcctgttcggcggcggcgcccagagcctggacagagaggagctgttcggcgagagcagcagcggcaaggccagcagaagcctggcccagcacatccccggccccggcggcatcgagggcgtgaagggcgccgccagcggcgtggtgggcgagctggccagagccagactggccctggacgagagaggccagaagctgggcgacctggaggagagaaccgccgccatgctgagcagcgccgagagcttcagcaagcacgcccacgagatcatgctgaagtacaaggacaagaagtggtaccagttctag

SEQ ID NO: 101669 - DNA, 3456 bp, synthetic construct
  misc_feature 1..3456: note = Description of Artificial Sequence: Synthetic coding sequence
  source 1..3456: mol_type = other DNA
atgagaaagttcaacatcagaaaggtgctggacggcctgaccgccggcagcagcagcgccagccagcagcagcagcagcagcacccccccggcaacagagagcccgagatccaggagaccctgcagagcgagcacttccagctgtgcaagaccgtgagacacggcttcccctaccagcccagcgccctggccttcgaccccgtgcagaagatcctggccgtgggcacccagaccggcgccctgagactgttcggcagacccggcgtggagtgctactgccagcacgacagcggcgccgccgtgatccagctgcagttcctgatcaacgagggcgccctggtgagcgccctggccgacgacaccctgcacctgtggaacctgagacagaagagacccgccatcctgcacagcctgaagttctgcagagagagagtgaccttctgccacctgcccttccagagcaagtggctgtacgtgggcaccgagagaggcaacatccacatcgtgaacgtggagagcttcaccctgagcggctacgtgatcatgtggaacaaggccatcgagctgagcagcaagagccaccccggccccgtggtgcacatcagcgacaaccccatggacgagggcaagctgctgatcggcttcgagagcggcaccgtggtgctgtgggacctgaagagcaagaaggccgactacagatacacctacgacgaggccatccacagcgtggcctggcaccacgagggcaagcagttcatctgcagccacagcgacggcaccctgaccatctggaacgtgagaagccccgccaagcccgtgcagaccatcaccccccacggcaagcagctgaaggacggcaagaagcccgagccctgcaagcccatcctgaaggtggagttcaagaccaccagaagcggcgagcccttcatcatcctgagcggcggcctgagctacgacaccgtgggcagaagaccctgcctgaccgtgatgcacggcaagagcaccgccgtgctggagatggactacagcatcgtggacttcctgaccctgtgcgagaccccctaccccaacgacttccaggagccctacgccgtggtggtgctgctggagaaggacctggtgctgatcgacctggcccagaacggctaccccatcttcgagaacccctaccccctgagcatccacgagagccccgtgacctgctgcgagtacttcgccgactgccccgtggacctgatccccgccctgtacagcgtgggcgccagacagaagagacagggctacagcaagaaggagtggcccatcaacggcggcaactggggcctgggcgcccagagctaccccgagatcatcatcaccggccacgccgacggcagcgtgaagttctgggacgccagcgccatcaccctgcaggtgctgtacaagctgaagaccagcaaggtgttcgagaagagcagaaacaaggacgacagacccaacaccgacatcgtggacgaggacccctacgccatccagatcatcagctggtgccccgagagcagaatgctgtgcatcgccggcgtgagcgcccacgtgatcatctacagattcagcaagcaggaggtgatcaccgaggtgatccccatgctggaggtgagactgctgtacgagatcaacgacgtggagacccccgagggcgagcagcccccccccctgcccacccccgtgggcggcagcaacccccagcccatccccccccagagccaccccagcaccagcagcagcagcagcgacggcctgagagacaacgtgccctgcctgaaggtgaagaacagccccctgaagcagagccccggctaccagaccgagctggtgatccagctggtgtgggtgggcggcgagcccccccagcagatcaccagcctggccgtgaacagcagctacggcctggtggtgttcggcaactgcaacggcatcgccatggtggactacctgcagaaggccgtgctgctgaacctgggcaccatcgagctgtacggcagcaacgacccctacagaagagagcccagaagccccagaaagagcagacagcccagcggcgccggcctgtgcgacatcagcgagggcaccgtggtgcccgaggacagatgcaagagccccaccagcggcagcagcagcccccacaacagcgacgacgagcagaagatgaacaacttcatcgagaaggtgaagaccaagagcagaaagttcagcaagatggtggccaacgacatcgccaagatgagcagaaagctgagcctgcccaccgacctgaagcccgacctggacgtgaaggacaacagcttcagcagaagcagaagcagcagcgtgaccagcatcgacaaggagagcagagaggccatcagcgccctgcacttctgcgagaccttcaccagaaagaccgacagcagccccagcccctgcctgtgggtgggcaccaccctgggcaccgtgctggtgatcgccctgaacctgccccccggcggcgagcagagactgctgcagcccgtgatcgtgagccccagcggcaccatcctgagactgaagggcgccatcctgagaatggccttcctggacaccaccggctgcctgatcccccccgcctacgagccctggagagagcacaacgtgcccgaggagaaggacgagaaggagaagctgaagaagagaagacccgtgagcgtgagccccagcagcagccaggagatcagcgagaaccagtacgccgtgatctgcagcgagaagcaggccaaggtgatcagcctgcccacccagaactgcgcctacaagcagaacatcaccgagaccagcttcgtgctgagaggcgacatcgtggccctgagcaacagcatctgcctggcctgcttctgcgccaacggccacatcatgaccttcagcctgcccagcctgagacccctgctggacgtgtactacctgcccctgaccaacatgagaatcgccagaaccttctgcttcaccaacaacggccaggccctgtacctggtgagccccaccgagatccagagactgacctacagccaggagacctgcgagaacctgcaggagatgctgggcgagctgttcacccccgtggagacccccgaggcccccaacagaggcttcttcaagggcctgttcggcggcggcgcccagagcctggacagagaggagctgttcggcgagagcagcagcggcaaggccagcagaagcctggcccagcacatccccggccccggcggcatcgagggcgtgaagggcgccgccagcggcgtggtgggcgagctggccagagccagactggccctggacgagagaggccagaagctgggcgacctggaggagagaaccgccgccatgctgagcagcgccgagagcttcagcaagcacgcccacgagatcatgctgaagtacaaggacaagaagtggtaccagttctag

SEQ ID NO: 101670 - DNA, 525 bp, synthetic construct
  misc_feature 1..525: note = Description of Artificial Sequence: Synthetic coding sequence
  source 1..525: mol_type = other DNA
tgaaaggccgtgctgctgaacctgggcaccatcgagctgtacggcagcaacgacccctacagaagagagcccagaagccccagaaagagcagacagcccagcggcgccggcctgtgcgacatcagcgagggcaccgtggtgcccgaggacagatgcaagagccccaccagcggcagcagcagcccccacaacagcgacgacgagcagaagatgaacaacttcatcgagaaggccaagatgagcagaaagctgagcctgcccaccgacctgaagcccgacctggacgtgaaggacaacagcttcagcagaagcagaagcagcagcgtgaccagcatcgacaaggagagcagagaggccatcagcgccctgcacttctgcgagaccttcaccagaaagaccgacagcagccccagcccctgcctgtgggtgggcaccaccctgggcaccgtgctggtgatcgccctgaacctgccccccggcggcgagcagagactgctgcagcccgtgatcgtgagccccagctag

SEQ ID NO: 101671 - DNA, 840 bp, synthetic construct
  misc_feature 1..840: note = Description of Artificial Sequence: Synthetic coding sequence
  source 1..840: mol_type = other DNA
atggtggactacctgcagaaggccgtgctgctgaacctgggcaccatcgagctgtacggcagcaacgacccctacagaagagagcccagaagccccagaaagagcagacagcccagcggcggcgtgctgatcgtgaccagctgcatgtgcggcctgagcagcctgtacagcgagagcatgaagaagctgagaagcagcttcctgaccggcctgtgcgacatcagcgagggcaccgtggtgcccgaggacagatgcaagagccccaccagcgccaagatgagcagaaagctgagcctgcccaccgacctgaagcccgacctggacgtgaaggacaacagcttcagcagaagcagaagcagcagcgtgaccagcatcgacaaggagagcagagaggccatcagcgccctgcacttctgcgagaccttcaccagaaagaccgacagcagccccagcccctgcctgtgggtgggcaccaccctgggcaccgtgctggtgatcgccctgaacctgccccccggcggcgagcagagactgctgcagcccgtgatcgtgagccccagcggcaccatcctgagactgaagggcgccatcctgagaatggccttcctggacaccaccggctgcctgatcccccccgcctacgagccctggagagagcacaacgtgcccgaggagaaggacgagaaggagaagctgaagaagagaagacccgtgagcgtgagccccagcagcagccaggagatcagcgagaaccagtacgccgtgatctgcagcgagaagcaggccaaggtgatcagcctgcccacccagaactgcgcctacaagcagaacatcacctag

SEQ ID NO: 101672 - DNA, 3297 bp, synthetic construct
  misc_feature 1..3297: note = Description of Artificial Sequence: Synthetic coding sequence
  source 1..3297: mol_type = other DNA
atgagaaagttcaacatcagaaaggtgctggacggcctgaccgccggcagcagcagcgccagccagcagcagcagcagcagcacccccccggcaacagagagcccgagatccaggagaccctgcagagcgagcacttccagctgtgcaagaccgtgagacacggcttcccctaccagcccagcgccctggccttcgaccccgtgcagaagatcctggccgtgggcacccagaccggcgccctgagactgttcggcagacccggcgtggagtgctactgccagcacgacagcggcgccgccgtgatccagctgcagttcctgatcaacgagggcgccctggtgagcgccctggccgacgacaccctgcacctgtggaacctgagacagaagagacccgccatcctgcacagcctgaagttctgcagagagagagtgaccttctgccacctgcccttccagagcaagtggctgtacgtgggcaccgagagaggcaacatccacatcgtgaacgtggagagcttcaccctgagcggctacgtgatcatgtggaacaaggccatcgagctgagcagcaagagccaccccggccccgtggtgcacatcagcgacaaccccatggacgagggcaagctgctgatcggcttcgagagcggcaccgtggtgctgtgggacctgaagagcaagaaggccgactacagatacacctacgacgaggccatccacagcgtggcctggcaccacgagggcaagcagttcatctgcagccacagcgacggcaccctgaccatctggaacgtgagaagccccgccaagcccgtgcagaccatcaccccccacggcaagcagctgaaggacggcaagaagcccgagccctgcaagcccatcctgaaggtggagttcaagaccaccagaagcggcgagcccttcatcatcctgagcggcggcctgagctacgacaccgtgggcagaagaccctgcctgaccgtgatgcacggcaagagcaccgccgtgctggagatggactacagcatcgtggacttcctgaccctgtgcgagaccccctaccccaacgacttccaggagccctacgccgtggtggtgctgctggagaaggacctggtgctgatcgacctggcccagaacggctaccccatcttcgagaacccctaccccctgagcatccacgagagccccgtgacctgctgcgagtacttcgccgactgccccgtggacctgatccccgccctgtacagcgtgggcgccagacagaagagacagggctacagcaagaaggagtggcccatcaacggcggcaactggggcctgggcgcccagagctaccccgagatcatcatcaccggccacgccgacggcagcgtgaagttctgggacgccagcgccatcaccctgcaggtgctgtacaagctgaagaccagcaaggtgttcgagaagagcagaaacaaggacgacagacccaacaccgacatcgtggacgaggacccctacgccatccagatcatcagctggtgccccgagagcagaatgctgtgcatcgccggcgtgagcgcccacgtgatcatctacagattcagcaagcaggaggtgatcaccgaggtgatccccatgctggaggtgagactgctgtacgagatcaacgacgtggagacccccgagggcgagcagcccccccccctgcccacccccgtgggcggcagcaacccccagcccatccccccccagagccaccccagcaccagcagcagcagcagcgacggcctgagagacaacgtgccctgcctgaaggtgaagaacagccccctgaagcagagccccggctaccagaccgagctggtgatccagctggtgtgggtgggcggcgagcccccccagcagatcaccagcctggccgtgaacagcagctacggcctggtggtgttcggcaactgcaacggcatcgccatggtggactacctgcagaaggccgtgctgctgaacctgggcaccatcgagctgtacggcagcaacgacccctacagaagagagcccagaagccccagaaagagcagacagcccagcggcgccggcctgtgcgacatcagcgagggcaccgtggtgcccgaggacagatgcaagagccccaccagcgacgtgaaggacaacagcttcagcagaagcagaagcagcagcgtgaccagcatcgacaaggagagcagagaggccatcagcgccctgcacttctgcgagaccttcaccagaaagaccgacagcagccccagcccctgcctgtgggtgggcaccaccctgggcaccgtgctggtgatcgccctgaacctgccccccggcggcgagcagagactgctgcagcccgtgatcgtgagccccagcggcaccatcctgagactgaagggcgccatcctgagaatggccttcctggacaccaccggctgcctgatcccccccgcctacgagccctggagagagcacaacgtgcccgaggagaaggacgagaaggagaagctgaagaagagaagacccgtgagcgtgagccccagcagcagccaggagatcagcgagaaccagtacgccgtgatctgcagcgagaagcaggccaaggtgatcagcctgcccacccagaactgcgcctacaagcagaacatcaccgagaccagcttcgtgctgagaggcgacatcgtggccctgagcaacagcatctgcctggcctgcttctgcgccaacggccacatcatgaccttcagcctgcccagcctgagacccctgctggacgtgtactacctgcccctgaccaacatgagaatcgccagaaccttctgcttcaccaacaacggccaggccctgtacctggtgagccccaccgagatccagagactgacctacagccaggagacctgcgagaacctgcaggagatgctgggcgagctgttcacccccgtggagacccccgaggcccccaacagaggcttcttcaagggcctgttcggcggcggcgcccagagcctggacagagaggagctgttcggcgagagcagcagcggcaaggccagcagaagcctggcccagcacatccccggccccggcggcatcgagggcgtgaagggcgccgccagcggcgtggtgggcgagctggccagagccagactggccctggacgagagaggccagaagctgggcgacctggaggagagaaccgccgccatgctgagcagcgccgagagcttcagcaagcacgcccacgagatcatgctgaagtacaaggacaagaagtggtaccagttctag

SEQ ID NO: 101673 - DNA, 3348 bp, synthetic construct
  misc_feature 1..3348: note = Description of Artificial Sequence: Synthetic coding sequence
  source 1..3348: mol_type = other DNA
atgagaaagttcaacatcagaaaggtgctggacggcctgaccgccggcagcagcagcgccagccagcagcagcagcagcagcacccccccggcaacagagagcccgagatccaggagaccctgcagagcgagcacttccagctgtgcaagaccgtgagacacggcttcccctaccagcccagcgccctggccttcgaccccgtgcagaagatcctggccgtgggcacccagaccggcgccctgagactgttcggcagacccggcgtggagtgctactgccagcacgacagcggcgccgccgtgatccagctgcagttcctgatcaacgagggcgccctggtgagcgccctggccgacgacaccctgcacctgtggaacctgagacagaagagacccgccatcctgcacagcctgaagttctgcagagagagagtgaccttctgccacctgcccttccagagcaagtggctgtacgtgggcaccgagagaggcaacatccacatcgtgaacgtggagagcttcaccctgagcggctacgtgatcatgtggaacaaggccatcgagctgagcagcaagagccaccccggccccgtggtgcacatcagcgacaaccccatggacgagggcaagctgctgatcggcttcgagagcggcaccgtggtgctgtgggacctgaagagcaagaaggccgactacagatacacctacgacgaggccatccacagcgtggcctggcaccacgagggcaagcagttcatctgcagccacagcgacggcaccctgaccatctggaacgtgagaagccccgccaagcccgtgcagaccatcaccccccacggcaagcagctgaaggacggcaagaagcccgagccctgcaagcccatcctgaaggtggagttcaagaccaccagaagcggcgagcccttcatcatcctgagcggcggcctgagctacgacaccgtgggcagaagaccctgcctgaccgtgatgcacggcaagagcaccgccgtgctggagatggactacagcatcgtggacttcctgaccctgtgcgagaccccctaccccaacgacttccaggagccctacgccgtggtggtgctgctggagaaggacctggtgctgatcgacctggcccagaacggctaccccatcttcgagaacccctaccccctgagcatccacgagagccccgtgacctgctgcgagtacttcgccgactgccccgtggacctgatccccgccctgtacagcgtgggcgccagacagaagagacagggctacagcaagaaggagtggcccatcaacggcggcaactggggcctgggcgcccagagctaccccgagatcatcatcaccggccacgccgacggcagcgtgaagttctgggacgccagcgccatcaccctgcaggtgctgtacaagctgaagaccagcaaggtgttcgagaagagcagaaacaaggacgacagacccaacaccgacatcgtggacgaggacccctacgccatccagatcatcagctggtgccccgagagcagaatgctgtgcatcgccggcgtgagcgcccacgtgatcatctacagattcagcaagcaggaggtgatcaccgaggtgatccccatgctggaggtgagactgctgtacgagatcaacgacgtggagacccccgagggcgagcagcccccccccctgcccacccccgtgggcggcagcaacccccagcccatccccccccagagccaccccagcaccagcagcagcagcagcgacggcctgagagacaacgtgccctgcctgaaggtgaagaacagccccctgaagcagagccccggctaccagaccgagctggtgatccagctggtgtgggtgggcggcgagcccccccagcagatcaccagcctggccgtgaacagcagctacggcctggtggtgttcggcaactgcaacggcatcgccatggtggactacctgcagaaggccgtgctgctgaacctgggcaccatcgagctgtacggcagcaacgacccctacagaagagagcccagaagccccagaaagagcagacagcccagcggcgccggcctgtgcgacatcagcgagggcaccgtggtgcccgaggacagatgcaagagccccaccagcgccaagatgagcagaaagctgagcctgcccaccgacctgaagcccgacctggacgtgaaggacaacagcttcagcagaagcagaagcagcagcgtgaccagcatcgacaaggagagcagagaggccatcagcgccctgcacttctgcgagaccttcaccagaaagaccgacagcagccccagcccctgcctgtgggtgggcaccaccctgggcaccgtgctggtgatcgccctgaacctgccccccggcggcgagcagagactgctgcagcccgtgatcgtgagccccagcggcaccatcctgagactgaagggcgccatcctgagaatggccttcctggacaccaccggctgcctgatcccccccgcctacgagccctggagagagcacaacgtgcccgaggagaaggacgagaaggagaagctgaagaagagaagacccgtgagcgtgagccccagcagcagccaggagatcagcgagaaccagtacgccgtgatctgcagcgagaagcaggccaaggtgatcagcctgcccacccagaactgcgcctacaagcagaacatcaccgagaccagcttcgtgctgagaggcgacatcgtggccctgagcaacagcatctgcctggcctgcttctgcgccaacggccacatcatgaccttcagcctgcccagcctgagacccctgctggacgtgtactacctgcccctgaccaacatgagaatcgccagaaccttctgcttcaccaacaacggccaggccctgtacctggtgagccccaccgagatccagagactgacctacagccaggagacctgcgagaacctgcaggagatgctgggcgagctgttcacccccgtggagacccccgaggcccccaacagaggcttcttcaagggcctgttcggcggcggcgcccagagcctggacagagaggagctgttcggcgagagcagcagcggcaaggccagcagaagcctggcccagcacatccccggccccggcggcatcgagggcgtgaagggcgccgccagcggcgtggtgggcgagctggccagagccagactggccctggacgagagaggccagaagctgggcgacctggaggagagaaccgccgccatgctgagcagcgccgagagcttcagcaagcacgcccacgagatcatgctgaagtacaaggacaagaagtggtaccagttctag

SEQ ID NO: 101674 - DNA, 795 bp, synthetic construct
  misc_feature 1..795: note = Description of Artificial Sequence: Synthetic coding sequence
  source 1..795: mol_type = other DNA
atcgagctgtacggcagcaacgacccctacagaagagagcccagaagccccagaaagagcagacagcccagcggcggcgtgctgatcgtgaccagctgcatgtgcggcctgagcagcctgtacagcgagagcatgaagaagctgagaagcagcttcctgaccggcctgtgcgacatcagcgagggcaccgtggtgcccgaggacagatgcaagagccccaccagcgccaagatgagcagaaagctgagcctgcccaccgacctgaagcccgacctggacgtgaaggacaacagcttcagcagaagcagaagcagcagcgtgaccagcatcgacaaggagagcagagaggccatcagcgccctgcacttctgcgagaccttcaccagaaagaccgacagcagccccagcccctgcctgtgggtgggcaccaccctgggcaccgtgctggtgatcgccctgaacctgccccccggcggcgagcagagactgctgcagcccgtgatcgtgagccccagcggcaccatcctgagactgaagggcgccatcctgagaatggccttcctggacaccaccggctgcctgatcccccccgcctacgagccctggagagagcacaacgtgcccgaggagaaggacgagaaggagaagctgaagaagagaagacccgtgagcgtgagccccagcagcagccaggagatcagcgagaaccagtacgccgtgatctgcagcgagaagcaggccaaggtgatcagcctgcccacccagaactgcgcctacaagcagaacatcacctag

SEQ ID NO: 101675 - DNA, 927 bp, synthetic construct
  misc_feature 1..927: note = Description of Artificial Sequence: Synthetic coding sequence
  source 1..927: mol_type = other DNA
atgagaaagttcaacatcagaaaggtgctggacggcctgaccgccggcagcagcagcgccagccagcagcagcagcagcagcacccccccggcaacagagagcccgagatccaggagaccctgcagagcgagcacttccagctgtgcaagaccgtgagacacggcttcccctaccagcccagcgccctggccttcgaccccgtgcagaagatcctggccgtgggcacccagaccggcgccctgagactgttcggcagacccggcgtggagtgctactgccagcacgacagcggcgccgccgtgatccagctgcagttcctgatcaacgagggcgccctggtgagcgccctggccgacgacaccctgcacctgtggaacctgagacagaagagacccgccatcctgcacagcctgaagttctgcagagagagagtgaccttctgccacctgcccttccagagcaagtggctgtacgtgggcaccgagagaggcaacatccacatcgtgaacgtggagagcttcaccctgagcggctacgtgatcatgtggaacaaggccatcgagctgagcagcaagagccaccccggccccgtggtgcacatcagcgacaaccccatggacgagggcaagctgctgatcggcttcgagagcggcaccgtggtgctgtgggacctgaagagcaagaaggccgactacagatacacctacgacgaggccatccacagcgtggcctggcaccacgagggcaagcagttcatctgcagccacagcgacggcaccctgaccatctggaacgtgagaagccccgccaagcccgtgcagaccatcaccccccacggcaagcagctgaaggacggcaagaagcccgagccctgcaagcccatcctgaaggtggagttcaagaccaccagaagcggcgtgtgctag

SEQ ID NO: 101676 - DNA, 3561 bp, synthetic construct
  misc_feature 1..3561: note = Description of Artificial Sequence: Synthetic coding sequence
  source 1..3561: mol_type = other DNA
atgaagaagttcaacttcagaaaggtgctggacggcctgaccgccagcagccccggcagcggcagcagcagcggcagcaacagcggcggcggcgccggcagcggcagcgtgcaccccgccggcaccgccggcgtgctgagagaggagatccaggagaccctgaccagcgagtacttccagatctgcaagaccgtgagacacggcttcccccaccagcccaccgccctggccttcgaccccgtgcagaagatcctggccatcggcaccagaaccggcgccatcagaatcctgggcagacccggcgtggactgctactgccagcacgagagcggcgccgccgtgctgcagctgcagttcctgatcaacgagggcgccctggtgagcgccagcagcgacgacaccctgcacctgtggaacctgagacagaagagacccgccatcctgcacagcctgaagttcaacagagagagaatcacctactgccacctgcccttccagagcaagtggctgtacgtgggcaccgagagaggcaacacccacatcgtgaacatcgagagcttcatcctgagcggctacgtgatcatgtggaacaaggccatcgagctgagcaccaagacccaccccggccccgtggtgcacctgagcgacagccccagagacgagggcaagctgctgatcggctacgagaacggcaccgtggtgttctgggacctgaagagcaagagagccgagctgagagtgtactacgacgaggccatccacagcatcgactggcaccacgagggcaagcagttcatgtgcagccacagcgacggcagcctgaccctgtggaacctgaagagccccagcagacccttccagaccaccatcccccacggcaagagccagagagagggcagaaagagcgagagctgcaagcccatcctgaaggtggagtacaagacctgcaagaacagcgagcccttcatcatcttcagcggcggcctgagctacgacaaggcctgcagaagacccagcctgaccatcatgcacggcaaggccatcaccgtgctggagatggaccaccccatcgtggagttcctgaccctgtgcgagaccccctaccccaacgagttccaggagccctacgccgtggtggtgctgctggagaaggacctgatcgtggtggacctgacccagagcaacttccccatcttcgagaacccctaccccatggacatccacgagagccccgtgacctgcaccgcctacttcgccgactgcccccccgacctgatcctggtgctgtacagcatcggcgtgaagcacaagaagcagggctacagcaacaaggagtggcccatcagcggcggcgcctggaacctgggcgcccagacctaccccgagatcatcatcaccggccacgccgacggcagcatcaagttctgggacgccagcgccatcaccctgcagatgctgtacaagctgaagaccagcaaggtgttcgagaagcagaaggtgggcgagggcaagcagacctgcgagatcgtggaggaggaccccttcgccatccagatgatctactggtgccccgagagcagaatcttctgcgtgagcggcgtgagcgcctacgtgatcatctacaagttcagcagacacgagatcaccaccgagatcgtgagcctggaggtgagactgcagtacgacgtggaggacatcatcacccccgagcccgagaccagcccccccttccccgacctgagcgcccagctgcccagcagcagaagcctgagcggcagcaccaacaccgtggccagcgagggcgtgaccaaggacagcatcccctgcctgaacgtgaagaccagacccgtgagaatgccccccggctaccaggccgagctggtgatccagctggtgtgggtggacggcgagcccccccagcagatcaccagcctggccgtgagcagcgcctacggcatcgtggccttcggcaactgcaacggcctggccgtggtggacttcatccagaagaccgtgctgctgagcatgggcaccatcgacctgtacagaagcagcgacctgtaccagagacagcccagaagccccagaaagaacaagcagttcatcgccgacaacttctgcatgagaggcctgagcaacttctaccccgacctgaccaagagaatcagaaccagctaccagagcctgaccgagctgaacgacagccccgtgcccctggagctggagagatgcaagagccccaccagcgaccacgtgaacggccactgcaccagccccaccagccagagctgcagcagcggcaagagactgagcagcgccgacgtgagcaaggtgaacagatggggccccggcagaccccccttcagaaaggcccagagcgccgcctgcatggagatcagcctgcccgtgaccaccgaggagaacagagagaacagctacaacagaagcagaagcagcagcatcagcagcatcgacaaggacagcaaggaggccatcaccgccctgtacttcatggacagcttcgccagaaagaacgacagcaccatcagcccctgcctgttcgtgggcaccagcctgggcatggtgctgatcatcagcctgaacctgcccctggccgacgagcagagattcaccgagcccgtgatggtgctgcccagcggcaccttcctgagcctgaagggcgccgtgctgaccttcagctgcatggacagaatgggcggcctgatgcagcccccctacgaggtgtggagagaccccaacaacatcgacgagaacgagaagagctggagaagaaaggtggtgatgaacagcagcagcgccagccaggagatcggcgaccaccagtacaccatcatctgcagcgagaagcaggccaaggtgttcagcctgcccagccagacctgcctgtacgtgcacaacatcaccgagaccagcttcatcctgcaggccaacgtggtggtgatgtgcagcagcgcctgcctggcctgcttctgcgccaacggccacatcatgatcatgagcctgcccagcctgagacccatgctggacgtgaactacctgcccctgaccgacatgagaatcgccagaaccttctgcttcaccaacgagggccaggccctgtacctggtgagccccaccgagatccagagactgacctacagccaggagatgtgcgacaacctgcaggacatgctgggcgacctgttcacccccatcgagacccccgaggcccagaacagaggcttcctgaagggcctgttcggcggcagcggccagaccttcgacagagaggagctgttcggcgaggccagcgccggcaaggccagcagaagcctggcccagcacatccccggccccggcagcatcgagggcatgaagggcgccgccggcggcgtgatgggcgagctgaccagagccagaatcgccctggacgagagaggccagagactgggcgagctggaggagaagaccgccggcatgatgaccagcgccgaggccttcagcaagcacgcccacgagctgatgctgaagtacaaggacaagaagtggtaccagttctag

SEQ ID NO: 101677 - DNA, 384 bp, synthetic construct
  misc_feature 1..384: note = Description of Artificial Sequence: Synthetic coding sequence
  source 1..384: mol_type = other DNA
atgaagaagttcaacttcagaaaggtgctggacggcctgaccgccagcagccccggcagcggcagcagcagcggcagcaacagcggcggcggcgccggcagcggcagcgtgcaccccgccggcaccgccggcgtgctgagagaggagatccaggagaccctgaccagcgagtacttccagatctgcaagaccgtgagacacggcttcccccaccagcccaccgccctggccttcgaccccgtgcagaagatcctggccatcggcaccagaaccggcgccatcagaatcctgggcagacccggcgtggactgctactgccagcacgagagcggcgccgccgtgctgcagctgcagttcctgatcaacgagggcgccctggtgtag

SEQ ID NO: 101678 - DNA, 633 bp, synthetic construct
  misc_feature 1..633: note = Description of Artificial Sequence: Synthetic coding sequence
  source 1..633: mol_type = other DNA
atgagcgccaagagcgccatcagcaaggagatcttcgcccccctggacgagagaatgctgggcgccgtgcaggtgaagagaagaaccaagaagaagatccccttcctggccaccggcggccagggcgagtacctgacctacatctgcctgagcgtgaccaacaagaagcccacccaggccagcatcaccaaggtgaagcagttcgagggcagcaccagcttcgtgagaagaagccagtggatgctggagcagctgagacaggtgaacggcatcgaccccaacggcgacagcgccgagttcgacctgctgttcgagaacgccttcgaccagtgggtggccagcaccgccagcgagaagtgcaccttcttccagatcctgcaccacacctgccagagatacctgaccgacagaaagcccgagttcatcaactgccagagcaagatcatgggcggcaacagcatcctgcacagcgccgccgacagcgtgaccagcgccgtgcagaaggccagccaggccctgaacgagagaggcgagagactgggcagagccgaggagaagaccgaggacctgaagaacagcgcccagcagttcgccgagaccgcccacaagctggccatgaagcacaagtgctag

SEQ ID NO: 101679 - DNA, 633 bp, synthetic construct
  misc_feature 1..633: note = Description of Artificial Sequence: Synthetic coding sequence
  source 1..633: mol_type = other DNA
atgagcgccaagagcgccatcagcaaggagatcttcgcccccctggacgagagaatgctgggcgccgtgcaggtgaagagaagaaccaagaagaagatccccttcctggccaccggcggccagggcgagtacctgacctacatctgcctgagcgtgaccaacaagaagcccacccaggccagcatcaccaaggtgaagcagttcgagggcagcaccagcttcgtgagaagaagccagtggatgctggagcagctgagacaggtgaacggcatcgaccccaacggcgacagcgccgagttcgacctgctgttcgagaacgccttcgaccagtgggtggccagcaccgccagcgagaagtgcaccttcttccagatcctgcaccacacctgccagagatacctgaccgacagaaagcccgagttcatcaactgccagagcaagatcatgggcggcaacagcatcctgcacagcgccgccgacagcgtgaccagcgccgtgcagaaggccagccaggccctgaacgagagaggcgagagactgggcagagccgaggagaagaccgaggacctgaagaacagcgcccagcagttcgccgagaccgcccacaaggtgaccttcagaggcagaaagtag

SEQ ID NO: 101680 - DNA, 633 bp, synthetic construct; identical to SEQ ID NO: 101678
  misc_feature 1..633: note = Description of Artificial Sequence: Synthetic coding sequence
  source 1..633: mol_type = other DNA

SEQ ID NO: 101681 - DNA, 633 bp, synthetic construct; identical to SEQ ID NO: 101678
  misc_feature 1..633: note = Description of Artificial Sequence: Synthetic coding sequence
  source 1..633: mol_type = other DNA

SEQ ID NO: 101682 - DNA, 633 bp, synthetic construct; identical to SEQ ID NO: 101678
  misc_feature 1..633: note = Description of Artificial Sequence: Synthetic coding sequence
  source 1..633: mol_type = other DNA

SEQ ID NO: 101683 - DNA, 327 bp, synthetic construct
  misc_feature 1..327: note = Description of Artificial Sequence: Synthetic coding sequence
  source 1..327: mol_type = other DNA
atgagcgcctgcttcctggacaccagaagagccgccttcctgcagtgcgacctgcccagcagctacagaatcctgaccctgcccgagagcggccactgcggcagcgccgagcccgtgagcgacgcccccgccctgctgctgagcggcaacagcatcctgcacagcgccgccgacagcgtgaccagcgccgtgcagaaggccagccaggccctgaacgagagaggcgagagactgggcagagccgaggagaagaccgaggacctgaagaacagcgcccagcagttcgccgagaccgcccacaagctggccatgaagcacaagtgctag

SEQ ID NO: 101684 - DNA, 633 bp, synthetic construct; identical to SEQ ID NO: 101678
  misc_feature 1..633: note = Description of Artificial Sequence: Synthetic coding sequence
  source 1..633: mol_type = other DNA

SEQ ID NO: 101685 - DNA, 633 bp, synthetic construct; identical to SEQ ID NO: 101678
  misc_feature 1..633: note = Description of Artificial Sequence: Synthetic coding sequence
  source 1..633: mol_type = other DNA

SEQ ID NO: 101686 - DNA, 1617 bp, synthetic construct
  misc_feature 1..1617: note = Description of Artificial Sequence: Synthetic coding sequence
  source 1..1617: mol_type = other DNA
atggccgtggccgccgccgccgccgccgccggccccgccggcgccggcggcggcagagcccagagaagcggcctgctggaggtgctggtgagagacagatggcacaaggtgctggtgaacctgagcgaggacgccctggtgctgagcagcgaggagggcgccgccgcctacaacggcatcggcaccgccaccaacggcagcttctgcagaggcgccggcgccggccaccccggcgccggcggcgcccagccccccgacagccccgccggcgtgagaaccgccttcaccgacctgcccgagcaggtgcccgagagcatcagcaaccagaagagaggcgtgaaggtgctgaagcaggagctgggcggcctgggcatcagcatcaagggcggcaaggagaacaagatgcccatcctgatcagcaagatcttcaagggcctggccgccgaccagacccaggccctgtacgtgggcgacgccatcctgagcgtgaacggcgccgacctgagagacgccacccacgacgaggccgtgcaggccctgaagagagccggcaaggaggtgctgctggaggtgaagtacatgagagaggccaccccctacgtgaagaagggcagccccgtgagcgagatcggctgggagacccccccccccgagagccccagactgggcggcagcaccagcgacccccccagcagccagagcttcagcttccacagagacagaaagagcatccccctgaagatgtgctacgtgaccagaagcatggccctggccgaccccgagaacagacagctggagatccacagccccgacgccaagcacaccgtgatcctgagaagcaaggacagcgccaccgcccaggcctggttcagcgccatccacagcaacgtgaacgacctgctgaccagagtgatcgccgaggtgagagagcagctgggcaagaccggcatcgccggcagcagagagatcagacacctgggctggctggccgagaaggtgcccggcgagagcaagaagcagtggaagcccgccctggtggtgctgaccgagaaggacctgctgatctacgacagcatgcccagaagaaaggaggcctggttcagccccgtgcacacctaccccctgctggccaccagactggtgcacagcggccccggcaagggcagcccccaggccggcgtggacctgagcttcgccaccagaaccggcaccagacagggcatcgagacccacctgttcagagccgagaccagcagagacctgagccactggaccagaagcatcgtgcagggctgccacaacagcgccgagctgatcgccgagatcagcaccgcctgcacctacaagaaccaggagtgcagactgaccatccactacgagaacggcttcagcatcaccaccgagccccaggagggcgccttccccaagaccatcatccagagcccctacgagaagctgaagatgagcagcgacgacggcatcagaatgctgtacctggacttcggcggcaaggacggcgagatccagctggacctgcacagctgccccaagcccatcgtgttcatcatccacagcttcctgagcgccaagatcaccagactgggcctggtggcctag

SEQ ID NO: 101687 - DNA, 1617 bp, synthetic construct; identical to SEQ ID NO: 101686
  misc_feature 1..1617: note = Description of Artificial Sequence: Synthetic coding sequence
  source 1..1617: mol_type = other DNA

SEQ ID NO: 101688 - DNA, 87 bp, synthetic construct
  misc_feature 1..87: note = Description of Artificial Sequence: Synthetic coding sequence
  source 1..87: mol_type = other DNA
atggccgtggccgccgccgccgccgccgccggccccgccggcgccggcggcggcagagcccagagaagcggcctgctggaggtgtag

SEQ ID NO: 101689 - DNA, 1623 bp, synthetic construct
  misc_feature 1..1623: note = Description of Artificial Sequence: Synthetic coding sequence
  source 1..1623: mol_type = other DNA
atgagagtggccgccgccaccgccgccgccggcgccggccccgccatggccgtgtggaccagagccaccaaggccggcctggtggagctgctgctgagagagagatgggtgagagtggtggccgagctgagcggcgagagcctgagcctgaccggcgacgccgccgccgccgagctggagcccgccctgggccccgccgccgccgccttcaacggcctgcccaacggcggcggcgccggcgacagcctgcccggcagccccagcagaggcctgggcccccccagcccccccgccccccccagaggccccgccggcgaggccggcgccagcccccccgtgagaagagtgagagtggtgaagcaggaggccggcggcctgggcatcagcatcaagggcggcagagagaacagaatgcccatcctgatcagcaagatcttccccggcctggccgccgaccagagcagagccctgagactgggcgacgccatcctgagcgtgaacggcaccgacctgagacaggccacccacgaccaggccgtgcaggccctgaagagagccggcaaggaggtgctgctggaggtgaagttcatcagagaggtgaccccctacatcaagaagcccagcctggtgagcgacctgccctgggagggcgccgccccccagagccccagcttcagcggcagcgaggacagcggcagccccaagcaccagaacagcaccaaggacagaaagatcatccccctgaagatgtgcttcgccgccagaaacctgagcatgcccgacctggagaacagactgatcgagctgcacagccccgacagcagaaacaccctgatcctgagatgcaaggacaccgccaccgcccacagctggttcgtggccatccacaccaacatcatggccctgctgccccaggtgctggccgagctgaacgccatgctgggcgccaccagcaccgccggcggcagcaaggaggtgaagcacatcgcctggctggccgagcaggccaagctggacggcggcagacagcagtggagacccgtgctgatggccgtgaccgagaaggacctgctgctgtacgactgcatgccctggaccagagacgcctgggccagcccctgccacagctaccccctggtggccaccagactggtgcacagcggcagcggctgcagaagccccagcctgggcagcgacctgaccttcgccaccagaaccggcagcagacagggcatcgagatgcacctgttcagagtggagacccacagagacctgagcagctggaccagaatcctggtgcagggctgccacgccgccgccgagctgatcaaggaggtgagcctgggctgcatgctgaacggccaggaggtgagactgaccatccactacgagaacggcttcaccatcagcagagagaacggcggcagcagcagcatcctgtacagataccccttcgagagactgaagatgagcgccgacgacggcatcagaaacctgtacctggacttcggcggccccgagggcgagctgaccatggacctgcacagctgccccaagcccatcgtgttcgtgctgcacaccttcctgagcgccaaggtgaccagaatgggcctgctggtgtag

SEQ ID NO: 101690 - DNA, 1443 bp, synthetic construct
  misc_feature 1..1443: note = Description of Artificial Sequence: Synthetic coding sequence
  source 1..1443: mol_type = other DNA
atggacttcagaaccgcctgcgaggagaccaagaccggcatctgcctgctgcaggacggcaaccaggagcccttcaaggtgagactgcacctggccaaggacatcctgatgatccaggagcaggacgtgatctgcgtgagcggcgagcccttctacagcggcgagagaaccgtgaccatcagaagacagaccgtgggcggcttcggcctgagcatcaagggcggcgccgagcacaacatccccgtggtggtgagcaagatcagcaaggagcagagagccgagctgagcggcctgctgttcatcggcgacgccatcctgcagatcaacggcatcaacgtgagaaagtgcagacacgaggaggtggtgcaggtgctgagaaacgccggcgaggaggtgaccctgaccgtgagcttcctgaagagagcccccgccttcctgaagctgcccctgaacgaggactgcgcctgcgcccccagcgaccagagcagcggcaccagcagccccctgtgcgacagcggcctgcacctgaactaccaccccaacaacaccgacaccctgagctgcagcagctggcccaccagccccggcctgagatgggagaagagatggtgcgacctgagactgatccccctgctgcacagcagattcagccagtacgtgcccggcaccgacctgagcagacagaacgccttccaggtgatcgccgtggacggcgtgtgcaccggcatcatccagtgcctgagcgccgaggactgcgtggactggctgcaggccatcgccaccaacatcagcaacctgaccaagcacaacatcaagaagatcaacagaaacttccccgtgaaccagcagatcgtgtacatgggctggtgcgaggccagagagcaggaccccctgcaggacagagtgtacagccccaccttcctggccctgagaggcagctgcctgtacaagttcctggccccccccgtgaccacctgggactggaccagagccgagaagaccttcagcgtgtacgagatcatgtgcaagatcctgaaggacagcgacctgctggacagaagaaagcagtgcttcaccgtgcagagcgagagcggcgaggacctgtacttcagcgtggagctggagagcgacctggcccagtgggagagagccttccagaccgccaccttcctggaggtggagagaatccagtgcaagacctacgcctgcgtgctggagagccacctgatgggcctgaccatcgacttcagcaccggcttcatctgcttcgacgccgccaccaaggagctggagttcagcaacctgttcgccgtgctgcactgcatccacagcttcttcgccgccaaggtggcctgcctggaccccctgttcctgggcaaccaggccaccgccagcaccgccgccagcagcgccaccaccagcaaggccaagtacaccacctag

SEQ ID NO: 101691 - DNA, 1443 bp, synthetic construct; identical to SEQ ID NO: 101690
  misc_feature 1..1443: note = Description of Artificial Sequence: Synthetic coding sequence
  source 1..1443: mol_type = other DNA

SEQ ID NO: 101692 - DNA, 1554 bp, synthetic construct
  misc_feature 1..1554: note = Description of Artificial Sequence: Synthetic coding sequence
  source 1..1554: mol_type = other DNA
atggacttcagaaccgcctgcgaggagaccaagaccggcatctgcctgctgcaggacggcaaccaggagcccttcaaggtgagactgcacctggccaaggacatcctgatgatccaggagcaggacgtgatctgcgtgagcggcgagcccttctacagcggcgagagaaccgtgaccatcagaagacagaccgtgggcggcttcggcctgagcatcaagggcggcgccgagcacaacatccccgtggtggtgagcaagatcagcaaggagcagagagccgagctgagcggcctgctgttcatcggcgacgccatcctgcagatcaacggcatcaacgtgagaaagtgcagacacgaggaggtggtgcaggtgctgagaaacgccggcgaggaggtgaccctgaccgtgagcttcctgaagagagcccccgccttcctgaagctgcccctgaacgaggactgcgcctgcgcccccagcgaccagagcagcggcaccagcagccccctgtgcgacagcggcctgcacctgaactaccaccccaacaacaccgacaccctgagctgcagcagctggcccaccagccccggcctgagatgggagaagagatggtgcgacctgagactgatccccctgctgcacagcagattcagccagtacgtgcccggcaccgacctgagcagacagaacgccttccaggtgatcgccgtggacggcgtgtgcaccggcatcatccagtgcctgagcgccgaggactgcgtggactggctgcaggccatcgccaccaacatcagcaacctgaccaagcacaacatcaagaagatcaacagaaacttccccgtgaaccagcagatcgtgtacatgggctggtgcgaggccagagagcaggaccccctgcaggacagagtgtacagccccaccttcctggccctgagaggcagctgcctgtacaagttcctggccccccccgtgaccacctgggactggaccagagccgagaagaccttcagcgtgtacgagatcatgtgcaagatcctgaaggacagcgacctgctggacagaagaaagcagtgcttcaccgtgcagagcgagagcggcgaggacctgtacttcagcgtggagctggagagcgacctggcccagtgggagagagccttccagaccgccaccttcctggaggtggagagaatccagtgcaagacctacgcctgcgtgctggagagccacctgatgggcctgaccatcgacttcagcaccggcttcatctgcttcgacgccgccaccaaggccgtgctgtggagatacaagttcagccagctgaagggcagcagcgacgacggcaagagcaagatcaagttcctgttccagaaccccgacaccaagcagatcgaggccaaggagctggagttcagcaacctgttcgccgtgctgcactgcatccacagcttcttcgccgccaaggtggcctgcctggaccccctgttcctgggcaaccaggccaccgccagcaccgccgccagcagcgccaccaccagcaaggccaagtacaccacctag

SEQ ID NO: 101693 - DNA, 1554 bp, synthetic construct; identical to SEQ ID NO: 101692
  misc_feature 1..1554: note = Description of Artificial Sequence: Synthetic coding sequence
  source 1..1554: mol_type = other DNA

SEQ ID NO: 101694 - DNA, 279 bp, synthetic construct
  misc_feature 1..279: note = Description of Artificial Sequence: Synthetic coding sequence
  source 1..279: mol_type = other DNA
atggacttcagaaccgcctgcgaggagaccaagaccggcatctgcctgctgcaggacggcaaccaggagcccttcaaggtgagactgcacctggccaaggacatcctgatgatccaggagcaggacgtgatctgcgtgagcggcgagcccttctacagcggcgagagaaccgtgaccatcagaagacagaccgtgggcggcttcggcctgagcatcaagggcggcgccgagcacaacatccccgtggtggtgagcaagatcagcaaggagcagagatag

SEQ ID NO: 101695 - DNA, 423 bp, synthetic construct
  misc_feature 1..423: note = Description of Artificial Sequence: Synthetic coding sequence
  source 1..423: mol_type = other DNA
atggacgtgttcatgaagggcctgagcaaggccaaggagggcgtggtggccgccgccgagaagaccaagcagggcgtggccgaggccgccggcaagaccaaggagggcgtgctgtacgtgggcagcaagaccaaggagggcgtggtgcacggcgtggccaccgtggccgagaagaccaaggagcaggtgaccaacgtgggcggcgccgtggtgaccggcgtgaccgccgtggcccagaagaccgtggagggcgccggcagcatcgccgccgccaccggcttcgtgaagaaggaccagctgggcaagaacgaggagggcgccccccaggagggcatcctggaggacatgcccgtggaccccgacaacgaggcctacgagatgcccagcgaggagggctaccaggactacgagcccgaggcctag

SEQ ID NO: 101696 - DNA, 339 bp, synthetic construct
  misc_feature 1..339: note = Description of Artificial Sequence: Synthetic coding sequence
  source 1..339: mol_type = other DNA
atggacgtgttcatgaagggcctgagcaaggccaaggagggcgtggtggccgccgccgagaagaccaagcagggcgtggccgaggccgccggcaagaccaaggagggcgtgctgtacgtgggcagcaagaccaaggagggcgtggtgcacggcgtggccaccgtggccgagaagaccaaggagcaggtgaccaacgtgggcggcgccgtggtgaccggcgtgaccgccgtggcccagaagaccgtggagggcgccggcagcatcgccgccgccaccggcttcgtgaagaaggaccagctgggcaaggagggctaccaggactacgagcccgaggcctag

SEQ ID NO: 101697 - DNA, 423 bp, synthetic construct; identical to SEQ ID NO: 101695
  misc_feature 1..423: note = Description of Artificial Sequence: Synthetic coding sequence
  source 1..423: mol_type = other DNA

SEQ ID NO: 101698 - DNA, 381 bp, synthetic construct
  misc_feature 1..381: note = Description of Artificial Sequence: Synthetic coding sequence
  source 1..381: mol_type = other DNA
atggacgtgttcatgaagggcctgagcaaggccaaggagggcgtggtggccgccgccgagaagaccaagcagggcgtggccgaggccgccggcaagaccaaggagggcgtgctgtacgtggtggccgagaagaccaaggagcaggtgaccaacgtgggcggcgccgtggtgaccggcgtgaccgccgtggcccagaagaccgtggagggcgccggcagcatcgccgccgccaccggcttcgtgaagaaggaccagctgggcaagaacgaggagggcgccccccaggagggcatcctggaggacatgcccgtggaccccgacaacgaggcctacgagatgcccagcgaggagggctaccaggactacgagcccgaggcctag

SEQ ID NO: 101699 - DNA, 423 bp, synthetic construct; identical to SEQ ID NO: 101695
  misc_feature 1..423: note = Description of Artificial Sequence: Synthetic coding sequence
  source 1..423: mol_type = other DNA

SEQ ID NO: 101700 - DNA, 339 bp, synthetic construct; identical to SEQ ID NO: 101696
  misc_feature 1..339: note = Description of Artificial Sequence: Synthetic coding sequence
  source 1..339: mol_type = other DNA

SEQ ID NO: 101701 - DNA, 348 bp, synthetic construct
  misc_feature 1..348: note = Description of Artificial Sequence: Synthetic coding sequence
  source 1..348: mol_type = other DNA
atggacgtgttcatgaagggcctgagcaaggccaaggagggcgtggtggccgccgccgagaagaccaagcagggcgtggccgaggccgccggcaagaccaaggagggcgtgctgtacgtgggcagcaagaccaaggagggcgtggtgcacggcgtggccaccgtggccgagaagaccaaggagcaggtgaccaacgtgggcggcgccgtggtgaccggcgtgaccgccgtggcccagaagaccgtggagggcgccggcagcatcgccgccgccaccggcttcgtgaagaaggaccagctgggcaaggtgtggctgtgcaccttctgcgtgaccttcatcagctggtag

SEQ ID NO: 101702 - DNA, 381 bp, synthetic construct; identical to SEQ ID NO: 101698
  misc_feature 1..381: note = Description of Artificial Sequence: Synthetic coding sequence
  source 1..381: mol_type = other DNA

SEQ ID NO: 101703 - DNA, 423 bp, synthetic construct; identical to SEQ ID NO: 101695
  misc_feature 1..423: note = Description of Artificial Sequence: Synthetic coding sequence
  source 1..423: mol_type = other DNA

SEQ ID NO: 101704 - DNA, 204 bp, synthetic construct
  misc_feature 1..204: note = Description of Artificial Sequence: Synthetic coding sequence
  source 1..204: mol_type = other DNA
atggacgtgttcatgaagggcctgagcaaggccaaggagggcgtggtggccgccgccgagaagaccaagcagggcgtggccgaggccgccggcaagaccaaggagggcgtgctgtacgtgggcagcaagaccaaggagggcgtggtgcacggcgtggccaccgtggccgagaagaccaaggagcaggtgaccaacgtgggctag

SEQ ID NO: 101705 - DNA, 423 bp, synthetic construct; identical to SEQ ID NO: 101695
  misc_feature 1..423: note = Description of Artificial Sequence: Synthetic coding sequence
  source 1..423: mol_type = other DNA

SEQ ID NO: 101706 - DNA, 2760 bp, synthetic construct
  misc_feature 1..2760: note = Description of Artificial Sequence: Synthetic coding sequence
  source 1..2760: mol_type = other DNA
atggaggcccccgagtacctggacctggacgagatcgacttcagcgacgacatcagctacagcgtgaccagcctgaagaccatccccgagctgtgcagaagatgcgacacccagaacgaggacagaagcgtgagcagcagcagctggaactgcggcatcagcaccctgatcaccaacacccagaagcccaccggcatcgccgacgtgtacagcaagttcagacccgtgaagagagtgagccccctgaagcaccagcccgagaccctggagaacaacgagagcgacgaccagaagaaccagaaggtggtggagtaccagaagggcggcgagagcgacctgggcccccagccccaggagctgggccccggcgacggcgtgggcggcccccccggcaagagcagcgagcccagcaccagcctgggcgagctggagcactacgacctggacatggacgagatcctggacgtgccctacatcaagagcagccagcagctggccagcttcaccaaggtgaccagcgagaagagaatcctgggcctgtgcaccaccatcaacggcctgagcggcaaggcctgcagcaccggcagcagcgagagcagcagcagcaacatggcccccttctgcgtgctgagccccgtgaagagcccccacctgagaaaggccagcgccgtgatccacgaccagcacaagctgagcaccgaggagaccgagatcagcccccccctggtgaagtgcggcagcgcctacgagcccgagaaccagagcaaggacttcctgaacaagaccttcagcgacccccacggcagaaaggtggagaagaccacccccgactgccagctgagagccttccacctgcagagcagcgccgccgagagcaagcccgaggagcaggtgagcggcctgaacagaaccagcagccagggccccgaggagagaagcgagtacctgaagaaggtgaagagcatcctgaacatcgtgaaggagggccagatcagcctgctgccccacctggccgccgacaacctggacaagatccacgacgagaacggcaacaacctgctgcacatcgccgccagccagggccacgccgagtgcctgcagcacctgaccagcctgatgggcgaggactgcctgaacgagagaaacaccgagaagctgacccccgccggcctggccatcaagaacggccagctggagtgcgtgagatggatggtgagcgagaccgaggccatcgccgagctgagctgcagcaaggacttccccagcctgatccactacgccggctgctacggccaggagaagatcctgctgtggctgctgcagttcatgcaggagcagggcatcagcctggacgaggtggaccaggacggcaacagcgccgtgcacgtggccagccagcacggctacctgggctgcatccagaccctggtggagtacggcgccaacgtgaccatgcagaaccacgccggcgagaagcccagccagagcgccgagagacagggccacaccctgtgcagcagatacctggtggtggtggagacctgcatgagcctggccagccaggtggtgaagctgaccaagcagctgaaggagcagaccgtggagagagtgaccctgcagaaccagctgcagcagttcctggaggcccagaagagcgagggcaagagcctgcccagcagccccagcagccccagcagccccgccagcagaaagagccagtggaagagccccgacgccgacgacgacagcgtggccaagagcaagcccggcgtgcaggagggcatccaggtgctgggcagcctgagcgccagcagcagagccagacccaaggccaaggacgaggacagcgacaagatcctgagacagctgctgggcaaggagatcagcgagaacgtgtgcacccaggagaagctgagcctggagttccaggacgcccaggccagcagcagaaacagcaagaagatccccctggagaagagagagctgaagctggccagactgagacagctgatgcagagaagcctgagcgagagcgacaccgacagcaacaacagcgaggaccccaagaccacccccgtgagaaaggccgacagacccagaccccagcccatcgtggagagcgtggagagcatggacagcgccgagagcctgcacctgatgatcaagaagcacaccctggccagcggcggcagaagattccccttcagcatcaaggccagcaagagcctggacggccacagccccagccccaccagcgagagcagcgagcccgacctggagagccagtaccccggcagcggcagcatcccccccaaccagcccagcggcgacccccagcagcccagccccgacagcaccgccgcccagaaggtggccaccagccccaagagcgccctgaagagccccagcagcaagagaagaaccagccagaacctgaagctgagagtgaccttcgaggagcccgtggtgcagatggagcagcccagcctggagctgaacggcgagaaggacaaggacaagggcagaaccctgcagagaaccagcaccagcaacgagagcggcgaccagctgaagagacccttcggcgccttcagaagcatcatggagaccctgagcggcaaccagaacaacaacaacaactaccaggccgccaaccagctgaagaccagcaccctgcccctgaccagcctgggcagaaagaccgacgccaagggcaaccccgccagcagcgccagcaagggcaagaacaaggccgcctag

SEQ ID NO: 101707 - DNA, 3051 bp, synthetic construct
  misc_feature 1..3051: note = Description of Artificial Sequence: Synthetic coding sequence
  source 1..3051: mol_type = other DNA
atggaggcccccgagtacctggacctggacgagatcgacttcagcgacgacatcagcgacaacagaagccagggcaacagactgcagaagctgggcctggaggacaccgacagagaggacgccatgggcttcggcagccacagagccaagctgaccgtggtggccgccctgggcgcctgccactgccccgagaacgagtacagcgtgaccagcctgaagaccatccccgagctgtgcagaagatgcgacacccagaacgaggacagaagcgtgagcagcagcagctggaactgcggcatcagcaccctgatcaccaacacccagaagcccaccggcatcgccgacgtgtacagcaagttcagacccgtgaagagagtgagccccctgaagcaccagcccgagaccctggagaacaacgagagcgacgaccagaagaaccagaaggtggtggagtaccagaagggcggcgagagcgacctgggcccccagccccaggagctgggccccggcgacggcgtgggcggcccccccggcaagagcagcgagcccagcaccagcctgggcgagctggagcactacgacctggacatggacgagatcctggacgtgccctacatcaagagcagccagcagctggccagcttcaccaaggtgaccagcgagaagagaatcctgggcctgtgcaccaccatcaacggcctgagcggcaaggcctgcagcaccggcagcagcgagagcagcagcagcaacatggcccccttctgcgtgctgagccccgtgaagagcccccacctgagaaaggccagcgccgtgatccacgaccagcacaagctgagcaccgaggagaccgagatcagcccccccctggtgaagtgcggcagcgcctacgagcccgagaaccagagcaaggacttcctgaacaagaccttcagcgacccccacggcagaaaggtggagaagaccacccccgactgccagctgagagccttccacctgcagagcagcgccgccgagagcaagcccgaggagcaggtgagcggcctgaacagaaccagcagccagggccccgaggagagaagcgagtacctgaagaaggtgaagagcatcctgaacatcgtgaaggagggccagatcagcctgctgccccacctggccgccgacaacctggacaagatccacgacgagaacggcaacaacctgctgcacatcgccgccagccagggccacgccgagtgcctgcagcacctgaccagcctgatgggcgaggactgcctgaacgagagaaacaccgagaagctgacccccgccggcctggccatcaagaacggccagctggagtgcgtgagatggatggtgagcgagaccgaggccatcgccgagctgagctgcagcaaggacttccccagcctgatccactacgccggctgctacggccaggagaagatcctgctgtggctgctgcagttcatgcaggagcagggcatcagcctggacgaggtggaccaggacggcaacagcgccgtgcacgtggccagccagcacggctacctgggctgcatccagaccctggtggagtacggcgccaacgtgaccatgcagaaccacgccggcgagaagcccagccagagcgccgagagacagggccacaccctgtgcagcagatacctggtggtggtggagacctgcatgagcctggccagccaggtggtgaagctgaccaagcagctgaaggagcagaccgtggagagagtgaccctgcagaaccagctgcagcagttcctggaggcccagaagagcgagggcaagagcctgcccagcagccccagcagccccagcagccccgccagcagaaagagccagtggaagagccccgacgccgacgacgacagcgtggccaagagcaagcccggcgtgcaggagggcatccaggtgctgggcagcctgagcgccagcagcagagccagacccaaggccaaggacgaggacagcgacaagatcctgagacagctgctgggcaaggagatcagcgagaacgtgtgcacccaggagaagctgagcctggagttccaggacgcccaggccagcagcagaaacagcaagaagatccccctggagaagagagagctgaagctggccagactgagacagctgatgcagagaagcctgagcgagagcgacaccgacagcaacaacagcgaggaccccaagaccacccccgtgagaaaggccgacagacccagaccccagcccatcgtggagagcgtggagagcatggacagcgccgagagcctgcacctgatgatcaagaagcacaccctggccagcggcggcagaagattccccttcagcatcaaggccagcaagagcctggacggccacagccccagccccaccagcgagagcagcgagcccgacctggagagccagtaccccggcagcggcagcatcccccccaaccagcccagcggcgacccccagcagcccagccccgacagcaccgccgcccagaaggtggccaccagccccaagagcgccctgaagagccccagcagcaagagaagaaccagccagaacctgaagctgagagtgaccttcgaggagcccgtggtgcagatggagcagcccagcctggagctgaacggcgagaaggacaaggacaagggcagaaccctgcagagaaccagcaccagcaacgagagcggcgaccagctgaagagacccttcggcgccttcagaagcatcatggagaccctgagcggcaaccagaacaacaacaacaactaccaggccgccaaccagctgaagaccagcaccctgcccctgaccagcctgggcagaaagaccgacgccaagggcaaccccgccagcagcgccagcaagggcaagaacaaggccgagatgtacagcagctgcatcaacctgagcagcaacatgctgatcgaggagcacctgtgcaacgacaccagacacaacgacatcaacagaaagatgaagaagagctacagcatcaagcacatcgccgagcccgagagcaaggagctgttcctgtag

SEQ ID NO: 101708 - DNA, 2580 bp, synthetic construct
  misc_feature 1..2580: note = Description of Artificial Sequence: Synthetic coding sequence
  source 1..2580: mol_type = other DNA
atggaggcccccgagtacctggacctggacgagatcgacttcagcgacgacatcagctacagcgtgaccagcctgaagaccatccccgagctgtgcagaagatgcgacacccagaacgaggacagaagcgtgagcagcagcagctggaactgcggcatcagcaccctgatcaccaacacccagaagcccaccggcatcgccgacgtgtacagcaagttcagacccgtgaagagagtgagccccctgaagcaccagcccgagaccctggagaacaacgagagcgacgaccagaagaaccagaaggtggtggagtaccagaagggcggcgagagcgacctgggcccccagccccaggagctgggccccggcgacggcgtgggcggcccccccggcaagagcagcgagcccagcaccagcctgggcgagctggagcactacgacctggacatggacgagatcctggacgtgccctacatcaagagcagccagcagctggccagcttcaccaaggtgaccagcgagaagagaatcctgggcctgtgcaccaccatcaacggcctgagcggcaaggcctgcagcaccggcagcagcgagagcagcagcagcaacatggcccccttctgcgtgctgagccccgtgaagagcccccacctgagaaaggccagcgccgtgatccacgaccagcacaagctgagcaccgaggagaccgagatcagcccccccctggtgaagtgcggcagcgcctacgagcccgagaaccagagcaaggacttcctgaacaagaccttcagcgacccccacggcagaaaggtggagaagaccacccccgactgccagctgagagccttccacctgcagagcagcgccgccgagagcaagcccgaggagcaggtgagcggcctgaacagaaccagcagccagggccccgaggagagaagcgagtacctgaagaaggtgaagagcatcctgaacatcgtgaaggagggccagatcagcctgctgaacggccagctggagtgcgtgagatggatggtgagcgagaccgaggccatcgccgagctgagctgcagcaaggacttccccagcctgatccactacgccggctgctacggccaggagaagatcctgctgtggctgctgcagttcatgcaggagcagggcatcagcctggacgaggtggaccaggacggcaacagcgccgtgcacgtggccagccagcacggctacctgggctgcatccagaccctggtggagtacggcgccaacgtgaccatgcagaaccacgccggcgagaagcccagccagagcgccgagagacagggccacaccctgtgcagcagatacctggtggtggtggagacctgcatgagcctggccagccaggtggtgaagctgaccaagcagctgaaggagcagaccgtggagagagtgaccctgcagaaccagctgcagcagttcctggaggcccagaagagcgagggcaagagcctgcccagcagccccagcagccccagcagccccgccagcagaaagagccagtggaagagccccgacgccgacgacgacagcgtggccaagagcaagcccggcgtgcaggagggcatccaggtgctgggcagcctgagcgccagcagcagagccagacccaaggccaaggacgaggacagcgacaagatcctgagacagctgctgggcaaggagatcagcgagaacgtgtgcacccaggagaagctgagcctggagttccaggacgcccaggccagcagcagaaacagcaagaagatccccctggagaagagagagctgaagctggccagactgagacagctgatgcagagaagcctgagcgagagcgacaccgacagcaacaacagcgaggaccccaagaccacccccgtgagaaaggccgacagacccagaccccagcccatcgtggagagcgtggagagcatggacagcgccgagagcctgcacctgatgatcaagaagcacaccctggccagcggcggcagaagattccccttcagcatcaaggccagcaagagcctggacggccacagccccagccccaccagcgagagcagcgagcccgacctggagagccagtaccccggcagcggcagcatcccccccaaccagcccagcggcgacccccagcagcccagccccgacagcaccgccgcccagaaggtggccaccagccccaagagcgccctgaagagccccagcagcaagagaagaaccagccagaacctgaagctgagagtgaccttcgaggagcccgtggtgcagatggagcagcccagcctggagctgaacggcgagaaggacaaggacaagggcagaaccctgcagagaaccagcaccagcaacgagagcggcgaccagctgaagagacccttcggcgccttcagaagcatcatggagaccctgagcggcaaccagaacaacaacaacaactaccaggccgccaaccagctgaagaccagcaccctgcccctgaccagcctgggcagaaagaccgacgccaagggcaaccccgccagcagcgccagcaagggcaagaacaaggccgcctag

SEQ ID NO: 101709 - DNA, 1812 bp, synthetic construct
  misc_feature 1..1812: note = Description of Artificial Sequence: Synthetic coding sequence
  source 1..1812: mol_type = other DNA
atgacctacctgatccagagccaccacagcagaagaagccagaactgcgccgaggacgtgatcagaaagaccaagaccgaccagaacggccagctggagtgcgtgagatggatggtgagcgagaccgaggccatcgccgagctgagctgcagcaaggacttccccagcctgatccactacgccggctgctacggccaggagaagatcctgctgtggctgctgcagttcatgcaggagcagggcatcagcctggacgaggtggaccaggacggcaacagcgccgtgcacgtggccagccagcacggctacctgggctgcatccagaccctggtggagtacggcgccaacgtgaccatgcagaaccacgccggcgagaagcccagccagagcgccgagagacagggccacaccctgtgcagcagatacctggtggtggtggagacctgcatgagcctggccagccaggtggtgaagctgaccaagcagctgaaggagcagaccgtggagagagtgaccctgcagaaccagctgcagcagttcctggaggcccagaagagcgagggcaagagcctgcccagcagccccagcagccccagcagccccgccagcagaaagagccagtggaagagccccgacgccgacgacgacagcgtggccaagagcaagcccggcgtgcaggagggcatccaggtgctgggcagcctgagcgccagcagcagagccagacccaaggccaaggacgaggacagcgacaagatcctgagacagctgctgggcaaggagatcagcgagaacgtgtgcacccaggagaagctgagcctggagttccaggacgcccaggccagcagcagaaacagcaagaagatccccctggagaagagagagctgaagctggccagactgagacagctgatgcagagaagcctgagcgagagcgacaccgacagcaacaacagcgaggaccccaagaccacccccgtgagaaaggccgacagacccagaccccagcccatcgtggagagcgtggagagcatggacagcgccgagagcctgcacctgatgatcaagaagcacaccctggccagcggcggcagaagattccccttcagcatcaaggccagcaagagcctggacggccacagccccagccccaccagcgagagcagcgagcccgacctggagagccagtaccccggcagcggcagcatcccccccaaccagcccagcggcgacccccagcagcccagccccgacagcaccgccgcccagaaggtggccaccagccccaagagcgccctgaagagccccagcagcaagagaagaaccagccagaacctgaagctgagagtgaccttcgaggagcccgtggtgcagatggagcagcccagcctggagctgaacggcgagaaggacaaggacaagggcagaaccctgcagagaaccagcaccagcaacgagagcggcgaccagctgaagagacccttcggcgccttcagaagcatcatggagaccctgagcggcaaccagaacaacaacaacaactaccaggccgccaaccagctgaagaccagcaccctgcccctgaccagcctgggcagaaagaccgacgccaagggcaaccccgccagcagcgccagcaagggcaagaacaaggccgagatgtacagcagctgcatcaacctgagcagcaacatgctgatcgaggagcacctgtgcaacgacaccagacacaacgacatcaacagaaagatgaagaagagctacagcatcaagcacatcgccgagcccgagagcaaggagctgttcctgtag

SEQ ID NO: 101710 - DNA, 1566 bp, synthetic construct
  misc_feature 1..1566: note = Description of Artificial Sequence: Synthetic coding sequence
  source 1..1566: mol_type = other DNA
atgaagctgaccctggtgatgacctacctgatccagagccaccacagcagaagaagccagaactgcgccgaggacgtgatcagaaagaccaagaccgaccaggagaagatcctgctgtggctgctgcagttcatgcaggagcagggcatcagcctggacgaggtggaccaggacggcaacagcgccgtgcacgtggccagccagcacggctacctgggctgcatccagaccctggtggagtacggcgccaacgtgaccatgcagaaccacgccggcgagaagcccagccagagcgccgagagacagggccacaccctgtgcagcagatacctggtggtggtggagacctgcatgagcctggccagccaggtggtgaagctgaccaagcagctgaaggagcagaccgtggagagagtgaccctgcagaaccagctgcagcagttcctggaggcccagaagagcgagggcaagagcctgcccagcagccccagcagccccagcagccccgccagcagaaagagccagtggaagagccccgacgccgacgacgacagcgtggccaagagcaagcccggcgtgcaggagggcatccaggtgctgggcagcctgagcgccagcagcagagccagacccaaggccaaggacgaggacagcgacaagatcctgagacagctgctgggcaaggagatcagcgagaacgtgtgcacccaggagaagctgagcctggagttccaggacgcccaggccagcagcagaaacagcaagaagatccccctggagaagagagagctgaagctggccagactgagacagctgatgcagagaagcctgagcgagagcgacaccgacagcaacaacagcgaggaccccaagaccacccccgtgagaaaggccgacagacccagaccccagcccatcgtggagagcgtggagagcatggacagcgccgagagcctgcacctgatgatcaagaagcacaccctggccagcggcggcagaagattccccttcagcatcaaggccagcaagagcctggacggccacagccccagccccaccagcgagagcagcgagcccgacctggagagccagtaccccggcagcggcagcatcccccccaaccagcccagcggcgacccccagcagcccagccccgacagcaccgccgcccagaaggtggccaccagccccaagagcgccctgaagagccccagcagcaagagaagaaccagccagaacctgaagctgagagtgaccttcgaggagcccgtggtgcagatggagcagcccagcctggagctgaacggcgagaaggacaaggacaagggcagaaccctgcagagaaccagcaccagcaacgagagcggcgaccagctgaagagacccttcggcgccttcagaagcatcatggagaccctgagcggcaaccagaacaacaacaacaactaccaggccgccaaccagctgaagaccagcaccctgcccctgaccagcctgggcagaaagaccgacgccaagggcaaccccgccagcagcgccagcaagggcaagaacaaggccgcctag

SEQ ID NO: 101711 - DNA, 1146 bp, synthetic construct
  misc_feature 1..1146: note = Description of Artificial Sequence: Synthetic coding sequence
  source 1..1146: mol_type = other DNA
atgaagctgaccctggtgatgacctacctgatccagagccaccacagcagaagaagccagaactgcgccgaggacgtgatcagaaagaccaagaccgaccagaacggccagctggagtgcgtgagatggatggtgagcgagaccgaggccatcgccgagctgagctgcagcaaggacttccccagcctgatccactacgccggctgctacggccaggagaagatcctgctgtggctgctgcagttcatgcaggagcagggcatcagcctggacgaggtggaccaggacggcaacagcgccgtgcacgtggccagccagcacggctacctgggctgcatccagaccctggtggagtacggcgccaacgtgaccatgcagaaccacgccggcgagaagcccagccagagcgccgagagacagggccacaccctgtgcagcagatacctggtggtggtggagacctgcatgagcctggccagccaggtggtgaagctgaccaagcagctgaaggagcagaccgtggagagagtgaccctgcagaaccagctgcagcagttcctggaggcccagaagagcgagggcaagagcctgcccagcagccccagcagccccagcagccccgccagcagaaagagccagtggaagagccccgacgccgacgacgacagcgtggccaagagcaagcccggcgtgcaggagggcatccaggtgctgggcagcctgagcgccagcagcagagccagacccaaggccaaggacgaggacagcgacaagatcctgagacagctgctgggcaaggagatcagcgagaacgtgtgcacccaggagaagctgagcctggagttccaggacgcccaggccagcagcagaaacagcaagaagatccccctggagaagagagagctgaagctggccagactgagacagctgatgcagagaagcctgagcgagagcgacaccgacagcaacaacagcgaggaccccaagaccacccccgtgagaaaggccgacagacccagaccccagcccatcgtggagagcgtggagagcatggacagcgccggcttcctgagcgccagcagaccccccaacccctggatggccaccgcccacctgcccccccagagagccgccaaccagacctag

SEQ ID NO: 101712 - DNA, 1767 bp, synthetic construct
  misc_feature 1..1767: note = Description of Artificial Sequence: Synthetic coding sequence
  source 1..1767: mol_type = other DNA
atggaggcccccgagtacctggacctggacgagatcgacttcagcgacgacatcagcgacaacagaagccagggcaacagactgcagaagctgggcctggaggacaccgacagagaggacgccatgggcttcggcagccacagagccaagctgaccgtggtggccgccctgggcgcctgccactgccccgagaacgagtacagcgtgaccagcctgaagaccatccccgagctgtgcagaagatgcgacacccagaacgaggacagaagcgtgagcagcagcagctggaactgcggcatcagcaccctgatcaccaacacccagaagcccaccggcatcgccgacgtgtacagcaagttcagacccgtgaagagagtgagccccctgaagcaccagcccgagaccctggagaacaacgagagcgacgaccagaagaaccagaaggtggtggagtaccagaagggcggcgagagcgacctgggcccccagccccaggagctgggccccggcgacggcgtgggcggcccccccggcaagagcagcgagcccagcaccagcctgggcgagctggagcactacgacctggacatggacgagatcctggacgtgccctacatcaagagcagccagcagctggccagcttcaccaaggtgaccagcgagaagagaatcctgggcctgtgcaccaccatcaacggcctgagcggcaaggcctgcagcaccggcagcagcgagagcagcagcagcaacatggcccccttctgcgtgctgagccccgtgaagagcccccacctgagaaaggccagcgccgtgatccacgaccagcacaagctgagcaccgaggagaccgagatcagcccccccctggtgaagtgcggcagcgcctacgagcccgagaaccagagcaaggacttcctgaacaagaccttcagcgacccccacggcagaaaggtggagaagaccacccccgactgccagctgagagccttccacctgcagagcagcgccgccgagagcaagcccgaggagcaggtgagcggcctgaacagaaccagcagccagggccccgaggagagaagcgagtacctgaagaaggtgaagagcatcctgaacatcgtgaaggagggccagatcagcctgctgccccacctggccgccgacaacctggacaagatccacgacgagaacggcaacaacctgctgcacatcgccgccagccagggccacgccgagtgcctgcagcacctgaccagcctgatgggcgaggactgcctgaacgagagaaacaccgagaagctgacccccgccggcctggccatcaagaacggccagctggagtgcgtgagatggatggtgagcgagaccgaggccatcgccgagctgagctgcagcaaggacttccccagcctgatccactacgccggctgctacggccaggagaagatcctgctgtggctgctgcagttcatgcaggagcagggcatcagcctggacgaggtggaccaggacggcaacagcgccgtgcacgtggccagccagcacggctacctgggctgcatccagaccagactgaagatccagggcacctggaacggcagcgagacctgcctgttcacccaccacttcagcagctacccccccatcagcagcggcctgcagtgccagggccaggagggcgtgctgttcatccccgaccaggtgggcgccgccaccaacaagcaggtgctgttccagaaccagctgcccgagaccaagagcagctactag

SEQ ID NO: 101713 - DNA, 267 bp, synthetic construct
  misc_feature 1..267: note = Description of Artificial Sequence: Synthetic coding sequence
  source 1..267: mol_type = other DNA
atggaggcccccgagtacctggacctggacgagatcgacttcagcgacgacatcagctacagcgtgaccagcctgaagaccatccccgagctgtgcagaagatgcgacacccagaacgaggacagaagcgccacccccagctgcagacagagcagacagaacagcagaagaaagtggaagcagagcatcacctactgcggcgtgaccggcaccagaagagtgagcaccgccccccacttcttcgacggcagaagactgccccagtag

SEQ ID NO: 101714 - DNA, 297 bp, synthetic construct
  misc_feature 1..297: note = Description of Artificial Sequence: Synthetic coding sequence
  source 1..297: mol_type = other DNA
atggaggcccccgagtacctggacctggacgagatcgacttcagcgacgacatcagctacagcgtgaccagcctgaagaccatccccgagctgtgcagaagatgcgacacccagaacgaggacagaagcgtgagcagcagcagctggaactgcggcatcagcaccctgatcaccaacacccagaagcccaccggcatcgccgacgtgtacagcaagttcagacccgtgaagagagtgagccccctgaagcaccagcccgagaccctggagaacaacgagagcgacgaccagaagtag

SEQ ID NO: 101715 - DNA, 45 bp, synthetic construct
  misc_feature 1..45: note = Description of Artificial Sequence: Synthetic coding sequence
  source 1..45: mol_type = other DNA
atggaggcccccgagtacctggacctggacgagatcgacttctag

SEQ ID NO: 101716 - DNA, 408 bp, synthetic construct
  misc_feature 1..408: note = Description of Artificial Sequence: Synthetic coding sequence
  source 1..408: mol_type = other DNA
atggaggcccccgagtacctggacctggacgagatcgacttcagcgacgacatcagctacagcgtgaccagcctgaagaccatccccgagctgtgcagaagatgcgacacccagaacgaggacagaagcgtgagcagcagcagctggaactgcggcatcagcaccctgatcaccaacacccagaagcccaccggcatcgccgacgtgtacagcaagttcagacccgtgaagagagtgagccccctgaagcaccagcccgagaccctggagaacaacgagagcgacgaccagaagaaccagaaggtggtggagtaccagaagggcggcgagagcgacctgggcccccagccccaggagctgggccccggcgacggcgtgggcggcccccccggcaagagcagcgagtag

SEQ ID NO: 101717 - DNA, 1434 bp, synthetic construct
  misc_feature 1..1434: note = Description of Artificial Sequence: Synthetic coding sequence
  source 1..1434: mol_type = other DNA
atgcaggagcagggcatcagcctggacgaggtggaccaggacggcaacagcgccgtgcacgtggccagccagcacggctacctgggctgcatccagaccctggtggagtacggcgccaacgtgaccatgcagaaccacgccggcgagaagcccagccagagcgccgagagacagggccacaccctgtgcagcagatacctggtggtggtggagacctgcatgagcctggccagccaggtggtgaagctgaccaagcagctgaaggagcagaccgtggagagagtgaccctgcagaaccagctgcagcagttcctggaggcccagaagagcgagggcaagagcctgcccagcagccccagcagccccagcagccccgccagcagaaagagccagtggaagagccccgacgccgacgacgacagcgtggccaagagcaagcccggcgtgcaggagggcatccaggtgctgggcagcctgagcgccagcagcagagccagacccaaggccaaggacgaggacagcgacaagatcctgagacagctgctgggcaaggagatcagcgagaacgtgtgcacccaggagaagctgagcctggagttccaggacgcccaggccagcagcagaaacagcaagaagatccccctggagaagagagagctgaagctggccagactgagacagctgatgcagagaagcctgagcgagagcgacaccgacagcaacaacagcgaggaccccaagaccacccccgtgagaaaggccgacagacccagaccccagcccatcgtggagagcgtggagagcatggacagcgccgagagcctgcacctgatgatcaagaagcacaccctggccagcggcggcagaagattccccttcagcatcaaggccagcaagagcctggacggccacagccccagccccaccagcgagagcagcgagcccgacctggagagccagtaccccggcagcggcagcatcccccccaaccagcccagcggcgacccccagcagcccagccccgacagcaccgccgcccagaaggtggccaccagccccaagagcgccctgaagagccccagcagcaagagaagaaccagccagaacctgaagctgagagtgaccttcgaggagcccgtggtgcagatggagcagcccagcctggagctgaacggcgagaaggacaaggacaagggcagaaccctgcagagaaccagcaccagcaacgagagcggcgaccagctgaagagacccttcggcgccttcagaagcatcatggagaccctgagcggcaaccagaacaacaacaacaactaccaggccgccaaccagctgaagaccagcaccctgcccctgaccagcctgggcagaaagaccgacgccaagggcaaccccgccagcagcgccagcaagggcaagaacaaggccgcctag

SEQ ID NO: 101718 - DNA, 405 bp, synthetic construct
  misc_feature 1..405: note = Description of Artificial Sequence: Synthetic coding sequence
  source 1..405: mol_type = other DNA
atggacgtgttcatgaagggcctgagcatggccaaggagggcgtggtggccgccgccgagaagaccaagcagggcgtgaccgaggccgccgagaagaccaaggagggcgtgctgtacgtgggcagcaagaccagagagggcgtggtgcagggcgtggccagcgtggccgagaagaccaaggagcaggccagccacctgggcggcgccgtgttcagcggcgccggcaacatcgccgccgccaccggcctggtgaagagagaggagttccccaccgacctgaagcccgaggaggtggcccaggaggccgccgaggagcccctgatcgagcccctgatggagcccgagggcgagagctacgaggaccccccccaggaggagtaccaggagtacgagcccgaggcctag

SEQ ID NO: 101719 - DNA, 405 bp, synthetic construct; identical to SEQ ID NO: 101718
  misc_feature 1..405: note = Description of Artificial Sequence: Synthetic coding sequence
  source 1..405: mol_type = other DNA

SEQ ID NO: 101720 - DNA, 405 bp, synthetic construct; identical to SEQ ID NO: 101718
  misc_feature 1..405: note = Description of Artificial Sequence: Synthetic coding sequence
  source 1..405: mol_type = other DNA

SEQ ID NO: 101721 - DNA, 405 bp, synthetic construct; identical to SEQ ID NO: 101718
  misc_feature 1..405: note = Description of Artificial Sequence: Synthetic coding sequence
  source 1..405: mol_type = other DNA

SEQ ID NO: 101722 - DNA, 381 bp, synthetic construct
  misc_feature 1..381: note = Description of Artificial Sequence: Synthetic coding sequence
  source 1..381: mol_type = other DNA
atggacgtgttcaagaagggcttcagcatcgccaaggagggcgtggtgggcgccgtggagaagaccaagcagggcgtgaccgaggccgccgagaagaccaaggagggcgtgatgtacgtgggcgccaagaccaaggagaacgtggtgcagagcgtgaccagcggcctgccctggggctggggctggggcggcggccagcccgtgagcagccacagcggcagagaggaccagggcgccggccagagaagagagagaggctgcggcgagcagagacagcactgcggccaccaggacagaggcggcggcggcgagcacagaggccacctgagaggcggcgcccagggcggcctggaggccatctgcccccccaccggcggctag

SEQ ID NO: 101723 - DNA, 384 bp, synthetic construct
  misc_feature 1..384: note = Description of Artificial Sequence: Synthetic coding sequence
  source 1..384: mol_type = other DNA
atggacgtgttcaagaagggcttcagcatcgccaaggagggcgtggtgggcgccgtggagaagaccaagcagggcgtgaccgaggccgccgagaagaccaaggagggcgtgatgtacgtgggcgccaagaccaaggagaacgtggtgcagagcgtgaccagcgtggccgagaagaccaaggagcaggccaacgccgtgagcgaggccgtggtgagcagcgtgaacaccgtggccaccaagaccgtggaggaggccgagaacatcgccgtgaccagcggcgtggtgagaaaggaggacctgagacccagcgccccccagcaggagggcgaggccagcaaggagaaggaggaggtggccgaggaggcccagagcggcggcgactag

SEQ ID NO: 101724 - DNA, 471 bp, synthetic construct
  misc_feature 1..471: note = Description of Artificial Sequence: Synthetic coding sequence
  source 1..471: mol_type = other DNA
atggccggccagttcagaagctacgtgtgggaccccctgctgatcctgagccagatcgtgctgatgcagaccgtgtactacggcagcctgggcctgtggctggccctggtggacggcctggtgagaagcagccccagcctggaccagatgttcgacgccgagatcctgggcttcagcaccccccccggcagactgagcatgatgagcttcatcctgaacgccctgacctgcgccctgggcctgctgtacttcatcagaagaggcaagcagtgcctggacttcaccgtgaccgtgcacttcttccacctgctgggctgctggttctacagcagcagattccccagcgccctgacctggtggctggtgcaggccgtgtgcatcgccctgatggccgtgatcggcgagtacctgtgcatgagaaccgagctgaaggagatccccctgaacagcgcccccaagagcaacgtgtag

SEQ ID NO: 101725 - DNA, 471 bp, synthetic construct; identical to SEQ ID NO: 101724
  misc_feature 1..471: note = Description of Artificial Sequence: Synthetic coding sequence
  source 1..471: mol_type = other DNA

SEQ ID NO: 101726 - DNA, 357 bp, synthetic construct
  misc_feature 1..357: note = Description of Artificial Sequence: Synthetic coding sequence
  source 1..357: mol_type = other DNA
atggccggccagttcagaagctacgtgtgggaccccctgctgatcctgagccagatcgtgctgatgcagaccgtgtactacggcagcctgggcctgtggctggccctggtggacggcctggtgagaagcagccccagcctggaccagatgttcgacgccgagatcctgggcttcagcaccccccccggcagactgagcatgatgagcttcatcctgaacgccctgacctgcgccctgggcctgctgtacttcatcagaagaggcaagcagtgcctggacttcaccgtgaccgtgcacttcttccacctgctgggctgctggttctacagcagcagattccccagcgccctgacctag

SEQ ID NO: 101727 - DNA, 231 bp, synthetic construct
  misc_feature 1..231: note = Description of Artificial Sequence: Synthetic coding sequence
  source 1..231: mol_type = other DNA
atggccggccagttcagaagctacgtgtgggaccccctgctgatcctgagccagatcgtgctgatgcagaccgtgtactacggcagcctgggcctgtggctggccctggtggacggcctggtgagaagcagccccagcctggaccagatgttcgacgccgagatcctgggcttcagcaccccccccggcagactgagcatgatgagcttcatcctgaacgccctgacctag

SEQ ID NO: 101728 - DNA, 1134 bp, synthetic construct
  misc_feature 1..1134: note = Description of Artificial Sequence: Synthetic coding sequence
  source 1..1134: mol_type = other DNA
atgagcagccccggcaccgagagcgccggcaagagcctgcagtacagagtggaccacctgctgagcgccgtggagaacgagctgcaggccggcagcgagaagggcgaccccaccgagagagagctgagagtgggcctggaggagagcgagctgtggctgagattcaaggagctgaccaacgagatgatcgtgaccaagaacggcagaagaatgttccccgtgctgaaggtgaacgtgagcggcctggaccccaacgccatgtacagcttcctgctggacttcgtggccgccgacaaccacagatggaagtacgtgaacggcgagtgggtgcccggcggcaagcccgagccccaggcccccagctgcgtgtacatccaccccgacagccccaacttcggcgcccactggatgaaggcccccgtgagcttcagcaaggtgaagctgaccaacaagctgaacggcggcggccagatcatgctgaacagcctgcacaagtacgagcccagaatccacatcgtgagagtgggcggcccccagagaatgatcaccagccactgcttccccgagacccagttcatcgccgtgaccgcctaccagaacgaggagatcaccgccctgaagatcaagtacaaccccttcgccaaggccttcctggacgccaaggagagaagcgaccacaaggagatgatggaggagcccggcgacagccagcagcccggctacagccagagctacagcgacaacagccccgcctgcctgagcatgctgcagagccacgacaactggagcagcctgggcatgcccgcccaccccagcatgctgcccgtgagccacaacgccagcccccccaccagcagcagccagtaccccagcctgtggagcgtgagcaacggcgccgtgacccccggcagccaggccgccgccgtgagcaacggcctgggcgcccagttcttcagaggcagccccgcccactacacccccctgacccaccccgtgagcgcccccagcagcagcggcagccccctgtacgagggcgccgccgccgccaccgacatcgtggacagccagtacgacgccgccgcccagggcagactgatcgccagctggacccccgtgagcccccccagcatgtag

SEQ ID NO: 101729 - DNA, 735 bp, synthetic construct
  misc_feature 1..735: note = Description of Artificial Sequence: Synthetic coding sequence
  source 1..735: mol_type = other DNA
atgagatggtgcctgctgctgatctgggcccagggcctgagacaggcccccctggccagcggcatgatgaccggcaccatcgagaccaccggcaacatcagcgccgagaagggcggcagcatcatcctgcagtgccacctgagcagcaccaccgcccaggtgacccaggtgaactgggagcagcaggaccagctgctggccatctgcaacgccgacctgggctggcacatcagccccagcttcaaggacagagtggcccccggccccggcctgggcctgaccctgcagagcctgaccgtgaacgacaccggcgagtacttctgcatctaccacacctaccccgacggcacctacaccggcagaatcttcctggaggtgctggagagcagcgtggccgagcacggcgccagattccagatccccctgctgggcgccatggccgccaccctggtggtgatctgcaccgccgtgatcgtggtggtggccctgaccagaaagaagaaggccctgagaatccacagcgtggagggcgacctgagaagaaagagcgccggccaggaggagtggagccccagcgcccccagcccccccggcagctgcgtgcaggccgaggccgcccccgccggcctgtgcggcgagcagagaggcgaggactgcgccgagctgcacgactacttcaacgtgctgagctacagaagcctgggcaactgcagcttcttcaccgagaccggctag

SEQ ID NO: 101730 - DNA, 936 bp, synthetic construct
  misc_feature 1..936: note = Description of Artificial Sequence: Synthetic coding sequence
  source 1..936: mol_type = other DNA
atggccttcctggtggcccaccccatgcagttcgtgtacctgctgaccaccctgtgcgtgttcaacatggtgttcgccaagctgggcttcagcgagaccgtgttcagccagagactgagcttcaccgtgctgagcgccgtgggctacttccagtggcagaagagaccccacctgctgcccgtgggccccctgggcagaagcatgagatggtgcctgctgctgatctgggcccagggcctgagacaggcccccctggccagcggcatgatgaccggcaccatcgagaccaccggcaacatcagcgccgagaagggcggcagcatcatcctgcagtgccacctgagcagcaccaccgcccaggtgacccaggtgaactgggagcagcaggaccagctgctggccatctgcaacgccgacctgggctggcacatcagccccagcttcaaggacagagtggcccccggccccggcctgggcctgaccctgcagagcctgaccgtgaacgacaccggcgagtacttctgcatctaccacacctaccccgacggcacctacaccggcagaatcttcctggaggtgctggagagcagcgtggccgagcacggcgccagattccagatccccctgctgggcgccatggccgccaccctggtggtgatctgcaccgccgtgatcgtggtggtggccctgaccagaaagaagaaggccctgagaatccacagcgtggagggcgacctgagaagaaagagcgccggccaggaggagtggagccccagcgcccccagcccccccggcagctgcgtgcaggccgaggccgcccccgccggcctgtgcggcgagcagagaggcgaggactgcgccgagctgcacgactacttcaacgtgctgagctacagaagcctgggcaactgcagcttcttcaccgagaccggctag

SEQ ID NO: 101731 - DNA, 735 bp, synthetic construct; identical to SEQ ID NO: 101729
  misc_feature 1..735: note = Description of Artificial Sequence: Synthetic coding sequence
  source 1..735: mol_type = other DNA

SEQ ID NO: 101732 - DNA, 561 bp, synthetic construct
  misc_feature 1..561: note = Description of Artificial Sequence: Synthetic coding sequence
  source 1..561: mol_type = other DNA
atgagcggcatcagcggctgccccttcttcctgtggggcctgctggccctgctgggcctggccctggtgatcagcctgatcttcaacatcagccactacgtggagaagcagagacaggacaagatgtacagctacagcagcgaccacaccagagtggacgagtactacatcgaggacacccccatctacggcaacctggacgacatgatcagcgagcccatggacgagaactgctacgagcagatgaaggccagacccgagaagagcgtgaacaagatgcaggaggccacccccagcgcccaggccaccaacgagacccagatgtgctacgccagcctggaccacagcgtgaagggcaagagaagaaagcccagaaagcagaacacccacttcagcgacaaggacggcgacgagcagctgcacgccatcgacgccagcgtgagcaagaccaccctggtggacagcttcagccccgagagccaggccgtggaggagaacatccacgacgaccccatcagactgttcggcctgatcagagccaagagagagcccatcaactag

SEQ ID NO: 101733 - DNA, 1308 bp, synthetic construct
  misc_feature 1..1308: note = Description of Artificial Sequence: Synthetic coding sequence
  source 1..1308: mol_type = other DNA
atgagcagccccggcaccgagagcgccggcaagagcctgcagtacagagtggaccacctgctgagcgccgtggagaacgagctgcaggccggcagcgagaagggcgaccccaccgagagagagctgagagtgggcctggaggagagcgagctgtggctgagattcaaggagctgaccaacgagatgatcgtgaccaagaacggcagaagaatgttccccgtgctgaaggtgaacgtgagcggcctggaccccaacgccatgtacagcttcctgctggacttcgtggccgccgacaaccacagatggaagtacgtgaacggcgagtgggtgcccggcggcaagcccgagccccaggcccccagctgcgtgtacatccaccccgacagccccaacttcggcgcccactggatgaaggcccccgtgagcttcagcaaggtgaagctgaccaacaagctgaacggcggcggccagatcatgctgaacagcctgcacaagtacgagcccagaatccacatcgtgagagtgggcggcccccagagaatgatcaccagccactgcttccccgagacccagttcatcgccgtgaccgcctaccagaacgaggagatcaccgccctgaagatcaagtacaaccccttcgccaaggccttcctggacgccaaggagagaagcgaccacaaggagatgatggaggagcccggcgacagccagcagcccggctacagccagtggggctggctgctgcccggcaccagcaccctgtgcccccccgccaacccccacccccagttcggcggcgccctgagcctgcccagcacccacagctgcgacagataccccaccctgagaagccacagaagcagcccctaccccagcccctacgcccacagaaacaacagccccacctacagcgacaacagccccgcctgcctgagcatgctgcagagccacgacaactggagcagcctgggcatgcccgcccaccccagcatgctgcccgtgagccacaacgccagcccccccaccagcagcagccagtaccccagcctgtggagcgtgagcaacggcgccgtgacccccggcagccaggccgccgccgtgagcaacggcctgggcgcccagttcttcagaggcagccccgcccactacacccccctgacccaccccgtgagcgcccccagcagcagcggcagccccctgtacgagggcgccgccgccgccaccgacatcgtggacagccagtacgacgccgccgcccagggcagactgatcgccagctggacccccgtgagcccccccagcatgtag

SEQ ID NO: 101734 - DNA, 732 bp, synthetic construct
  misc_feature 1..732: note = Description of Artificial Sequence: Synthetic coding sequence
  source 1..732: mol_type = other DNA
atgagcagccccggcaccgagagcgccggcaagagcctgcagtacagagtggaccacctgctgagcgccgtggagaacgagctgcaggccggcagcgagaagggcgaccccaccgagagagagctgagagtgggcctggaggagagcgagctgtggctgagattcaaggagctgaccaacgagatgatcgtgaccaagaacggcagaagaatgttccccgtgctgaaggtgaacgtgagcggcctggaccccaacgccatgtacagcttcctgctggacttcgtggccgccgacaaccacagatggaagtacgtgaacggcgagtgggtgcccggcggcaagcccgagccccaggcccccagctgcgtgtacatccaccccgacagccccaacttcggcgcccactggatgaaggcccccgtgagcttcagcaaggtgaagctgaccaacaagctgaacggcggcggccagatcatgctgaacagcctgcacaagtacgagcccagaatccacatcgtgagagtgggcggcccccagagaatgatcaccagccactgcttccccgagacccagttcatcgccgtgaccgcctaccagaacgaggagatcaccgccctgaagatcaagtacaaccccttcgccaaggccttcctggacgccaaggagagaagcgaccacaaggagatgatggaggagcccggcgacagccagcagcccggctacagccagtag

SEQ ID NO: 101735 - DNA, 366 bp, synthetic construct
  misc_feature 1..366: note = Description of Artificial Sequence: Synthetic coding sequence
  source 1..366: mol_type = other DNA
atgagaatcatgctgctgttcaccgccatcctggccttcagcctggcccagagcttcggcgccgtgtgcaaggagccccaggaggaggtggtgcccggcggcggcagaagcaagagagaccccgacctgtaccagctgctgcagagactgttcaagagccacagcagcctggagggcctgctgaaggccctgagccaggccagcaccgaccccaaggagagcaccagccccgagaagagagacatgcacgacttcttcgtgggcctgatgggcaagagaagcgtgcagcccgacagccccaccgacgtgaaccaggagaacgtgcccagcttcggcatcctgaagtacccccccagagccgagtag

SEQ ID NO: 101736 - DNA, 366 bp, synthetic construct; identical to SEQ ID NO: 101735
  misc_feature 1..366: note = Description of Artificial Sequence: Synthetic coding sequence
  source 1..366: mol_type = other DNA

SEQ ID NO: 101737 - DNA, 312 bp, synthetic construct
  misc_feature 1..312: note = Description of Artificial Sequence: Synthetic coding sequence
  source 1..312: mol_type = other DNA
atgagaatcatgctgctgttcaccgccatcctggccttcagcctggcccagagcttcggcgccgtgtgcaaggagccccaggaggaggtggtgcccggcggcggcagaagcaagagagaccccgacctgtaccagctgctgcagagactgttcaagagccacagcagcctggagggcctgctgaaggccctgagccaggccagcaccgaccccaaggagagcaccagccccgagaagcacagccccaccgacgtgaaccaggagaacgtgcccagcttcggcatcctgaagtacccccccagagccgagtag

SEQ ID NO: 101738 - DNA, 366 bp, synthetic construct; identical to SEQ ID NO: 101735
  misc_feature 1..366: note = Description of Artificial Sequence: Synthetic coding sequence
  source 1..366: mol_type = other DNA

SEQ ID NO: 101739 - DNA, 1224 bp, synthetic construct
  misc_feature 1..1224: note = Description of Artificial Sequence: Synthetic coding sequence
  source 1..1224: mol_type = other DNA
atggacaacgtgctgcccgtggacagcgacctgagccccaacatcagcaccaacaccagcgagcccaaccagttcgtgcagcccgcctggcagatcgtgctgtgggccgccgcctacaccgtgatcgtggtgaccagcgtggtgggcaacgtggtggtgatgtggatcatcctggcccacaagagaatgagaaccgtgaccaactacttcctggtgaacctggccttcgccgaggccagcatggccgccttcaacaccgtggtgaacttcacctacgccgtgcacaacgagtggtactacggcctgttctactgcaagttccacaacttcttccccatcgccgccgtgttcgccagcatctacagcatgaccgccgtggccttcgacagatacatggccatcatccaccccctgcagcccagactgagcgccaccgccaccaaggtggtgatctgcgtgatctgggtgctggccctgctgctggccttcccccagggctactacagcaccaccgagaccatgcccagcagagtggtgtgcatgatcgagtggcccgagcaccccaacaagatctacgagaaggtgtaccacatctgcgtgaccgtgctgatctacttcctgcccctgctggtgatcggctacgcctacaccgtggtgggcatcaccctgtgggccagcgagatccccggcgacagcagcgacagataccacgagcaggtgagcgccaagagaaaggtggtgaagatgatgatcgtggtggtgtgcaccttcgccatctgctggctgcccttccacatcttcttcctgctgccctacatcaaccccgacctgtacctgaagaagttcatccagcaggtgtacctggccatcatgtggctggccatgagcagcaccatgtacaaccccatcatctactgctgcctgaacgacagattcagactgggcttcaagcacgccttcagatgctgccccttcatcagcgccggcgactacgagggcctggagatgaagagcaccagatacctgcagacccagggcagcgtgtacaaggtgagcagactggagaccaccatcagcaccgtggtgggcgcccacgaggaggagcccgaggacggccccaaggccacccccagcagcctggacctgaccagcaactgcagcagcagaagcgacagcaagaccatgaccgagagcttcagcttcagcagcaacgtgctgagctag

SEQ ID NO: 101740 - DNA, 936 bp, synthetic construct
  misc_feature 1..936: note = Description of Artificial Sequence: Synthetic coding sequence
  source 1..936: mol_type = other DNA
atggacaacgtgctgcccgtggacagcgacctgagccccaacatcagcaccaacaccagcgagcccaaccagttcgtgcagcccgcctggcagatcgtgctgtgggccgccgcctacaccgtgatcgtggtgaccagcgtggtgggcaacgtggtggtgatgtggatcatcctggcccacaagagaatgagaaccgtgaccaactacttcctggtgaacctggccttcgccgaggccagcatggccgccttcaacaccgtggtgaacttcacctacgccgtgcacaacgagtggtactacggcctgttctactgcaagttccacaacttcttccccatcgccgccgtgttcgccagcatctacagcatgaccgccgtggccttcgacagatacatggccatcatccaccccctgcagcccagactgagcgccaccgccaccaaggtggtgatctgcgtgatctgggtgctggccctgctgctggccttcccccagggctactacagcaccaccgagaccatgcccagcagagtggtgtgcatgatcgagtggcccgagcaccccaacaagatctacgagaaggtgtaccacatctgcgtgaccgtgctgatctacttcctgcccctgctggtgatcggctacgcctacaccgtggtgggcatcaccctgtgggccagcgagatccccggcgacagcagcgacagataccacgagcaggtgagcgccaagagaaaggtggtgaagatgatgatcgtggtggtgtgcaccttcgccatctgctggctgcccttccacatcttcttcctgctgccctacatcaaccccgacctgtacctgaagaagttcatccagcaggtgtacctggccatcatgtggctggccatgagcagcaccatgtacaaccccatcatctactgctgcctgaacgacagatag

SEQ ID NO: 101741 - DNA, 1197 bp, synthetic construct
  misc_feature 1..1197: note = Description of Artificial Sequence: Synthetic coding sequence
  source 1..1197: mol_type = other DNA
atgggcacctgcgacatcgtgaccgaggccaacatcagcagcggccccgagagcaacaccaccggcatcaccgccttcagcatgcccagctggcagctggccctgtgggccaccgcctacctggccctggtgctggtggccgtgaccggcaacgccatcgtgatctggatcatcctggcccacagaagaatgagaaccgtgaccaactacttcatcgtgaacctggccctggccgacctgtgcatggccgccttcaacgccgccttcaacttcgtgtacgccagccacaacatctggtacttcggcagagccttctgctacttccagaacctgttccccatcaccgccatgttcgtgagcatctacagcatgaccgccatcgccgccgacagatacatggccatcgtgcaccccttccagcccagactgagcgcccccagcaccaaggccgtgatcgccggcatctggctggtggccctggccctggccagcccccagtgcttctacagcaccgtgaccatggaccagggcgccaccaagtgcgtggtggcctggcccgaggacagcggcggcaagaccctgctgctgtaccacctggtggtgatcgccctgatctacttcctgcccctggccgtgatgttcgtggcctacagcgtgatcggcctgaccctgtggagaagagccgtgcccggccaccaggcccacggcgccaacctgagacacctgcaggccatgaagaagttcgtgaagaccatggtgctggtggtgctgaccttcgccatctgctggctgccctaccacctgtacttcatcctgggcagcttccaggaggacatctactgccacaagttcatccagcaggtgtacctggccctgttctggctggccatgagcagcaccatgtacaaccccatcatctactgctgcctgaaccacagattcagaagcggcttcagactggccttcagatgctgcccctgggtgacccccaccaaggaggacaagctggagctgacccccaccaccagcctgagcaccagagtgaacagatgccacaccaaggagaccctgttcatggccggcgacaccgcccccagcgaggccaccagcggcgaggccggcagaccccaggacggcagcggcctgtggttcggctacggcctgctggcccccaccaagacccacgtggagatctag

SEQ ID NO: 101742 - DNA, 561 bp, synthetic construct
  misc_feature 1..561: note = Description of Artificial Sequence: Synthetic coding sequence
  source 1..561: mol_type = other DNA
atgttcgtggcctacagcgtgatcggcctgaccctgtggagaagagccgtgcccggccaccaggcccacggcgccaacctgagacacctgcaggccatgaagaagttcgtgaagaccatggtgctggtggtgctgaccttcgccatctgctggctgccctaccacctgtacttcatcctgggcagcttccaggaggacatctactgccacaagttcatccagcaggtgtacctggccctgttctggctggccatgagcagcaccatgtacaaccccatcatctactgctgcctgaaccacagattcagaagcggcttcagactggccttcagatgctgcccctgggtgacccccaccaaggaggacaagctggagctgacccccaccaccagcctgagcaccagagtgaacagatgccacaccaaggagaccctgttcatggccggcgacaccgcccccagcgaggccaccagcggcgaggccggcagaccccaggacggcagcggcctgtggttcggctacggcctgctggcccccaccaagacccacgtggagatctag

SEQ ID NO: 101743 - DNA, 1398 bp, synthetic construct
  misc_feature 1..1398: note = Description of Artificial Sequence: Synthetic coding sequence
  source 1..1398: mol_type = other DNA
atggccaccctgcccgccgccgagacctggatcgacggcggcggcggcgtgggcgccgacgccgtgaacctgaccgccagcctggccgccggcgccgccaccggcgccgtggagaccggctggctgcagctgctggaccaggccggcaacctgagcagcagccccagcgccctgggcctgcccgtggccagccccgcccccagccagccctgggccaacctgaccaaccagttcgtgcagcccagctggagaatcgccctgtggagcctggcctacggcgtggtggtggccgtggccgtgctgggcaacctgatcgtgatctggatcatcctggcccacaagagaatgagaaccgtgaccaactacttcctggtgaacctggccttcagcgacgccagcatggccgccttcaacaccctggtgaacttcatctacgccctgcacagcgagtggtacttcggcgccaactactgcagattccagaacttcttccccatcaccgccgtgttcgccagcatctacagcatgaccgccatcgccgtggacagatacatggccatcatcgaccccctgaagcccagactgagcgccaccgccaccaagatcgtgatcggcagcatctggatcctggccttcctgctggccttcccccagtgcctgtacagcaagaccaaggtgatgcccggcagaaccctgtgcttcgtgcagtggcccgagggccccaagcagcacttcacctaccacatcatcgtgatcatcctggtgtactgcttccccctgctgatcatgggcatcacctacaccatcgtgggcatcaccctgtggggcggcgagatccccggcgacacctgcgacaagtaccacgagcagctgaaggccaagagaaaggtggtgaagatgatgatcatcgtggtgatgaccttcgccatctgctggctgccctaccacatctacttcatcctgaccgccatctaccagcagctgaacagatggaagtacatccagcaggtgtacctggccagcttctggctggccatgagcagcaccatgtacaaccccatcatctactgctgcctgaacaagagattcagagccggcttcaagagagccttcagatggtgccccttcatcaaggtgagcagctacgacgagctggagctgaagaccaccagattccaccccaacagacagagcagcatgtacaccgtgaccagaatggagagcatgaccgtggtgttcgaccccaacgacgccgacaccaccagaagcagcagaaagaagagagccacccccagagaccccagcttcaacggctgcagcagaagaaacagcaagagcgccagcgccaccagcagcttcatcagcagcccctacaccagcgtggacgagtacagctag

SEQ ID NO: 101744 - DNA, 5682 bp, synthetic construct
  misc_feature 1..5682: note = Description of Artificial Sequence: Synthetic coding sequence
  source 1..5682: mol_type = other DNA
atgggccccggctgcgacctgctgctgagaaccgccgccaccatcaccgccgccgccatcatgagcgacaccgacagcgacgaggacagcgccggcggcggccccttcagcctggccggcttcctgttcggcaacatcaacggcgccggccagctggagggcgagagcgtgctggacgacgagtgcaagaagcacctggccggcctgggcgccctgggcctgggcagcctgatcaccgagctgaccgccaacgaggagctgaccggcaccgacggcgccctggtgaacgacgagggctgggtgagaagcaccgaggacgccgtggactacagcgacatcaacgaggtggccgaggacgagagcagaagataccagcagaccatgggcagcctgcagcccctgtgccacagcgactacgacgaggacgactacgacgccgactgcgaggacatcgactgcaagctgatgcccccccccccccccccccccggccccatgaagaaggacaaggaccaggacagcatcaccggcgtgagcgagaacggcgagggcatcatcctgcccagcatcatcgcccccagcagcctggccagcgagaaggtggacttcagcagcagcagcgacagcgagagcgagatgggcccccaggaggccacccaggccgagagcgaggacggcaagctgaccctgcccctggccggcatcatgcagcacgacgccaccaagctgctgcccagcgtgaccgagctgttccccgagttcagacccggcaaggtgctgagattcctgagactgttcggccccggcaagaacgtgcccagcgtgtggagaagcgccagaagaaagagaaagaagaagcacagagagctgatccaggaggagcagatccaggaggtggagtgcagcgtggagagcgaggtgagccagaagagcctgtggaactacgactacgcccccccccccccccccgagcagtgcctgagcgacgacgagatcaccatgatggcccccgtggagagcaagttcagccagagcaccggcgacatcgacaaggtgaccgacaccaagcccagagtggccgagtggagatacggccccgccagactgtggtacgacatgctgggcgtgcccgaggacggcagcggcttcgactacggcttcaagctgagaaagaccgagcacgagcccgtgatcaagagcagaatgatcgaggagttcagaaagctggaggagaacaacggcaccgacctgctggccgacgagaacttcctgatggtgacccagctgcactgggaggacgacatcatctgggacggcgaggacgtgaagcacaagggcaccaagccccagagagccagcctggccggctggctgcccagcagcatgaccagaaacgccatggcctacaacgtgcagcagggcttcgccgccaccctggacgacgacaagccctggtacagcatcttccccatcgacaacgaggacctggtgtacggcagatgggaggacaacatcatctgggacgcccaggccatgcccagactgctggagccccccgtgctgaccctggaccccaacgacgagaacctgatcctggagatccccgacgagaaggaggaggccaccagcaacagccccagcaaggagagcaagaaggagagcagcctgaagaagagcagaatcctgctgggcaagaccggcgtgatcaaggaggagccccagcagaacatgagccagcccgaggtgaaggacccctggaacctgagcaacgacgagtactactaccccaagcagcagggcctgagaggcaccttcggcggcaacatcatccagcacagcatccccgccgtggagctgagacagcccttcttccccacccacatgggccccatcaagctgagacagttccacagaccccccctgaagaagtacagcttcggcgccctgagccagcccggcccccacagcgtgcagcccctgctgaagcacatcaagaagaaggccaagatgagagagcaggagagacaggccagcggcggcggcgagatgttcttcatgagaaccccccaggacctgaccggcaaggacggcgacctgatcctggccgagtacagcgaggagaacggccccctgatgatgcaggtgggcatggccaccaagatcaagaactactacaagagaaagcccggcaaggaccccggcgcccccgactgcaagtacggcgagaccgtgtactgccacaccagccccttcctgggcagcctgcaccccggccagctgctgcaggccttcgagaacaacctgttcagagcccccatctacctgcacaagatgcccgagaccgacttcctgatcatcagaaccagacagggctactacatcagagagctggtggacatcttcgtggtgggccagcagtgccccctgttcgaggtgcccggccccaacagcaagagagccaacacccacatcagagacttcctgcaggtgttcatctacagactgttctggaagagcaaggacagacccagaagaatcagaatggaggacatcaagaaggccttccccagccacagcgagagcagcatcagaaagagactgaagctgtgcgccgacttcaagagaaccggcatggacagcaactggtgggtgctgaagagcgacttcagactgcccaccgaggaggagatcagagccatggtgagccccgagcagtgctgcgcctactacagcatgatcgccgccgagcagagactgaaggacgccggctacggcgagaagagcttcttcgcccccgaggaggagaacgaggaggacttccagatgaagatcgacgacgaggtgagaaccgccccctggaacaccaccagagccttcatcgccgccatgaagggcaagtgcctgctggaggtgaccggcgtggccgaccccaccggctgcggcgagggcttcagctacgtgaagatccccaacaagcccacccagcagaaggacgacaaggagccccagcccgtgaagaagaccgtgaccggcaccgacgccgacctgagaagactgagcctgaagaacgccaagcagctgctgagaaagttcggcgtgcccgaggaggagatcaagaagctgagcagatgggaggtgatcgacgtggtgagaaccatgagcaccgagcaggccagaagcggcgagggccccatgagcaagttcgccagaggcagcagattcagcgtggccgagcaccaggagagatacaaggaggagtgccagagaatcttcgacctgcagaacaaggtgctgagcagcaccgaggtgctgagcaccgacaccgacagcagcagcgccgaggacagcgacttcgaggagatgggcaagaacatcgagaacatgctgcagaacaagaagaccagcagccagctgagcagagagagagaggagcaggagagaaaggagctgcagagaatgctgctggccgccggcagcgccgccagcggcaacaaccacagagacgacgacaccgccagcgtgaccagcctgaacagcagcgccaccggcagatgcctgaagatctacagaaccttcagagacgaggagggcaaggagtacgtgagatgcgagaccgtgagaaagcccgccgtgatcgacgcctacgtgagaatcagaaccaccaaggacgaggagttcatcagaaagttcgccctgttcgacgagcagcacagagaggagatgagaaaggagagaagaagaatccaggagcagctgagaagactgaagagaaaccaggagaaggagaagctgaagggcccccccgagaagaagcccaagaagatgaaggagagacccgacctgaagctgaagtgcggcgcctgcggcgccatcggccacatgagaaccaacaagttctgccccctgtactaccagaccaacgccccccccagcaaccccgtggccatgaccgaggagcaggaggaggagctggagaagaccgtgatccacaacgacaacgaggagctgatcaaggtggagggcaccaagatcgtgctgggcaagcagctgatcgagagcgccgacgaggtgagaagaaagagcctggtgctgaagttccccaagcagcagctgccccccaagaagaagagaagagtgggcaccaccgtgcactgcgactacctgaacagaccccacaagagcatccacagaagaagaaccgaccccatggtgaccctgagcagcatcctggagagcatcatcaacgacatgagagacctgcccaacacctaccccttccacacccccgtgaacgccaaggtggtgaaggactactacaagatcatcaccagacccatggacctgcagaccctgagagagaacgtgagaaagagactgtaccccagcagagaggagttcagagagcacctggagctgatcgtgaagaacagcgccacctacaacggccccaagcacagcctgacccagatcagccagagcatgctggacctgtgcgacgagaagctgaaggagaaggaggacaagctggccagactggagaaggccatcaaccccctgctggacgacgacgaccaggtggccttcagcttcatcctggacaacatcgtgacccagaagatgatggccgtgcccgacagctggcccttccaccaccccgtgaacaagaagttcgtgcccgactactacaaggtgatcgtgaaccccatggacctggagaccatcagaaagaacatcagcaagcacaagtaccagagcagagagagcttcctggacgacgtgaacctgatcctggccaacagcgtgaagtacaacggccccgagagccagtacaccaagaccgcccaggagatcgtgaacgtgtgctaccagaccctgaccgagtacgacgagcacctgacccagctggagaaggacatctgcaccgccaaggaggccgccctggaggaggccgagctggagagcctggaccccatgacccccggcccctacaccccccagccccccgacctgtacgacaccaacaccagcctgagcatgagcagagacgccagcgtgttccaggacgagagcaacatgagcgtgctggacatccccagcgccacccccgagaagcaggtgacccaggagggcgaggacggcgacggcgacctggccgacgaggaggagggcaccgtgcagcagccccaggccagcgtgctgtacgaggacctgctgatgagcgagggcgaggacgacgaggaggacgccggcagcgacgaggagggcgacaaccccttcagcgccatccagctgagcgagagcggcagcgacagcgacgtgggcagcggcggcatcagacccaagcagcccagaatgctgcaggagaacaccagaatggacatggagaacgaggagagcatgatgagctacgagggcgacggcggcgaggccagccacggcctggaggacagcaacatcagctacggcagctacgaggagcccgaccccaagagcaacacccaggacaccagcttcagcagcatcggcggctacgaggtgagcgaggaggaggaggacgaggaggaggaggagcagagaagcggccccagcgtgctgagccaggtgcacctgagcgaggacgaggaggacagcgaggacttccacagcatcgccggcgacagcgacctggacagcgacgagtag

SEQ ID NO: 101745 - DNA, 5619 bp, synthetic construct
  misc_feature 1..5619: note = Description of Artificial Sequence: Synthetic coding sequence
  source 1..5619: mol_type = other DNA
atgggccccggctgcgacctgctgctgagaaccgccgccaccatcaccgccgccgccatcatgagcgacaccgacagcgacgaggacagcgccggcggcggccccttcagcctggccggcttcctgttcggcaacatcaacggcgccggccagctggagggcgagagcgtgctggacgacgagtgcaagaagcacctggccggcctgggcgccctgggcctgggcagcctgatcaccgagctgaccgccaacgaggagctgaccggcaccgacggcgccctggtgaacgacgagggctgggtgagaagcaccgaggacgccgtggactacagcgacatcaacgaggtggccgaggacgagagcagaagataccagcagaccatgggcagcctgcagcccctgtgccacagcgactacgacgaggacgactacgacgccgactgcgaggacatcgactgcaagctgatgcccccccccccccccccccccggccccatgaagaaggacaaggaccaggacagcatcaccggcgagaaggtggacttcagcagcagcagcgacagcgagagcgagatgggcccccaggaggccacccaggccgagagcgaggacggcaagctgaccctgcccctggccggcatcatgcagcacgacgccaccaagctgctgcccagcgtgaccgagctgttccccgagttcagacccggcaaggtgctgagattcctgagactgttcggccccggcaagaacgtgcccagcgtgtggagaagcgccagaagaaagagaaagaagaagcacagagagctgatccaggaggagcagatccaggaggtggagtgcagcgtggagagcgaggtgagccagaagagcctgtggaactacgactacgcccccccccccccccccgagcagtgcctgagcgacgacgagatcaccatgatggcccccgtggagagcaagttcagccagagcaccggcgacatcgacaaggtgaccgacaccaagcccagagtggccgagtggagatacggccccgccagactgtggtacgacatgctgggcgtgcccgaggacggcagcggcttcgactacggcttcaagctgagaaagaccgagcacgagcccgtgatcaagagcagaatgatcgaggagttcagaaagctggaggagaacaacggcaccgacctgctggccgacgagaacttcctgatggtgacccagctgcactgggaggacgacatcatctgggacggcgaggacgtgaagcacaagggcaccaagccccagagagccagcctggccggctggctgcccagcagcatgaccagaaacgccatggcctacaacgtgcagcagggcttcgccgccaccctggacgacgacaagccctggtacagcatcttccccatcgacaacgaggacctggtgtacggcagatgggaggacaacatcatctgggacgcccaggccatgcccagactgctggagccccccgtgctgaccctggaccccaacgacgagaacctgatcctggagatccccgacgagaaggaggaggccaccagcaacagccccagcaaggagagcaagaaggagagcagcctgaagaagagcagaatcctgctgggcaagaccggcgtgatcaaggaggagccccagcagaacatgagccagcccgaggtgaaggacccctggaacctgagcaacgacgagtactactaccccaagcagcagggcctgagaggcaccttcggcggcaacatcatccagcacagcatccccgccgtggagctgagacagcccttcttccccacccacatgggccccatcaagctgagacagttccacagaccccccctgaagaagtacagcttcggcgccctgagccagcccggcccccacagcgtgcagcccctgctgaagcacatcaagaagaaggccaagatgagagagcaggagagacaggccagcggcggcggcgagatgttcttcatgagaaccccccaggacctgaccggcaaggacggcgacctgatcctggccgagtacagcgaggagaacggccccctgatgatgcaggtgggcatggccaccaagatcaagaactactacaagagaaagcccggcaaggaccccggcgcccccgactgcaagtacggcgagaccgtgtactgccacaccagccccttcctgggcagcctgcaccccggccagctgctgcaggccttcgagaacaacctgttcagagcccccatctacctgcacaagatgcccgagaccgacttcctgatcatcagaaccagacagggctactacatcagagagctggtggacatcttcgtggtgggccagcagtgccccctgttcgaggtgcccggccccaacagcaagagagccaacacccacatcagagacttcctgcaggtgttcatctacagactgttctggaagagcaaggacagacccagaagaatcagaatggaggacatcaagaaggccttccccagccacagcgagagcagcatcagaaagagactgaagctgtgcgccgacttcaagagaaccggcatggacagcaactggtgggtgctgaagagcgacttcagactgcccaccgaggaggagatcagagccatggtgagccccgagcagtgctgcgcctactacagcatgatcgccgccgagcagagactgaaggacgccggctacggcgagaagagcttcttcgcccccgaggaggagaacgaggaggacttccagatgaagatcgacgacgaggtgagaaccgccccctggaacaccaccagagccttcatcgccgccatgaagggcaagtgcctgctggaggtgaccggcgtggccgaccccaccggctgcggcgagggcttcagctacgtgaagatccccaacaagcccacccagcagaaggacgacaaggagccccagcccgtgaagaagaccgtgaccggcaccgacgccgacctgagaagactgagcctgaagaacgccaagcagctgctgagaaagttcggcgtgcccgaggaggagatcaagaagctgagcagatgggaggtgatcgacgtggtgagaaccatgagcaccgagcaggccagaagcggcgagggccccatgagcaagttcgccagaggcagcagattcagcgtggccgagcaccaggagagatacaaggaggagtgccagagaatcttcgacctgcagaacaaggtgctgagcagcaccgaggtgctgagcaccgacaccgacagcagcagcgccgaggacagcgacttcgaggagatgggcaagaacatcgagaacatgctgcagaacaagaagaccagcagccagctgagcagagagagagaggagcaggagagaaaggagctgcagagaatgctgctggccgccggcagcgccgccagcggcaacaaccacagagacgacgacaccgccagcgtgaccagcctgaacagcagcgccaccggcagatgcctgaagatctacagaaccttcagagacgaggagggcaaggagtacgtgagatgcgagaccgtgagaaagcccgccgtgatcgacgcctacgtgagaatcagaaccaccaaggacgaggagttcatcagaaagttcgccctgttcgacgagcagcacagagaggagatgagaaaggagagaagaagaatccaggagcagctgagaagactgaagagaaaccaggagaaggagaagctgaagggcccccccgagaagaagcccaagaagatgaaggagagacccgacctgaagctgaagtgcggcgcctgcggcgccatcggccacatgagaaccaacaagttctgccccctgtactaccagaccaacgccccccccagcaaccccgtggccatgaccgaggagcaggaggaggagctggagaagaccgtgatccacaacgacaacgaggagctgatcaaggtggagggcaccaagatcgtgctgggcaagcagctgatcgagagcgccgacgaggtgagaagaaagagcctggtgctgaagttccccaagcagcagctgccccccaagaagaagagaagagtgggcaccaccgtgcactgcgactacctgaacagaccccacaagagcatccacagaagaagaaccgaccccatggtgaccctgagcagcatcctggagagcatcatcaacgacatgagagacctgcccaacacctaccccttccacacccccgtgaacgccaaggtggtgaaggactactacaagatcatcaccagacccatggacctgcagaccctgagagagaacgtgagaaagagactgtaccccagcagagaggagttcagagagcacctggagctgatcgtgaagaacagcgccacctacaacggccccaagcacagcctgacccagatcagccagagcatgctggacctgtgcgacgagaagctgaaggagaaggaggacaagctggccagactggagaaggccatcaaccccctgctggacgacgacgaccaggtggccttcagcttcatcctggacaacatcgtgacccagaagatgatggccgtgcccgacagctggcccttccaccaccccgtgaacaagaagttcgtgcccgactactacaaggtgatcgtgaaccccatggacctggagaccatcagaaagaacatcagcaagcacaagtaccagagcagagagagcttcctggacgacgtgaacctgatcctggccaacagcgtgaagtacaacggccccgagagccagtacaccaagaccgcccaggagatcgtgaacgtgtgctaccagaccctgaccgagtacgacgagcacctgacccagctggagaaggacatctgcaccgccaaggaggccgccctggaggaggccgagctggagagcctggaccccatgacccccggcccctacaccccccagccccccgacctgtacgacaccaacaccagcctgagcatgagcagagacgccagcgtgttccaggacgagagcaacatgagcgtgctggacatccccagcgccacccccgagaagcaggtgacccaggagggcgaggacggcgacggcgacctggccgacgaggaggagggcaccgtgcagcagccccaggccagcgtgctgtacgaggacctgctgatgagcgagggcgaggacgacgaggaggacgccggcagcgacgaggagggcgacaaccccttcagcgccatccagctgagcgagagcggcagcgacagcgacgtgggcagcggcggcatcagacccaagcagcccagaatgctgcaggagaacaccagaatggacatggagaacgaggagagcatgatgagctacgagggcgacggcggcgaggccagccacggcctggaggacagcaacatcagctacggcagctacgaggagcccgaccccaagagcaacacccaggacaccagcttcagcagcatcggcggctacgaggtgagcgaggaggaggaggacgaggaggaggaggagcagagaagcggccccagcgtgctgagccaggtgcacctgagcgaggacgaggaggacagcgaggacttccacagcatcgccggcgacagcgacctggacagcgacgagtag

SEQ ID NO: 101746 - DNA, 1632 bp, synthetic construct
  misc_feature 1..1632: note = Description of Artificial Sequence: Synthetic coding sequence
  source 1..1632: mol_type = other DNA
atgaccgaggagcaggaggaggagctggagaagaccgtgatccacaacgacaacgaggagctgatcaaggtggagggcaccaagatcgtgctgggcaagcagctgatcgagagcgccgacgaggtgagaagaaagagcctggtgctgaagttccccaagcagcagctgccccccaagaagaagagaagagtgggcaccaccgtgcactgcgactacctgaacagaccccacaagagcatccacagaagaagaaccgaccccatggtgaccctgagcagcatcctggagagcatcatcaacgacatgagagacctgcccaacacctaccccttccacacccccgtgaacgccaaggtggtgaaggactactacaagatcatcaccagacccatggacctgcagaccctgagagagaacgtgagaaagagactgtaccccagcagagaggagttcagagagcacctggagctgatcgtgaagaacagcgccacctacaacggccccaagcacagcctgacccagatcagccagagcatgctggacctgtgcgacgagaagctgaaggagaaggaggacaagctggccagactggagaaggccatcaaccccctgctggacgacgacgaccaggtggccttcagcttcatcctggacaacatcgtgacccagaagatgatggccgtgcccgacagctggcccttccaccaccccgtgaacaagaagttcgtgcccgactactacaaggtgatcgtgaaccccatggacctggagaccatcagaaagaacatcagcaagcacaagtaccagagcagagagagcttcctggacgacgtgaacctgatcctggccaacagcgtgaagtacaacggccccgagagccagtacaccaagaccgcccaggagatcgtgaacgtgtgctaccagaccctgaccgagtacgacgagcacctgacccagctggagaaggacatctgcaccgccaaggaggccgccctggaggaggccgagctggagagcctggaccccatgacccccggcccctacaccccccaggccaagccccccgacctgtacgacaccaacaccagcctgagcatgagcagagacgccagcgtgttccaggacgagagcaacatgagcgtgctggacatccccagcgccacccccgagaagcaggtgacccagatgagacagggcagaggcagactgggcgaggaggacagcgacgtggacatcgagggctacgacgacgaggaggaggacggcaagcccaagacccccgcccccgagggcgaggacggcgacggcgacctggccgacgaggaggagggcaccgtgcagcagccccaggccagcgtgctgtacgaggacctgctgatgagcgagggcgaggacgacgaggaggacgccggcagcgacgaggagggcgacaaccccttcagcgccatccagctgagcgagagcggcagcgacagcgacgtgggcagcggcggcatcagacccaagcagcccagaatgctgcaggagaacaccagaatggacatggagaacgaggagagcatgatgagctacgagggcgacggcggcgaggccagccacggcctggaggacagcaacatcagccaccagtag

SEQ ID NO: 101747 - DNA, 5688 bp, synthetic construct
  misc_feature 1..5688: note = Description of Artificial Sequence: Synthetic coding sequence
  source 1..5688: mol_type = other DNA
atgggccccggctgcgacctgctgctgagaaccgccgccaccatcaccgccgccgccatcatgagcgacaccgacagcgacgaggacagcgccggcggcggccccttcagcctggccggcttcctgttcggcaacatcaacggcgccggccagctggagggcgagagcgtgctggacgacgagtgcaagaagcacctggccggcctgggcgccctgggcctgggcagcctgatcaccgagctgaccgccaacgaggagctgaccggcaccgacggcgccctggtgaacgacgagggctgggtgagaagcaccgaggacgccgtggactacagcgacatcaacgaggtggccgaggacgagagcagaagataccagcagaccatgggcagcctgcagcccctgtgccacagcgactacgacgaggacgactacgacgccgactgcgaggacatcgactgcaagctgatgcccccccccccccccccccccggccccatgaagaaggacaaggaccaggacagcatcaccggcgtgagcgagaacggcgagggcatcatcctgcccagcatcatcgcccccagcagcctggccagcgagaaggtggacttcagcagcagcagcgacagcgagagcgagatgggcccccaggaggccacccaggccgagagcgaggacggcaagctgaccctgcccctggccggcatcatgcagcacgacgccaccaagctgctgcccagcgtgaccgagctgttccccgagttcagacccggcaaggtgctgagattcctgagactgttcggccccggcaagaacgtgcccagcgtgtggagaagcgccagaagaaagagaaagaagaagcacagagagctgatccaggaggagcagatccaggaggtggagtgcagcgtggagagcgaggtgagccagaagagcctgtggaactacgactacgcccccccccccccccccgagcagtgcctgagcgacgacgagatcaccatgatggcccccgtggagagcaagttcagccagagcaccggcgacatcgacaaggtgaccgacaccaagcccagagtggccgagtggagatacggccccgccagactgtggtacgacatgctgggcgtgcccgaggacggcagcggcttcgactacggcttcaagctgagaaagaccgagcacgagcccgtgatcaagagcagaatgatcgaggagttcagaaagctggaggagaacaacggcaccgacctgctggccgacgagaacttcctgatggtgacccagctgcactgggaggacgacatcatctgggacggcgaggacgtgaagcacaagggcaccaagccccagagagccagcctggccggctggctgcccagcagcatgaccagaaacgccatggcctacaacgtgcagcagggcttcgccgccaccctggacgacgacaagccctggtacagcatcttccccatcgacaacgaggacctggtgtacggcagatgggaggacaacatcatctgggacgcccaggccatgcccagactgctggagccccccgtgctgaccctggaccccaacgacgagaacctgatcctggagatccccgacgagaaggaggaggccaccagcaacagccccagcaaggagagcaagaaggagagcagcctgaagaagagcagaatcctgctgggcaagaccggcgtgatcaaggaggagccccagcagaacatgagccagcccgaggtgaaggacccctggaacctgagcaacgacgagtactactaccccaagcagcagggcctgagaggcaccttcggcggcaacatcatccagcacagcatccccgccgtggagctgagacagcccttcttccccacccacatgggccccatcaagctgagacagttccacagaccccccctgaagaagtacagcttcggcgccctgagccagcccggcccccacagcgtgcagcccctgctgaagcacatcaagaagaaggccaagatgagagagcaggagagacaggccagcggcggcggcgagatgttcttcatgagaaccccccaggacctgaccggcaaggacggcgacctgatcctggccgagtacagcgaggagaacggccccctgatgatgcaggtgggcatggccaccaagatcaagaactactacaagagaaagcccggcaaggaccccggcgcccccgactgcaagtacggcgagaccgtgtactgccacaccagccccttcctgggcagcctgcaccccggccagctgctgcaggccttcgagaacaacctgttcagagcccccatctacctgcacaagatgcccgagaccgacttcctgatcatcagaaccagacagggctactacatcagagagctggtggacatcttcgtggtgggccagcagtgccccctgttcgaggtgcccggccccaacagcaagagagccaacacccacatcagagacttcctgcaggtgttcatctacagactgttctggaagagcaaggacagacccagaagaatcagaatggaggacatcaagaaggccttccccagccacagcgagagcagcatcagaaagagactgaagctgtgcgccgacttcaagagaaccggcatggacagcaactggtgggtgctgaagagcgacttcagactgcccaccgaggaggagatcagagccatggtgagccccgagcagtgctgcgcctactacagcatgatcgccgccgagcagagactgaaggacgccggctacggcgagaagagcttcttcgcccccgaggaggagaacgaggaggacttccagatgaagatcgacgacgaggtgagaaccgccccctggaacaccaccagagccttcatcgccgccatgaagggcaagtgcctgctggaggtgaccggcgtggccgaccccaccggctgcggcgagggcttcagctacgtgaagatccccaacaagcccacccagcagaaggacgacaaggagccccagcccgtgaagaagaccgtgaccggcaccgacgccgacctgagaagactgagcctgaagaacgccaagcagctgctgagaaagttcggcgtgcccgaggaggagatcaagaagctgagcagatgggaggtgatcgacgtggtgagaaccatgagcaccgagcaggccagaagcggcgagggccccatgagcaagttcgccagaggcagcagattcagcgtggccgagcaccaggagagatacaaggaggagtgccagagaatcttcgacctgcagaacaaggtgctgagcagcaccgaggtgctgagcaccgacaccgacagcagcagcgccgaggacagcgacttcgaggagatgggcaagaacatcgagaacatgctgcagaacaagaagaccagcagccagctgagcagagagagagaggagcaggagagaaaggagctgcagagaatgctgctggccgccggcagcgccgccagcggcaacaaccacagagacgacgacaccgccagcgtgaccagcctgaacagcagcgccaccggcagatgcctgaagatctacagaaccttcagagacgaggagggcaaggagtacgtgagatgcgagaccgtgagaaagcccgccgtgatcgacgcctacgtgagaatcagaaccaccaaggacgaggagttcatcagaaagttcgccctgttcgacgagcagcacagagaggagatgagaaaggagagaagaagaatccaggagcagctgagaagactgaagagaaaccaggagaaggagaagctgaagggcccccccgagaagaagcccaagaagatgaaggagagacccgacctgaagctgaagtgcggcgcctgcggcgccatcggccacatgagaaccaacaagttctgccccctgtactaccagaccaacgccccccccagcaaccccgtggccatgaccgaggagcaggaggaggagctggagaagaccgtgatccacaacgacaacgaggagctgatcaaggtggagggcaccaagatcgtgctgggcaagcagctgatcgagagcgccgacgaggtgagaagaaagagcctggtgctgaagttccccaagcagcagctgccccccaagaagaagagaagagtgggcaccaccgtgcactgcgactacctgaacagaccccacaagagcatccacagaagaagaaccgaccccatggtgaccctgagcagcatcctggagagcatcatcaacgacatgagagacctgcccaacacctaccccttccacacccccgtgaacgccaaggtggtgaaggactactacaagatcatcaccagacccatggacctgcagaccctgagagagaacgtgagaaagagactgtaccccagcagagaggagttcagagagcacctggagctgatcgtgaagaacagcgccacctacaacggccccaagcacagcctgacccagatcagccagagcatgctggacctgtgcgacgagaagctgaaggagaaggaggacaagctggccagactggagaaggccatcaaccccctgctggacgacgacgaccaggtggccttcagcttcatcctggacaacatcgtgacccagaagatgatggccgtgcccgacagctggcccttccaccaccccgtgaacaagaagttcgtgcccgactactacaaggtgatcgtgaaccccatggacctggagaccatcagaaagaacatcagcaagcacaagtaccagagcagagagagcttcctggacgacgtgaacctgatcctggccaacagcgtgaagtacaacggccccgagagccagtacaccaagaccgcccaggagatcgtgaacgtgtgctaccagaccctgaccgagtacgacgagcacctgacccagctggagaaggacatctgcaccgccaaggaggccgccctggaggaggccgagctggagagcctggaccccatgacccccggcccctacaccccccaggccaagccccccgacctgtacgacaccaacaccagcctgagcatgagcagagacgccagcgtgttccaggacgagagcaacatgagcgtgctggacatccccagcgccacccccgagaagcaggtgacccaggagggcgaggacggcgacggcgacctggccgacgaggaggagggcaccgtgcagcagccccaggccagcgtgctgtacgaggacctgctgatgagcgagggcgaggacgacgaggaggacgccggcagcgacgaggagggcgacaaccccttcagcgccatccagctgagcgagagcggcagcgacagcgacgtgggcagcggcggcatcagacccaagcagcccagaatgctgcaggagaacaccagaatggacatggagaacgaggagagcatgatgagctacgagggcgacggcggcgaggccagccacggcctggaggacagcaacatcagctacggcagctacgaggagcccgaccccaagagcaacacccaggacaccagcttcagcagcatcggcggctacgaggtgagcgaggaggaggaggacgaggaggaggaggagcagagaagcggccccagcgtgctgagccaggtgcacctgagcgaggacgaggaggacagcgaggacttccacagcatcgccggcgacagcgacctggacagcgacgagtag

SEQ ID NO: 101748 - DNA, 5721 bp, synthetic construct
  misc_feature 1..5721: note = Description of Artificial Sequence: Synthetic coding sequence
  source 1..5721: mol_type = other DNA
atgggccccggctgcgacctgctgctgagaaccgccgccaccatcaccgccgccgccatcatgagcgacaccgacagcgacgaggacagcgccggcggcggccccttcagcctggccggcttcctgttcggcaacatcaacggcgccggccagctggagggcgagagcgtgctggacgacgagtgcaagaagcacctggccggcctgggcgccctgggcctgggcagcctgatcaccgagctgaccgccaacgaggagctgaccggcaccgacggcgccctggtgaacgacgagggctgggtgagaagcaccgaggacgccgtggactacagcgacatcaacgaggtggccgaggacgagagcagaagataccagcagaccatgggcagcctgcagcccctgtgccacagcgactacgacgaggacgactacgacgccgactgcgaggacatcgactgcaagctgatgcccccccccccccccccccccggccccatgaagaaggacaaggaccaggacagcatcaccggcgagaaggtggacttcagcagcagcagcgacagcgagagcgagatgggcccccaggaggccacccaggccgagagcgaggacggcaagctgaccctgcccctggccggcatcatgcagcacgacgccaccaagctgctgcccagcgtgaccgagctgttccccgagttcagacccggcaaggtgctgagattcctgagactgttcggccccggcaagaacgtgcccagcgtgtggagaagcgccagaagaaagagaaagaagaagcacagagagctgatccaggaggagcagatccaggaggtggagtgcagcgtggagagcgaggtgagccagaagagcctgtggaactacgactacgcccccccccccccccccgagcagtgcctgagcgacgacgagatcaccatgatggcccccgtggagagcaagttcagccagagcaccggcgacatcgacaaggtgaccgacaccaagcccagagtggccgagtggagatacggccccgccagactgtggtacgacatgctgggcgtgcccgaggacggcagcggcttcgactacggcttcaagctgagaaagaccgagcacgagcccgtgatcaagagcagaatgatcgaggagttcagaaagctggaggagaacaacggcaccgacctgctggccgacgagaacttcctgatggtgacccagctgcactgggaggacgacatcatctgggacggcgaggacgtgaagcacaagggcaccaagccccagagagccagcctggccggctggctgcccagcagcatgaccagaaacgccatggcctacaacgtgcagcagggcttcgccgccaccctggacgacgacaagccctggtacagcatcttccccatcgacaacgaggacctggtgtacggcagatgggaggacaacatcatctgggacgcccaggccatgcccagactgctggagccccccgtgctgaccctggaccccaacgacgagaacctgatcctggagatccccgacgagaaggaggaggccaccagcaacagccccagcaaggagagcaagaaggagagcagcctgaagaagagcagaatcctgctgggcaagaccggcgtgatcaaggaggagccccagcagaacatgagccagcccgaggtgaaggacccctggaacctgagcaacgacgagtactactaccccaagcagcagggcctgagaggcaccttcggcggcaacatcatccagcacagcatccccgccgtggagctgagacagcccttcttccccacccacatgggccccatcaagctgagacagttccacagaccccccctgaagaagtacagcttcggcgccctgagccagcccggcccccacagcgtgcagcccctgctgaagcacatcaagaagaaggccaagatgagagagcaggagagacaggccagcggcggcggcgagatgttcttcatgagaaccccccaggacctgaccggcaaggacggcgacctgatcctggccgagtacagcgaggagaacggccccctgatgatgcaggtgggcatggccaccaagatcaagaactactacaagagaaagcccggcaaggaccccggcgcccccgactgcaagtacggcgagaccgtgtactgccacaccagccccttcctgggcagcctgcaccccggccagctgctgcaggccttcgagaacaacctgttcagagcccccatctacctgcacaagatgcccgagaccgacttcctgatcatcagaaccagacagggctactacatcagagagctggtggacatcttcgtggtgggccagcagtgccccctgttcgaggtgcccggccccaacagcaagagagccaacacccacatcagagacttcctgcaggtgttcatctacagactgttctggaagagcaaggacagacccagaagaatcagaatggaggacatcaagaaggccttccccagccacagcgagagcagcatcagaaagagactgaagctgtgcgccgacttcaagagaaccggcatggacagcaactggtgggtgctgaagagcgacttcagactgcccaccgaggaggagatcagagccatggtgagccccgagcagtgctgcgcctactacagcatgatcgccgccgagcagagactgaaggacgccggctacggcgagaagagcttcttcgcccccgaggaggagaacgaggaggacttccagatgaagatcgacgacgaggtgagaaccgccccctggaacaccaccagagccttcatcgccgccatgaagggcaagtgcctgctggaggtgaccggcgtggccgaccccaccggctgcggcgagggcttcagctacgtgaagatccccaacaagcccacccagcagaaggacgacaaggagccccagcccgtgaagaagaccgtgaccggcaccgacgccgacctgagaagactgagcctgaagaacgccaagcagctgctgagaaagttcggcgtgcccgaggaggagatcaagaagctgagcagatgggaggtgatcgacgtggtgagaaccatgagcaccgagcaggccagaagcggcgagggccccatgagcaagttcgccagaggcagcagattcagcgtggccgagcaccaggagagatacaaggaggagtgccagagaatcttcgacctgcagaacaaggtgctgagcagcaccgaggtgctgagcaccgacaccgacagcagcagcgccgaggacagcgacttcgaggagatgggcaagaacatcgagaacatgctgcagaacaagaagaccagcagccagctgagcagagagagagaggagcaggagagaaaggagctgcagagaatgctgctggccgccggcagcgccgccagcggcaacaaccacagagacgacgacaccgccagcgtgaccagcctgaacagcagcgccaccggcagatgcctgaagatctacagaaccttcagagacgaggagggcaaggagtacgtgagatgcgagaccgtgagaaagcccgccgtgatcgacgcctacgtgagaatcagaaccaccaaggacgaggagttcatcagaaagttcgccctgttcgacgagcagcacagagaggagatgagaaaggagagaagaagaatccaggagcagctgagaagactgaagagaaaccaggagaaggagaagctgaagggcccccccgagaagaagcccaagaagatgaaggagagacccgacctgaagctgaagtgcggcgcctgcggcgccatcggccacatgagaaccaacaagttctgccccctgtactaccagaccaacgccccccccagcaaccccgtggccatgaccgaggagcaggaggaggagctggagaagaccgtgatccacaacgacaacgaggagctgatcaaggtggagggcaccaagatcgtgctgggcaagcagctgatcgagagcgccgacgaggtgagaagaaagagcctggtgctgaagttccccaagcagcagctgccccccaagaagaagagaagagtgggcaccaccgtgcactgcgactacctgaacagaccccacaagagcatccacagaagaagaaccgaccccatggtgaccctgagcagcatcctggagagcatcatcaacgacatgagagacctgcccaacacctaccccttccacacccccgtgaacgccaaggtggtgaaggactactacaagatcatcaccagacccatggacctgcagaccctgagagagaacgtgagaaagagactgtaccccagcagagaggagttcagagagcacctggagctgatcgtgaagaacagcgccacctacaacggccccaagcacagcctgacccagatcagccagagcatgctggacctgtgcgacgagaagctgaaggagaaggaggacaagctggccagactggagaaggccatcaaccccctgctggacgacgacgaccaggtggccttcagcttcatcctggacaacatcgtgacccagaagatgatggccgtgcccgacagctggcccttccaccaccccgtgaacaagaagttcgtgcccgactactacaaggtgatcgtgaaccccatggacctggagaccatcagaaagaacatcagcaagcacaagtaccagagcagagagagcttcctggacgacgtgaacctgatcctggccaacagcgtgaagtacaacggccccgagagccagtacaccaagaccgcccaggagatcgtgaacgtgtgctaccagaccctgaccgagtacgacgagcacctgacccagctggagaaggacatctgcaccgccaaggaggccgccctggaggaggccgagctggagagcctggaccccatgacccccggcccctacaccccccagccccccgacctgtacgacaccaacaccagcctgagcatgagcagagacgccagcgtgttccaggacgagagcaacatgagcgtgctggacatccccagcgccacccccgagaagcaggtgacccagatgagacagggcagaggcagactgggcgaggaggacagcgacgtggacatcgagggctacgacgacgaggaggaggacggcaagcccaagacccccgcccccgagggcgaggacggcgacggcgacctggccgacgaggaggagggcaccgtgcagcagccccaggccagcgtgctgtacgaggacctgctgatgagcgagggcgaggacgacgaggaggacgccggcagcgacgaggagggcgacaaccccttcagcgccatccagctgagcgagagcggcagcgacagcgacgtgggcagcggcggcatcagacccaagcagcccagaatgctgcaggagaacaccagaatggacatggagaacgaggagagcatgatgagctacgagggcgacggcggcgaggccagccacggcctggaggacagcaacatcagctacggcagctacgaggagcccgaccccaagagcaacacccaggacaccagcttcagcagcatcggcggctacgaggtgagcgaggaggaggaggacgaggaggaggaggagcagagaagcggccccagcgtgctgagccaggtgcacctgagcgaggacgaggaggacagcgaggacttccacagcatcgccggcgacagcgacctggacagcgacgagtag

SEQ ID NO: 101749 - DNA, 897 bp, synthetic construct
  misc_feature 1..897: note = Description of Artificial Sequence: Synthetic coding sequence
  source 1..897: mol_type = other DNA
atgaccgaggagcaggaggaggagctggagaagaccgtgatccacaacgacaacgaggagctgatcaaggtggagggcaccaagatcgtgctgggcaagcagctgatcgagagcgccgacgaggtgagaagaaagagcctggtgctgaagttccccaagcagcagctgccccccaagaagaagagaagagtgggcaccaccgtgcactgcgactacctgaacagaccccacaagagcatccacagaagaagaaccgaccccatggtgaccctgagcagcatcctggagagcatcatcaacgacatgagagacctgcccaacacctaccccttccacacccccgtgaacgccaaggtggtgaaggactactacaagatcatcaccagacccatggacctgcagaccctgagagagaacgtgagaaagagactgtaccccagcagagaggagttcagagagcacctggagctgatcgtgaagaacagcgccacctacaacggccccaagcacagcctgacccagatcagccagagcatgctggacctgtgcgacgagaagctgaaggagaaggaggacaagctggccagactggagaaggccatcaaccccctgctggacgacgacgaccaggtggccttcagcttcatcctggacaacatcgtgacccagaagatgatggccgtgcccgacagctggcccttccaccaccccgtgaacaagaagttcgtgcccgactactacaaggtgatcgtgaaccccatggacctggagaccatcagaaagaacatcagcaagcacaagtaccagagcagagagagcttcctggacgacgtgaacctgatcctggccaacagcgtgaagtacaacggctacatgtgcaccacctgcagattctag

SEQ ID NO: 101750 - DNA, 657 bp, synthetic construct
  misc_feature 1..657: note = Description of Artificial Sequence: Synthetic coding sequence
  source 1..657: mol_type = other DNA
atgagctgcagcggcagcggcgccgaccccgaggccgcccccgccagcgccgccagcgcccccggccccgccccccccgtgagcgcccccgccgccctgcccagcagcaccgccgccgagaacaaggccagccccgccggcaccgccggcggccccggcgccggcgccgccgccggcggcaccggccccctggccgccagagccggcgagcccgccgagagaagaggcgccgcccccgtgagcgccggcggcgccgccccccccgagggcgccatcagcaacggcgtgtacgtgctgcccagcgccgccaacggcgacgtgaagcccgtggtgagcagcacccccctggtggacttcctgatgcagctggaggactacacccccaccatccccgacgccgtgaccggctactacctgaacagagccggcttcgaggccagcgaccccagaatcatcagactgatcagcctggccgcccagaagttcatcagcgacatcgccaacgacgccctgcagcactgcaagatgaagggcaccgccagcggcagcagcagaagcaagagcaaggacagaaagtacaccctgaccatggaggacctgacccccgccctgagcgagtacggcatcaacgtgaagaagccccactacttcacctag

SEQ ID NO: 101751 - DNA, 636 bp, synthetic construct
  misc_feature 1..636: note = Description of Artificial Sequence: Synthetic coding sequence
  source 1..636: mol_type = other DNA
atggacgacgcccacgagagccccagcgacaagggcggcgagaccggcgagagcgacgagaccgccgccgtgcccggcgaccccggcgccaccgacaccgacggcatccccgaggagaccgacggcgacgccgacgtggacctgaaggaggccgccgccgaggagggcgagctggagagccaggacgtgagcgacctgaccaccgtggagagagaggacagcagcctgctgaaccccgccgccaagaagctgaagatcgacaccaaggagaagaaggagaagaagcagaaggtggacgaggacgagatccagaagatgcagatcctggtgagcagcttcagcgaggagcagctgaacagatacgagatgtacagaagaagcgccttccccaaggccgccatcaagagactgatccagagcatcaccggcaccagcgtgagccagaacgtggtgatcgccatgagcggcatcagcaaggtgttcgtgggcgaggtggtggaggaggccctggacgtgtgcgagaagtggggcgagatgccccccctgcagcccaagcacatgagagaggccgtgagaagactgaagagcaagggccagatccccaacagcaagcacaagaagatcatcttcttctag

SEQ ID NO: 101752 - DNA, 465 bp, synthetic construct
  misc_feature 1..465: note = Description of Artificial Sequence: Synthetic coding sequence
  source 1..465: mol_type = other DNA
atggacgacgcccacgagagccccagcgacaagggcggcgagaccggcgagagcgacgagaccgccgccgtgcccggcgaccccggcgccaccgacaccgacggcatccccgaggagaccgacggcgacgccgacgtggacctgaaggaggccgccgccgaggagggcgagctggagagccaggacgtgagcgacctgaccaccgtggagagagaggacagcagcctgctgaaccccgccgccaagaagctgaagatcgacaccaaggagaagaaggagaagaagcagaaggtggacgaggacgagatccagaagatgcagatcctggtgagcagcttcagcgaggagcagctgaacagatacgagatgtacagaagaagcgccttccccaaggccgccatcaagagacactggatgtgcgtgagaagcggcgagaagtgccaccactacaaccccaacatctag

SEQ ID NO: 101753 - DNA, 486 bp, synthetic construct
  misc_feature 1..486: note = Description of Artificial Sequence: Synthetic coding sequence
  source 1..486: mol_type = other DNA
atgaaccagttcggccccagcgccctgatcaacctgagcaacttcagcagcatcaagcccgagcccgccagcacccccccccagggcagcatggccaacagcaccgccgtggtgaagatccccggcacccccggcgccggcggcagactgagccccgagaacaaccaggtgctgaccaagaagaagctgcaggacctggtgagagaggtggaccccaacgagcagctggacgaggacgtggaggagatgctgctgcagatcgccgacgacttcatcgagagcgtggtgaccgccgcctgccagctggccagacacagaaagagcagcaccctggaggtgaaggacgtgcagctgcacctggagagacagtggaacatgtggatccccggcttcggcagcgaggagatcagaccctacaagaaggcctgcaccaccgaggcccacaagcagagaatggccctgatcagaaagaccaccaagaagtag

SEQ ID NO: 101754 - DNA, 486 bp, synthetic construct; identical to SEQ ID NO: 101753
  misc_feature 1..486: note = Description of Artificial Sequence: Synthetic coding sequence
  source 1..486: mol_type = other DNA

SEQ ID NO: 101755 - DNA, 1779 bp, synthetic construct
  misc_feature 1..1779: note = Description of Artificial Sequence: Synthetic coding sequence
  source 1..1779: mol_type = other DNA
atgagcgacagcggcagctacggccagagcggcggcgagcagcagagctacagcacctacggcaaccccggcagccagggctacggccaggccagccagagctacagcggctacggccagaccaccgacagcagctacggccagaactacagcggctacagcagctacggccagagccagagcggctacagccagagctacggcggctacgagaaccagaagcagagcagctacagccagcagccctacaacaaccagggccagcagcagaacatggagagcagcggcagccagggcggcagagcccccagctacgaccagcccgactacggccagcaggacagctacgaccagcagagcggctacgaccagcaccagggcagctacgacgagcagagcaactacgaccagcagcacgacagctacagccagaaccagcagagctaccacagccagagagagaactacagccaccacacccaggacgacagaagagacgtgagcagatacggcgaggacaacagaggctacggcggcagccagggcggcggcagaggcagaggcggctacgacaaggacggcagaggccccatgaccggcagcagcggcggcgacagaggcggcttcaagaacttcggcggccacagagactacggccccagaaccgacgccgacagcgagagcgacaacagcgacaacaacaccatcttcgtgcagggcctgggcgagggcgtgagcaccgaccaggtgggcgagttcttcaagcagatcggcatcatcaagaccaacaagaagaccggcaagcccatgatcaacctgtacaccgacaaggacaccggcaagcccaagggcgaggccaccgtgagcttcgacgacccccccagcgccaaggccgccatcgactggttcgacggcaaggagttccacggcaacatcatcaaggtgagcttcgccaccagaagacccgagttcatgagaggcggcggcagcggcggcggcagaagaggcagaggcggctacagaggcagaggcggcttccagggcagaggcggcgaccccaagagcggcgactgggtgtgccccaaccccagctgcggcaacatgaacttcgccagaagaaacagctgcaaccagtgcaacgagcccagacccgaggacagcagacccagcggcggcgacttcagaggcagaggctacggcggcgagagaggctacagaggcagaggcggcagaggcggcgacagaggcggctacggcggcgacagaagcggcggcggctacggcggcgacagaagcagcggcggcggctacagcggcgacagaagcggcggcggctacggcggcgacagaagcggcggcggctacggcggcgacagaggcggcggctacggcggcgacagaggcggcggctacggcggcgacagaggcggcggctacggcggcgacagaggcggctacggcggcgacagaggcggcggctacggcggcgacagaggcggctacggcggcgacagaggcggctacggcggcgacagaggcggctacggcggcgacagaggcggctacggcggcgacagaagcagaggcggctacggcggcgacagaggcggcggcagcggctacggcggcgacagaagcggcggctacggcggcgacagaagcggcggcggctacggcggcgacagaggcggcggctacggcggcgacagaggcggctacggcggcaagatgggcggcagaaacgactacagaaacgaccagagaaacagaccctactag

SEQ ID NO: 101756 - DNA, 1779 bp, synthetic construct; identical to SEQ ID NO: 101755
  misc_feature 1..1779: note = Description of Artificial Sequence: Synthetic coding sequence
  source 1..1779: mol_type = other DNA

SEQ ID NO: 101757 - DNA, 1188 bp, synthetic construct
  misc_feature 1..1188: note = Description of Artificial Sequence: Synthetic coding sequence
  source 1..1188: mol_type = other DNA
atgaccggcagcagcggcggcgacagaggcggcttcaagaacttcggcggccacagagactacggccccagaaccgacgccgacagcgagagcgacaacagcgacaacaacaccatcttcgtgcagggcctgggcgagggcgtgagcaccgaccaggtgggcgagttcttcaagcagatcggcatcatcaagaccaacaagaagaccggcaagcccatgatcaacctgtacaccgacaaggacaccggcaagcccaagggcgaggccaccgtgagcttcgacgacccccccagcgccaaggccgccatcgactggttcgacggcaaggagttccacggcaacatcatcaaggtgagcttcgccaccagaagacccgagttcatgagaggcggcggcagcggcggcggcagaagaggcagaggcggctacagaggcagaggcggcttccagggcagaggcggcgaccccaagagcggcgactgggtgtgccccaaccccagctgcggcaacatgaacttcgccagaagaaacagctgcaaccagtgcaacgagcccagacccgaggacagcagacccagcggcggcgacttcagaggcagaggctacggcggcgagagaggctacagaggcagaggcggcagaggcggcgacagaggcggctacggcggcgacagaagcggcggcggctacggcggcgacagaagcagcggcggcggctacagcggcgacagaagcggcggcggctacggcggcgacagaagcggcggcggctacggcggcgacagaggcggcggctacggcggcgacagaggcggcggctacggcggcgacagaggcggcggctacggcggcgacagaggcggctacggcggcgacagaggcggcggctacggcggcgacagaggcggctacggcggcgacagaggcggctacggcggcgacagaggcggctacggcggcgacagaggcggctacggcggcgacagaagcagaggcggctacggcggcgacagaggcggcggcagcggctacggcggcgacagaagcggcggctacggcggcgacagaagcggcggcggctacggcggcgacagaggcggcggctacggcggcgacagaggcggctacggcggcaagatgggcggcagaaacgactacagaaacgaccagagaaacagaccctactag

SEQ ID NO: 101758 - DNA, 2790 bp, synthetic construct
  misc_feature 1..2790: note = Description of Artificial Sequence: Synthetic coding sequence
  source 1..2790: mol_type = other DNA
atgtgcgagagctacagcagaagcctgctgagagtgagcgtggcccagatctgccaggccctgggctgggacagcgtgcagctgagcgcctgccacctgctgaccgacgtgctgcagagatacctgcagcagctgggcagaggctgccacagatacagcgagctgtacggcagaaccgaccccatcctggacgacgtgggcgaggccttccagctgatgggcgtgagcctgcacgagctggaggactacatccacaacatcgagcccgtgaccttcccccaccagatccccagcttccccgtgagcaagaacaacgtgctgcagttcccccagcccggcagcaaggacgccgaggagagaaaggagtacatccccgactacctgccccccatcgtgagcagccaggaggaggaggaggaggagcaggtgcccaccgacggcggcaccagcgccgaggccatgcaggtgcccctggaggaggacgacgagctggaggaggaggagatcatcaacgacgagaacttcctgggcaagagacccctggacagccccgaggccgaggagctgcccgccatgaagagacccagactgctgagcaccaagggcgacaccctggacgtggtgctgctggaggccagagagcccctgagcagcatcaacacccagaagatcccccccatgctgagccccgtgcacgtgcaggacagcaccgacctggccccccccagccccgagccccccatgctggcccccgtggccaagagccagatgcccaccgccaagcccctggagaccaagagcttcacccccaagaccaagaccaagaccagcagccccggccagaagaccaagagccccaagaccgcccagagccccgccatggtgggcagccccatcagaagccccaagaccgtgagcaaggagaagaagagccccggcagaagcaagagccccaagagccccaagagccccaaggtgaccacccacatcccccagacccccgtgagacccgagacccccaacagaacccccagcgccaccctgagcgagaagatcagcaaggagaccatccaggtgaagcagatccagaccccccccgacgccggcaagctgaacagcgagaaccagcccaagaaggccgtggtggccgacaagaccatcgaggccagcatcgacgccgtgatcgccagagcctgcgccgagagagagcccgaccccttcgagttcagcagcggcagcgagagcgagggcgacatcttcaccagccccaagagaatcagcggccccgagtgcaccacccccaaggccagcaccagcgccaacaacttcaccaagagcggcagcacccccctgcccctgagcggcggcaccagcagcagcgacaacagctggaccatggacgccagcatcgacgaggtggtgagaaaggccaagctgggcacccccagcaacatgccccccaacttcccctacatcagcagccccagcgtgagcccccccacccccgagcccctgcacaaggtgtacgaggagaagaccaagctgcccagcagcgtggaggtgaagaagaagctgaagaaggagctgaagaccaagatgaagaagaaggagaagcagagagacagagagagagagaaggacaagaacaaggacaagagcaaggagaaggacaaggtgaaggagaaggagaaggacaaggagaccggcagagagaccaagtacccctggaaggagttcctgaaggaggaggaggccgacccctacaagttcaagatcaaggagttcgaggacgtggaccccaaggtgaagctgaaggacggcctggtgagaaaggagaaggagaagcacaaggacaagaagaaggacagagagaagggcaagaaggacaaggacaagagagagaaggagaaggtgaaggacaagggcagagaggacaagatgaaggcccccgccccccccctggtgctgccccccaaggagctggccctgcccctgttcagccccgccaccgccagcagagtgcccgccatgctgcccagcctgctgcccgtgctgcccgagaagctgttcgaggagaaggagaaggtgaaggagaaggagaagaagaaggacaagaaggagaagaagaagaagaaggagaaggagaaggagaagaaggagaaggagagagagaaggagaagagagagagagagaagagagagaaggagaaggagaagcacaagcacgagaagatcaaggtggagcccgtggccctggcccccagccccgtgatccccagactgaccctgagagtgggcgccggccaggacaagatcgtgatcagcaaggtggtgcccgcccccgaggccaagcccgcccccagccagaacagacccaagacccccccccccgcccccgcccccgcccccggccccatgctggtgagccccgcccccgtgcccctgcccctgctggcccaggccgccgccggccccgccctgctgcccagccccggccccgccgccagcggcgccagcgccaaggcccccgtgagaagcgtggtgaccgagaccgtgagcacctacgtgatcagagacgagtggggcaaccagatctggatctgccccggctgcaacaagcccgacgacggcagccccatgatcggctgcgacgactgcgacgactggtaccactggccctgcgtgggcatcatgaccgccccccccgaggagatgcagtggttctgccccaagtgcgccaacaagaagaaggacaagaagcacaagaagagaaagcacagagcccactag

SEQ ID NO: 101759 - DNA, 852 bp, synthetic construct
  misc_feature 1..852: note = Description of Artificial Sequence: Synthetic coding sequence
  source 1..852: mol_type = other DNA
atgtgcgagagctacagcagaagcctgctgagagtgagcgtggcccagatctgccaggccctgggctgggacagcgtgcagctgagcgcctgccacctgctgaccgacgtgctgcagagatacctgcagcagctgggcagaggctgccacagatacagcgagctgtacggcagaaccgaccccatcctggacgacgtgggcgaggccttccagctgatgggcgtgagcctgcacgagctggaggactacatccacaacatcgagcccgtgaccttcccccaccagatccccagcttccccgtgagcaagaacaacgtgctgcagttcccccagcccggcagcaaggacgccgaggagagaaaggagtacatccccgactacctgccccccatcgtgagcagccaggaggaggaggaggaggagcaggtgcccaccgacggcggcaccagcgccgaggccatgcaggtgcccctggaggaggacgacgagctggaggaggaggagatcatcaacgacgagaacttcctgggcaagagacccctggacagccccgaggccgaggagctgcccgccatgaagagacccagactgctgagcaccaagggcgacaccctggacgtggtgctgctggaggccagagagcccctgagcagcatcaacacccagaagatcccccccatgctgagccccgtgcacgtgcaggacagcaccgacctggccccccccagccccgagccccccatgctggcccccgtggccaagagccagatgcccaccgccaagcccctggagaccaagagcttcacccccaagaccaagaccaagaagaagaagaagaagaagaagagctag

SEQ ID NO: 101760 - DNA, 3258 bp, synthetic construct
  misc_feature 1..3258: note = Description of Artificial Sequence: Synthetic coding sequence
  source 1..3258: mol_type = other DNA
atggccgccggcagcgacctgctggacgaggtgttcttcaacagcgaggtggacgagaaggtggtgagcgacctggtgggcagcctggagagccagctggccgccagcgccgcccaccaccaccacctggcccccagaacccccgaggtgagagccgccgccgccggcgccctgggcaaccacgtggtgagcggcagccccgccggcgccgccggcgccggccccgccgcccccgccgagggcgcccccggcgccgcccccgagcccccccccgccggcagagccagacccggcggcggcggcccccagagacccggcccccccagccccagaagacccctggtgcccgccggccccgccccccccgccgccaagctgagacccccccccgagggcagcgccggcagctgcgcccccgtgcccgccgccgccgccgtggccgccggccccgagcccgcccccgccggccccgccaagcccgccggccccgccgccctggccgccagagccggccccggccccggccccggccccggccccggccccggccccggccccggcaagcccgccggccccggcgccgcccagaccctgaacggcagcgccgccctgctgaacagccaccacgccgccgcccccgccgtgagcctggtgaacaacggccccgccgccctgctgcccctgcccaagcccgccgcccccggcaccgtgatccagaccccccccttcgtgggcgccgccgccccccccgcccccgccgcccccagcccccccgccgcccccgcccccgccgcccccgccgccgccccccccccccccccccccgcccccgccaccctggccagaccccccggccaccccgccggcccccccaccgccgcccccgccgtgcccccccccgccgccgcccagaacggcggcagcgccggcgccgcccccgcccccgcccccgccgccggcggccccgccggcgtgagcggccagcccggccccggcgccgccgccgccgcccccgcccccggcgtgaaggccgagagccccaagagagtggtgcaggccgccccccccgccgcccagaccctggccgccagcggccccgccagcaccgccgccagcatggtgatcggccccaccatgcagggcgccctgcccagccccgccgccgtgcccccccccgcccccggcacccccaccggcctgcccaagggcgccgccggcgccgtgacccagagcctgagcagaacccccaccgccaccaccagcggcatcagagccaccctgacccccaccgtgctggcccccagactgccccagcccccccagaaccccaccaacatccagaacttccagctgccccccggcatggtgctggtgagaagcgagaacggccagctgctgatgatcccccagcaggccctggcccagatgcaggcccaggcccacgcccagccccagaccaccatggcccccagacccgccacccccaccagcgccccccccgtgcagatcagcaccgtgcaggcccccggcacccccatcatcgccagacaggtgacccccaccaccatcatcaagcaggtgagccaggcccagaccaccgtgcagcccagcgccaccctgcagagaagccccggcgtgcagccccagctggtgctgggcggcgccgcccagaccgccagcctgggcaccgccaccgccgtgcagaccggcaccccccagagaaccgtgcccggcgccaccaccaccagcagcgccgccaccgagaccatggagaacgtgaagaagtgcaagaacttcctgagcaccctgatcaagctggccagcagcggcaagcagagcaccgagaccgccgccaacgtgaaggagctggtgcagaacctgctggacggcaagatcgaggccgaggacttcaccagcagactgtacagagagctgaacagcagcccccagccctacctggtgcccttcctgaagagaagcctgcccgccctgagacagctgacccccgacagcgccgccttcatccagcagagccagcagcagccccccccccccaccagccaggccaccaccgccctgaccgccgtggtgctgagcagcagcgtgcagagaaccgccggcaagaccgccgccaccgtgaccagcgccctgcagccccccgtgctgagcctgacccagcccacccaggtgggcgtgggcaagcagggccagcccacccccctggtgatccagcagccccccaagcccggcgccctgatcagacccccccaggtgaccctgacccagacccccatggtggccctgagacagccccacaacagaatcatgctgaccaccccccagcagatccagctgaaccccctgcagcccgtgcccgtggtgaagcccgccgtgctgcccggcaccaaggccctgagcgccgtgagcgcccaggccgccgccgcccagaagaacaagctgaaggagcccggcggcggcagcttcagagacgacgacgacatcaacgacgtggccagcatggccggcgtgaacctgagcgaggagagcgccagaatcctggccaccaacagcgagctggtgggcaccctgaccagaagctgcaaggacgagaccttcctgctgcaggcccccctgcagagaagaatcctggagatcggcaagaagcacggcatcaccgagctgcaccccgacgtggtgagctacgtgagccacgccacccagcagagactgcagaacctggtggagaagatcagcgagaccgcccagcagaagaacttcagctacaaggacgacgacagatacgagcaggccagcgacgtgagagcccagctgaagttcttcgagcagctggaccagatcgagaagcagagaaaggacgagcaggagagagagatcctgatgagagccgccaagagcagaagcagacaggaggaccccgagcagctgagactgaagcagaaggccaaggagatgcagcagcaggagctggcccagatgagacagagagacgccaacctgaccgccctggccgccatcggccccagaaagaagagaaaggtggactgccccggccccggcagcggcgccgagggcagcggccccggcagcgtggtgcccggcagcagcggcgtgggcacccccagacagttcaccagacagagaatcaccagagtgaacctgagagacctgatcttctgcctggagaacgagagagagaccagccacagcctgctgctgtacaaggccttcctgaagtag

SEQ ID NO: 101761 - DNA, 2850 bp, synthetic construct
  misc_feature 1..2850: note = Description of Artificial Sequence: Synthetic coding sequence
  source 1..2850: mol_type = other DNA
ggcagaggcctgctgcagcagagaggcggcagagagagcggccccgccccccccgccgccaagctgagacccccccccgagggcagcgccggcagctgcgcccccgtgcccgccgccgccgccgtggccgccggccccgagcccgcccccgccggccccgccaagcccgccggccccgccgccctggccgccagagccggccccggccccggccccggccccggccccggccccggccccggccccggcaagcccgccggccccggcgccgcccagaccctgaacggcagcgccgccctgctgaacagccaccacgccgccgcccccgccgtgagcctggtgaacaacggccccgccgccctgctgcccctgcccaagcccgccgcccccgccgccgccccccccccccccccccccgcccccgccaccctggccagaccccccggccaccccgccggcccccccaccgccgcccccgccgtgcccccccccgccgccgcccagaacggcggcagcgccggcgccgcccccgcccccgcccccgccgccggcggccccgccggcgtgagcggccagcccggccccggcgccgccgccgccgcccccgcccccggcgtgaaggccgagagccccaagagagtggtgcaggccgccccccccgccgcccagaccctggccgccagcggccccgccagcaccgccgccagcatggtgatcggccccaccatgcagggcgccctgcccagccccgccgccgtgcccccccccgcccccggcacccccaccggcctgcccaagggcgccgccggcgccgtgacccagagcctgagcagaacccccaccgccaccaccagcggcatcagagccaccctgacccccaccgtgctggcccccagactgccccagcccccccagaaccccaccaacatccagaacttccagctgccccccggcatggtgctggtgagaagcgagaacggccagctgctgatgatcccccagcaggccctggcccagatgcaggcccaggcccacgcccagccccagaccaccatggcccccagacccgccacccccaccagcgccccccccgtgcagatcagcaccgtgcaggcccccggcacccccatcatcgccagacaggtgacccccaccaccatcatcaagcaggtgagccaggcccagaccaccgtgcagcccagcgccaccctgcagagaagccccggcgtgcagccccagctggtgctgggcggcgccgcccagaccgccagcctgggcaccgccaccgccgtgcagaccggcaccccccagagaaccgtgcccggcgccaccaccaccagcagcgccgccaccgagaccatggagaacgtgaagaagtgcaagaacttcctgagcaccctgatcaagctggccagcagcggcaagcagagcaccgagaccgccgccaacgtgaaggagctggtgcagaacctgctggacggcaagatcgaggccgaggacttcaccagcagactgtacagagagctgaacagcagcccccagccctacctggtgcccttcctgaagagaagcctgcccgccctgagacagctgacccccgacagcgccgccttcatccagcagagccagcagcagccccccccccccaccagccaggccaccaccgccctgaccgccgtggtgctgagcagcagcgtgcagagaaccgccggcaagaccgccgccaccgtgaccagcgccctgcagccccccgtgctgagcctgacccagcccacccaggtgggcgtgggcaagcagggccagcccacccccctggtgatccagcagccccccaagcccggcgccctgatcagacccccccaggtgaccctgacccagacccccatggtggccctgagacagccccacaacagaatcatgctgaccaccccccagcagatccagctgaaccccctgcagcccgtgcccgtggtgaagcccgccgtgctgcccggcaccaaggccctgagcgccgtgagcgcccaggccgccgccgcccagaagaacaagctgaaggagcccggcggcggcagcttcagagacgacgacgacatcaacgacgtggccagcatggccggcgtgaacctgagcgaggagagcgccagaatcctggccaccaacagcgagctggtgggcaccctgaccagaagctgcaaggacgagaccttcctgctgcaggcccccctgcagagaagaatcctggagatcggcaagaagcacggcatcaccgagctgcaccccgacgtggtgagctacgtgagccacgccacccagcagagactgcagaacctggtggagaagatcagcgagaccgcccagcagaagaacttcagctacaaggacgacgacagatacgagcaggccagcgacgtgagagcccagctgaagttcttcgagcagctggaccagatcgagaagcagagaaaggacgagcaggagagagagatcctgatgagagccgccaagagcagaagcagacaggaggaccccgagcagctgagactgaagcagaaggccaaggagatgcagcagcaggagctggcccagatgagacagagagacgccaacctgaccgccctggccgccatcggccccagaaagaagagaaaggtggactgccccggccccggcagcggcgccgagggcagcggccccggcagcgtggtgcccggcagcagcggcgtgggcacccccagacagttcaccagacagagaatcaccagagtgaacctgagagacctgatcttctgcctggagaacgagagagagaccagccacagcctgctgctgtacaaggccttcctgaagtag

SEQ ID NO: 101762 - DNA, 2589 bp, synthetic construct
  misc_feature 1..2589: note = Description of Artificial Sequence: Synthetic coding sequence
  source 1..2589: mol_type = other DNA
atgcccgccggcctgaccgagcccgccggcgccgccccccccgccgccgtgagcgccagcggcaccgtgaccatggcccccgccggcgccctgcccgtgagagtggagagcacccccgtggccctgggcgccgtgaccaaggcccccgtgagcgtgtgcgtggagcccaccgccagccagcccctgagaagccccgtgggcaccctggtgaccaaggtggcccccgtgagcgccccccccaaggtgagcagcggccccagactgcccgccccccagatcgtggccgtgaaggcccccaacaccaccaccatccagttccccgccaacctgcagctgccccccggcaccgtgctgatcaagagcaacagcggccccctgatgctggtgagcccccagcagaccgtgaccagagccgagaccaccagcaacatcaccagcagacccgccgtgcccgccaacccccagaccgtgaagatctgcaccgtgcccaacagcagcagccagctgatcaagaaggtggccgtgacccccgtgaagaagctggcccagatcggcaccaccgtggtgaccaccgtgcccaagcccagcagcgtgcagagcgtggccgtgcccaccagcgtggtgaccgtgacccccggcaagcccctgaacaccgtgaccaccctgaagcccagcagcctgggcgccagcagcacccccagcaacgagcccaacctgaaggccgagaacagcgccgccgtgcagatcaacctgagccccaccatgctggagaacgtgaagaagtgcaagaacttcctggccatgctgatcaagctggcctgcagcggcagccagagccccgagatgggccagaacgtgaagaagctggtggagcagctgctggacgccaagatcgaggccgaggagttcaccagaaagctgtacgtggagctgaagagcagcccccagccccacctggtgcccttcctgaagaagagcgtggtggccctgagacagctgctgcccaacagccagagcttcatccagcagtgcgtgcagcagaccagcagcgacatggtgatcgccacctgcaccaccaccgtgaccaccagccccgtggtgaccaccaccgtgagcagcagccagagcgagaagagcatcatcgtgagcggcgccaccgcccccagaaccgtgagcgtgcagaccctgaaccccctggccggccccgtgggcgccaaggccggcgtggtgaccctgcacagcgtgggccccaccgccgccaccggcggcaccaccgccggcaccggcctgctgcagaccagcaagcccctggtgaccagcgtggccaacaccgtgaccaccgtgagcctgcagcccgagaagcccgtggtgagcggcaccgccgtgaccctgagcctgcccgccgtgaccttcggcgagaccagcggcgccgccatctgcctgcccagcgtgaagcccgtggtgagcagcgccggcaccaccagcgacaagcccgtgatcggcacccccgtgcagatcaagctggcccagcccggccccgtgctgagccagcccgccggcatcccccaggccgtgcaggtgaagcagctggtggtgcagcagcccagcggcggcaacgagaagcaggtgaccaccatcagccacagcagcaccctgaccatccagaagtgcggccagaagaccatgcccgtgaacaccatcatccccaccagccagttcccccccgccagcatcctgaagcagatcaccctgcccggcaacaagatcctgagcctgcaggccagccccacccagaagaacagaatcaaggagaacgtgaccagctgcttcagagacgaggacgacatcaacgacgtgaccagcatggccggcgtgaacctgaacgaggagaacgcctgcatcctggccaccaacagcgagctggtgggcaccctgatccagagctgcaaggacgagcccttcctgttcatcggcgccctgcagaagagaatcctggacatcggcaagaagcacgacatcaccgagctgaacagcgacgccgtgaacctgatcagccaggccacccaggagagactgagaggcctgctggagaagctgaccgccatcgcccagcacagaatgaccacctacaaggccagcgagaactacatcctgtgcagcgacaccagaagccagctgaagttcctggagaagctggaccagctggagaagcagagaaaggacctggaggagagagagatgctgctgaaggccgccaagagcagaagcaacaaggaggaccccgagcagctgagactgaagcagaaggccaaggagctgcagcagctggagctggcccagatccagcacagagacgccaacctgaccgccctggccgccatcggccccagaaagaagagacccctggagagcggcatcgagggcctgaaggacaacctgctggccagcggcaccagcagcctgaccgccaccaagcagctgcacagacccagaatcaccagaatctgcctgagagacctgatcttctgcatggagcaggagagagagatgaagtacagcagagccctgtacctggccctgctgaagtag

SEQ ID NO: 101763 - DNA, 1857 bp, synthetic construct
  misc_feature 1..1857: note = Description of Artificial Sequence: Synthetic coding sequence
  source 1..1857: mol_type = other DNA
atgcccgccggcctgaccgagcccgccggcgccgccccccccgccgccgtgagcgccagcggcaccgtgaccatggcccccgccggcgccctgcccgtgagagtggagagcacccccgtggccctgggcgccgtgaccaaggcccccgtgagcgtgtgcgtggagcccaccgccagccagcccctgagaagccccgtgggcaccctggtgaccaaggtggcccccgtgagcgccccccccaaggtgagcagcggccccagactgcccgccccccagatcgtggccgtgaaggcccccaacaccaccaccatccagttccccgccaacctgcagctgccccccggcaccgtgctgatcaagagcaacagcggccccctgatgctggtgagcccccagcagaccgtgaccagagccgagaccaccagcaacatcaccagcagacccgccgtgcccgccaacccccagaccgtgaagatctgcaccgtgcccaacagcagcagccagctgatcaagaaggtggccgtgacccccgtgaagaagctggcccagatcggcaccaccgtggtgaccaccgtgcccaagcccagcagcgtgcagagcgtggccgtgcccaccagcgtggtgaccgtgacccccggcaagcccctgaacaccgtgaccaccctgaagcccagcagcctgggcgccagcagcacccccagcaacgagcccaacctgaaggccgagaacagcgccgccgtgcagatcaacctgagccccaccatgctggagaacgtgaagaagtgcaagaacttcctggccatgctgatcaagctggcctgcagcggcagccagagccccgagatgggccagaacgtgaagaagctggtggagcagctgctggacgccaagatcgaggccgaggagttcaccagaaagctgtacgtggagctgaagagcagcccccagccccacctggtgcccttcctgaagaagagcgtggtggccctgagacagctgctgcccaacagccagagcttcatccagcagtgcgtgcagcagaccagcagcgacatggtgatcgccacctgcaccaccaccgtgaccaccagccccgtggtgaccaccaccgtgagcagcagccagagcgagaagagcatcatcgtgagcggcgccaccgcccccagaaccgtgagcgtgcagaccctgaaccccctggccggccccgtgggcgccaaggccggcgtggtgaccctgcacagcgtgggccccaccgccgccaccggcggcaccaccgccggcaccggcctgctgcagaccagcaagcccctggtgaccagcgtggccaacaccgtgaccaccgtgagcctgcagcccgagaagcccgtggtgagcggcaccgccgtgaccctgagcctgcccgccgtgaccttcggcgagaccagcggcgccgccatctgcctgcccagcgtgaagcccgtggtgagcagcgccggcaccaccagcgacaagcccgtgatcggcacccccgtgcagatcaagctggcccagcccggccccgtgctgagccagcccgccggcatcccccaggccgtgcaggtgaagcagctggtggtgcagcagcccagcggcggcaacgagaagcaggtgaccaccatcagccacagcagcaccctgaccatccagaagtgcggccagaagaccatgcccgtgaacaccatcatccccaccagccagttcccccccgccagcatcctgaagcagatcaccctgcccggcaacaagatcctgagcctgcaggccagccccacccagaagaacagaatcaaggagaacgtgaccagctgcttcagaagcaccttcatctgcgtgtactag

SEQ ID NO: 101764 - DNA, 2598 bp, synthetic construct
  misc_feature 1..2598: note = Description of Artificial Sequence: Synthetic coding sequence
  source 1..2598: mol_type = other DNA
atgcccgccggcctgaccgagcccgccggcgccgccccccccgccgccgtgagcgccagcggcaccgtgaccatggcccccgccggcgccctgcccgtgagagtggagagcacccccgtggccctgggcgccgtgaccaaggcccccgtgagcgtgtgcgtggagcccaccgccagccagcccctgagaagccccgtgggcaccctggtgaccaaggtggcccccgtgagcgccccccccaaggtgagcagcggccccagactgcccgccccccagatcgtggccgtgaaggcccccaacaccaccaccatccagttccccgccaacctgcagctgccccccggcaccgtgctgatcaagagcaacagcggccccctgatgctggtgagcccccagcagaccgtgaccagagccgagaccaccagcaacatcaccagcagacccgccgtgcccgccaacccccagaccgtgaagatctgcaccgtgcccaacagcagcagccagctgatcaagaaggtggccgtgacccccgtgaagaagctggcccagatcggcaccaccgtggtgaccaccgtgcccaagcccagcagcgtgcagagcgtggccgtgcccaccagcgtggtgaccgtgacccccggcaagcccctgaacaccgtgaccaccctgaagcccagcagcctgggcgccagcagcacccccagcaacgagcccaacctgaaggccgagaacagcgccgccgtgcagatcaacctgagccccaccatgctggagaacgtgaagaagtgcaagaacttcctggccatgctgatcaagctggcctgcagcggcagccagagccccgagatgggccagaacgtgaagaagctggtggagcagctgctggacgccaagatcgaggccgaggagttcaccagaaagctgtacgtggagctgaagagcagcccccagccccacctggtgcccttcctgaagaagagcgtggtggccctgagacagctgctgcccaacagccagagcttcatccagcagtgcgtgcagcagaccagcagcgacatggtgatcgccacctgcaccaccaccgtgaccaccagccccgtggtgaccaccaccgtgagcagcagccagagcgagaagagcatcatcgtgagcggcgccaccgcccccagaaccgtgagcgtgcagaccctgaaccccctggccggccccgtgggcgccaaggccggcgtggtgaccctgcacagcgtgggccccaccgccgccaccggcggcaccaccgccggcaccggcctgctgcagaccagcaagcccctggtgaccagcgtggccaacaccgtgaccaccgtgagcctgcagcccgagaagcccgtggtgagcggcaccgccgtgaccctgagcctgcccgccgtgaccttcggcgagaccagcggcgccgccatctgcctgcccagcgtgaagcccgtggtgttctgctgggaccacatcaagcccgtgatcggcacccccgtgcagatcaagctggcccagcccggccccgtgctgagccagcccgccggcatcccccaggccgtgcaggtgaagcagctgttcagcctgttccaggtggtgcagcagcccagcggcggcaacgagaagcaggtgaccaccatcagccacagcagcaccctgaccatccagaagtgcggccagaagaccatgcccgtgaacaccatcatccccaccagccagttcccccccgccagcatcctgaagcagatcaccctgcccggcaacaagatcctgagcctgcaggccagccccacccagaagaacagaatcaaggagaacgtgaccagctgcttcagagacgaggacgacatcaacgacgtgaccagcatggccggcgtgaacctgaacgaggagaacgcctgcatcctggccaccaacagcgagctggtgggcaccctgatccagagctgcaaggacgagcccttcctgttcatcggcgccctgcagaagagaatcctggacatcggcaagaagcacgacatcaccgagctgaacagcgacgccgtgaacctgatcagccaggccacccaggagagactgagaggcctgctggagaagctgaccgccatcgcccagcacagaatgaccacctacaaggccagcgagaactacatcctgtgcagcgacaccagaagccagctgaagttcctggagaagctggaccagctggagaagcagagaaaggacctggaggagagagagatgctgctgaaggccgccaagagcagaagcaacaaggaggaccccgagcagctgagactgaagcagaaggccaaggagctgcagcagctggagctggcccagatccagcacagagacgccaacctgaccgccctggccgccatcggccccagaaagaagagacccctggagagcggcatcgagggcctgaaggacaacctgctggccagcggcaccagcagcctgaccgccaccaagcagctgcacagacccagaatcaccagaatctgcctgagagacctgatcttctgcatggagcaggagagagagatgaagtacagcagagccctgtacctggccctgctgaagtag

SEQ ID NO: 101765 - DNA, 2238 bp, synthetic construct
  misc_feature 1..2238: note = Description of Artificial Sequence: Synthetic coding sequence
  source 1..2238: mol_type = other DNA
atggccgccctggccgaggagcagaccgaggtggccgtgaagctggagcccgagggcccccccaccctgctgcccccccaggccggcgacggcgccggcgagggcagcggcggcaccaccaacaacggccccaacggcggcggcggcaacgtggccgccagcagcagcaccggcggcgacggcggcacccccaagcccaccgtggccgtgagcgccgccgcccccgccggcgccgcccccgtgcccgccgccgcccccgacgccggcgccccccacgacagacagaccctgctggccgtgctgcagttcctgagacagagcaagctgagagaggccgaggaggccctgagaagagaggccggcctgctggaggaggccgtggccggcagcggcgcccccggcgaggtggacagcgccggcgccgaggtgaccagcgccctgctgagcagagtgaccgccagcgcccccggccccgccgcccccgacccccccggcaccggcgccagcggcgccaccgtggtgagcggcagcgccagcggccccgccgcccccggcaaggtgggcagcgtggccgtggaggaccagcccgacgtgagcgccgtgctgagcgcctacaaccagcagggcgaccccaccatgtacgaggagtactacagcggcctgaagcacttcatcgagtgcagcctggactgccacagagccgagctgagccagctgttctaccccctgttcgtgcacatgtacctggagctggtgtacaaccagcacgagaacgaggccaagagcttcttcgagaagttccacggcgaccaggagtgctactaccaggacgacctgagagtgctgagcagcctgaccaagaaggagcacatgaagggcaacgagaccatgctggacttcagaaccagcaagttcgtgctgagaatcagcagagacagctaccagctgctgaagagacacctgcaggagaagcagaacaaccagatctggaacatcgtgcaggagcacctgtacatcgacatcttcgacggcatgcccagaagcaagcagcagatcgacgccatggtgggcagcctggccggcgaggccaagagagaggccaacaagagcaaggtgttcttcggcctgctgaaggagcccgagatcgaggtgcccctggacgacgaggacgaggagggcgagaacgaggagggcaagcccaagaagaagaagcccaagaaggacagcatcggcagcaagagcaagaagcaggaccccaacgcccccccccagaacagaatccccctgcccgagctgaaggacagcgacaagctggacaagatcatgaacatgaaggagaccaccaagagagtgagactgggccccgactgcctgcccagcatctgcttctacaccttcctgaacgcctaccagggcctgaccgccgtggacgtgaccgacgacagcagcctgatcgccggcggcttcgccgacagcaccgtgagagtgtggagcgtgacccccaagaagctgagaagcgtgaagcaggccagcgacctgagcctgatcgacaaggagagcgacgacgtgctggagagaatcatggacgagaagaccgccagcgagctgaagatcctgtacggccacagcggccccgtgtacggcgccagcttcagccccgacagactgtgggccaccgaccactaccagcccctgagaatcttcgccggccacctggccgacgtgaactgcaccagattccaccccaacagcaactacgtggccaccggcagcgccgacagaaccgtgagactgtgggacgtgctgaacggcaactgcgtgagaatcttcaccggccacaagggccccatccacagcctgaccttcagccccaacggcagattcctggccaccggcgccaccgacggcagagtgctgctgtgggacatcggccacggcctgatggtgggcgagctgaagggccacaccgacaccgtgtgcagcctgagattcagcagagacggcgagatcctggccagcggcagcatggacaacaccgtgagactgtgggacgccatcaaggccttcgaggacctggagaccgacgacttcaccaccgccaccggccacatcaacctgcccgagaacagccaggagctgctgctgggcacctacatgaccaagagcacccccgtggtgcacctgcacttcaccagaagaaacctggtgctggccgccggcgcctacagcccccagtag

SEQ ID NO: 101766 - DNA, 2403 bp, synthetic construct
  misc_feature 1..2403: note = Description of Artificial Sequence: Synthetic coding sequence
  source 1..2403: mol_type = other DNA
atggccgccctggccgaggagcagaccgaggtggccgtgaagctggagcccgagggcccccccaccctgctgcccccccaggccggcgacggcgccggcgagggcagcggcggcaccaccaacaacggccccaacggcggcggcggcaacgtggccgccagcagcagcaccggcggcgacggcggcacccccaagcccaccgtggccgtgagcgccgccgcccccgccggcgccgcccccgtgcccgccgccgcccccgacgccggcgccccccacgacagacagaccctgctggccgtgctgcagttcctgagacagagcaagctgagagaggccgaggaggccctgagaagagaggccggcctgctggaggaggccgtggccggcagcggcgcccccggcgaggtggacagcgccggcgccgaggtgaccagcgccctgctgagcagagtgaccgccagcgcccccggccccgccgcccccgacccccccggcaccggcgccagcggcgccaccgtggtgagcggcagcgccagcggccccgccgcccccggcaaggtgggcagcgtggccgtggaggaccagcccgacgtgagcgccgtgctgagcgcctacaaccagcagggcgaccccaccatgtacgaggagtactacagcggcctgaagcacttcatcgagtgcagcctggactgccacagagccgagctgagccagctgttctaccccctgttcgtgcacatgtacctggagctggtgtacaaccagcacgagaacgaggccaagagcttcttcgagaagttccacggcgaccaggagtgctactaccaggacgacctgagagtgctgagcagcctgaccaagaaggagcacatgaagggcaacgagaccatgctggacttcagaaccagcaagttcgtgctgagaatcagcagagacagctaccagctgctgaagagacacctgcaggagaagcagaacaaccagatctggaacatcgtgcaggagcacctgtacatcgacatcttcgacggcatgcccagaagcaagcagcagatcgacgccatggtgggcagcctggccggcgaggccaagagagaggccaacaagagcaaggtgttcttcggcctgctgaaggagcccgagatcgaggtgcccctggacgacgaggacgaggagggcgagaacgaggagggcaagcccaagaagaagaagcccaagaaggacagcatcggcagcaagagcaagaagcaggaccccaacgcccccccccagaacagaatccccctgcccgagctgaaggacagcgacaagctggacaagatcatgaacatgaaggagaccaccaagagagtgagactgggccccgactgcctgcccagcatctgcttctacaccttcctgaacgcctaccagggcctgaccgccgtggacgtgaccgacgacagcagcctgatcgccggcggcttcgccgacagcaccgtgagagtgtggagcgtgacccccaagaagctgagaagcgtgaagcaggccagcgacctgagcctgatcgacaaggagagcgacgacgtgctggagagaatcatggacgagaagaccgccagcgagctgaagatcctgtacggccacagcggccccgtgtacggcgccagcttcagccccgacagaaactacctgctgagcagcagcgaggacggcaccgtgagactgtggagcctgcagaccttcacctgcctggtgggctacaagggccacaactaccccgtgtgggacacccagttcagcccctacggctactacttcgtgagcggcggccacgacagagtggccagactgtgggccaccgaccactaccagcccctgagaatcttcgccggccacctggccgacgtgaactgcaccagattccaccccaacagcaactacgtggccaccggcagcgccgacagaaccgtgagactgtgggacgtgctgaacggcaactgcgtgagaatcttcaccggccacaagggccccatccacagcctgaccttcagccccaacggcagattcctggccaccggcgccaccgacggcagagtgctgctgtgggacatcggccacggcctgatggtgggcgagctgaagggccacaccgacaccgtgtgcagcctgagattcagcagagacggcgagatcctggccagcggcagcatggacaacaccgtgagactgtgggacgccatcaaggccttcgaggacctggagaccgacgacttcaccaccgccaccggccacatcaacctgcccgagaacagccaggagctgctgctgggcacctacatgaccaagagcacccccgtggtgcacctgcacttcaccagaagaaacctggtgctggccgccggcgcctacagcccccagtag

SEQ ID NO: 101767 - DNA, 2034 bp, synthetic construct
  misc_feature 1..2034: note = Description of Artificial Sequence: Synthetic coding sequence
  source 1..2034: mol_type = other DNA
atggccgaggagaagaagctgaagctgagcaacaccgtgctgcccagcgagagcatgaaggtggtggccgagagcatgggcatcgcccagatccaggaggagacctgccagctgctgaccgacgaggtgagctacagaatcaaggagatcgcccaggacgccctgaagttcatgcacatgggcaagagacagaagctgaccaccagcgacatcgactacgccctgaagctgaagaacgtggagcccctgtacggcttccacgcccaggagttcatccccttcagattcgccagcggcggcggcagagagctgtacttctacgaggagaaggaggtggacctgagcgacatcatcaacacccccctgcccagagtgcccctggacgtgtgcctgaaggcccactggctgagcatcgagggctgccagcccgccatccccgagaaccccccccccgcccccaaggagcagcagaaggccgaggccaccgagcccctgaagagcgccaagcccggccaggaggaggacggccccctgaagggcaagggccagggcgccaccaccgccgacggcaagggcaaggagaagaaggccccccccctgctggagggcgcccccctgagactgaagcccagaagcatccacgagctgagcgtggagcagcagctgtactacaaggagatcaccgaggcctgcgtgggcagctgcgaggccaagagagccgaggccctgcagagcatcgccaccgaccccggcctgtaccagatgctgcccagattcagcaccttcatcagcgagggcgtgagagtgaacgtggtgcagaacaacctggccctgctgatctacctgatgagaatggtgaaggccctgatggacaaccccaccctgtacctggagaagtacgtgcacgagctgatccccgccgtgatgacctgcatcgtgagcagacagctgtgcctgagacccgacgtggacaaccactgggccctgagagacttcgccgccagactggtggcccagatctgcaagcacttcagcaccaccaccaacaacatccagagcagaatcaccaagaccttcaccaagagctgggtggacgagaagaccccctggaccaccagatacggcagcatcgccggcctggccgagctgggccacgacgtgatcaagaccctgatcctgcccagactgcagcaggagggcgagagaatcagaagcgtgctggacggccccgtgctgagcaacatcgacagaatcggcgccgaccacgtgcagagcctgctgctgaagcactgcgcccccgtgctggccaagctgagacccccccccgacaaccaggacgcctacagagccgagttcggcagcctgggccccctgctgtgcagccaggtggtgaaggccagagcccaggccgccctgcaggcccagcaggtgaacagaaccaccctgaccatcacccagcccagacccaccctgaccctgagccaggccccccagcccggccccagaacccccggcctgctgaaggtgcccggcagcatcgccctgcccgtgcagaccctggtgagcgccagagccgccgcccccccccagcccagccccccccccaccaagttcatcgtgatgagcagcagcagcagcgcccccagcacccagcaggtgctgagcctgagcaccagcgcccccggcagcggcagcaccaccaccagccccgtgaccaccaccgtgcccagcgtgcagcccatcgtgaagctggtgagcaccgccaccaccgccccccccagcaccgcccccagcggccccggcagcgtgcagaagtacatcgtggtgagcctgccccccaccggcgagggcaagggcggccccaccagccaccccagccccgtgcccccccccgccagcagccccagccccctgagcggcagcgccctgtgcggcggcaagcaggaggccggcgacagccccccccccgcccccggcacccccaaggccaacggcagccagcccaacagcggcagcccccagcccgccccctag

SEQ ID NO: 101768 - DNA, 231 bp, synthetic construct
  misc_feature 1..231: note = Description of Artificial Sequence: Synthetic coding sequence
  source 1..231: mol_type = other DNA
atggccgaggagaagaagctgaagctgagcaacaccgtgctgcccagcgagagcatgaaggtggtggccgagagcatgggcatcgcccagatccaggaggagacctgccagctgctgaccgacgaggtgagctacagaatcaaggagatcgcccaggacgccctgaagttcatgcacatgggcaagagacagaagctgaccaccagcgacatcgactacgccctgaagtag

SEQ ID NO: 101769 - DNA, 1806 bp, synthetic construct
  misc_feature 1..1806: note = Description of Artificial Sequence: Synthetic coding sequence
  source 1..1806: mol_type = other DNA
atgcacatgggcaagagacagaagctgaccaccagcgacatcgactacgccctgaagctgaagaacgtggagcccctgtacggcttccacgcccaggagttcatccccttcagattcgccagcggcggcggcagagagctgtacttctacgaggagaaggaggtggacctgagcgacatcatcaacacccccctgcccagagtgcccctggacgtgtgcctgaaggcccccaaggagcagcagaaggccgaggccaccgagcccctgaagagcgccaagcccggccaggaggaggacggccccctgaagggcaagggccagggcgccaccaccgccgacggcaagggcaaggagaagaaggccccccccctgctggagggcgcccccctgagactgaagcccagaagcatccacgagctgagcgtggagcagcagctgtactacaaggagatcaccgaggcctgcgtgggcagctgcgaggccaagagagccgaggccctgcagagcatcgccaccgaccccggcctgtaccagatgctgcccagattcagcaccttcatcagcgagggcgtgagagtgaacgtggtgcagaacaacctggccctgctgatctacctgatgagaatggtgaaggccctgatggacaaccccaccctgtacctggagaagtacgtgcacgagctgatccccgccgtgatgacctgcatcgtgagcagacagctgtgcctgagacccgacgtggacaaccactgggccctgagagacttcgccgccagactggtggcccagatctgcaagcacttcagcaccaccaccaacaacatccagagcagaatcaccaagaccttcaccaagagctgggtggacgagaagaccccctggaccaccagatacggcagcatcgccggcctggccgagctgggccacgacgtgatcaagaccctgatcctgcccagactgcagcaggagggcgagagaatcagaagcgtgctggacggccccgtgctgagcaacatcgacagaatcggcgccgaccacgtgcagagcctgctgctgaagcactgcgcccccgtgctggccaagctgagacccccccccgacaaccaggacgcctacagagccgagttcggcagcctgggccccctgctgtgcagccaggtggtgaaggccagagcccaggccgccctgcaggcccagcaggtgaacagaaccaccctgaccatcacccagcccagacccaccctgaccctgagccaggccccccagcccggccccagaacccccggcctgctgaaggtgcccggcagcatcgccctgcccgtgcagaccctggtgagcgccagagccgccgcccccccccagcccagccccccccccaccaagttcatcgtgatgagcagcagcagcagcgcccccagcacccagcaggtgctgagcctgagcaccagcgcccccggcagcggcagcaccaccaccagccccgtgaccaccaccgtgcccagcgtgcagcccatcgtgaagctggtgagcaccgccaccaccgccccccccagcaccgcccccagcggccccggcagcgtgcagaagtacatcgtggtgagcctgccccccaccggcgagggcaagggcggccccaccagccaccccagccccgtgcccccccccgccagcagccccagccccctgagcggcagcgccctgtgcggcggcaagcaggaggccggcgacagccccccccccgcccccggcacccccaaggccaacggcagccagcccaacagcggcagcccccagcccgccccctag

SEQ ID NO: 101770 - DNA, 45 bp, synthetic construct
  misc_feature 1..45: note = Description of Artificial Sequence: Synthetic coding sequence
  source 1..45: mol_type = other DNA
atggccgaggagaagaagctgaagctgagcaacaccgtgctgtag

SEQ ID NO: 101771 - DNA, 2145 bp, synthetic construct
  misc_feature 1..2145: note = Description of Artificial Sequence: Synthetic coding sequence
  source 1..2145: mol_type = other DNA
atgaccaagagaagactgcagaccatcaccgcctgcctgcagctgagagagggcagccccagcctgcacagaggcctgcaccccagcagagaggagaagagagacagcagaatggccgaggagaagaagctgaagctgagcaacaccgtgctgcccagcgagagcatgaaggtggtggccgagagcatgggcatcgcccagatccaggaggagacctgccagctgctgaccgacgaggtgagctacagaatcaaggagatcgcccaggacgccctgaagttcatgcacatgggcaagagacagaagctgaccaccagcgacatcgactacgccctgaagctgaagaacgtggagcccctgtacggcttccacgcccaggagttcatccccttcagattcgccagcggcggcggcagagagctgtacttctacgaggagaaggaggtggacctgagcgacatcatcaacacccccctgcccagagtgcccctggacgtgtgcctgaaggcccactggctgagcatcgagggctgccagcccgccatccccgagaaccccccccccgcccccaaggagcagcagaaggccgaggccaccgagcccctgaagagcgccaagcccggccaggaggaggacggccccctgaagggcaagggccagggcgccaccaccgccgacggcaagggcaaggagaagaaggccccccccctgctggagggcgcccccctgagactgaagcccagaagcatccacgagctgagcgtggagcagcagctgtactacaaggagatcaccgaggcctgcgtgggcagctgcgaggccaagagagccgaggccctgcagagcatcgccaccgaccccggcctgtaccagatgctgcccagattcagcaccttcatcagcgagggcgtgagagtgaacgtggtgcagaacaacctggccctgctgatctacctgatgagaatggtgaaggccctgatggacaaccccaccctgtacctggagaagtacgtgcacgagctgatccccgccgtgatgacctgcatcgtgagcagacagctgtgcctgagacccgacgtggacaaccactgggccctgagagacttcgccgccagactggtggcccagatctgcaagcacttcagcaccaccaccaacaacatccagagcagaatcaccaagaccttcaccaagagctgggtggacgagaagaccccctggaccaccagatacggcagcatcgccggcctggccgagctgggccacgacgtgatcaagaccctgatcctgcccagactgcagcaggagggcgagagaatcagaagcgtgctggacggccccgtgctgagcaacatcgacagaatcggcgccgaccacgtgcagagcctgctgctgaagcactgcgcccccgtgctggccaagctgagacccccccccgacaaccaggacgcctacagagccgagttcggcagcctgggccccctgctgtgcagccaggtggtgaaggccagagcccaggccgccctgcaggcccagcaggtgaacagaaccaccctgaccatcacccagcccagacccaccctgaccctgagccaggccccccagcccggccccagaacccccggcctgctgaaggtgcccggcagcatcgccctgcccgtgcagaccctggtgagcgccagagccgccgcccccccccagcccagccccccccccaccaagttcatcgtgatgagcagcagcagcagcgcccccagcacccagcaggtgctgagcctgagcaccagcgcccccggcagcggcagcaccaccaccagccccgtgaccaccaccgtgcccagcgtgcagcccatcgtgaagctggtgagcaccgccaccaccgccccccccagcaccgcccccagcggccccggcagcgtgcagaagtacatcgtggtgagcctgccccccaccggcgagggcaagggcggccccaccagccaccccagccccgtgcccccccccgccagcagccccagccccctgagcggcagcgccctgtgcggcggcaagcaggaggccggcgacagccccccccccgcccccggcacccccaaggccaacggcagccagcccaacagcggcagcccccagcccgccccctag

SEQ ID NO: 101772 - DNA, 702 bp, synthetic construct
  misc_feature 1..702: note = Description of Artificial Sequence: Synthetic coding sequence
  source 1..702: mol_type = other DNA
atggccgaggagaagaagctgaagctgagcaacaccgtgctgcccagcgagagcatgaaggtggtggccgagagcatgggcatcgcccagatccaggaggagacctgccagctgctgaccgacgaggtgagctacagaatcaaggagatcgcccaggacgccctgaagttcatgcacatgggcaagagacagaagctgaccaccagcgacatcgactacgccctgaagctgaagaacgtggagcccctgtacggcttccacgcccaggagttcatccccttcagattcgccagcggcggcggcagagagctgtacttctacgaggagaaggaggtggacctgagcgacatcatcaacacccccctgcccagagtgcccctggacgtgtgcctgaaggcccccaaggagcagcagaaggccgaggccaccgagcccctgaagagcgccaagcccggccaggaggaggacggccccctgaagggcaagggccagggcgccaccaccgccgacggcaagggcaaggagaagaaggccccccccctgctggagggcgcccccctgagactgaagcccagaagcatccacgagctgagcgtggagcagcagctgtactacaaggagatcaccgaggcctgcgtgggcagctgcgaggccaagagagccgaggccctgcagagcatcgccaccgaccccggcctgtag

SEQ ID NO: 101773 - DNA, 405 bp, synthetic construct
  misc_feature 1..405: note = Description of Artificial Sequence: Synthetic coding sequence
  source 1..405: mol_type = other DNA
atggccgaggagaagaagctgaagctgagcaacaccgtgctgcccagcgagagcatgaaggtggtggccgagagcatgggcatcgcccagatccaggaggagacctgccagctgctgaccgacgaggtgagctacagaatcaaggagatcgcccaggacgccctgaagttcatgcacatgggcaagagacagaagctgaccaccagcgacatcgactacgccctgaagctgaagaacgtggagcccctgtacggcttccacgcccaggagttcatccccttcagattcgccagcggcggcggcagagagctgtacttctacgaggagaaggaggtggacctgagcgacatcatcaacacccccctgcccagagtgcccctggacgtgtgcctgaaggcccactag

SEQ ID NO: 101774 - DNA, 345 bp, synthetic construct
  misc_feature 1..345: note = Description of Artificial Sequence: Synthetic coding sequence
  source 1..345: mol_type = other DNA
atggccgaggagaagaagctgaagctgagcaacaccgtgctgcccagcgagagcatgaaggtggtggccgagagcatgggcatcgcccagatccaggaggagacctgccagctgctgaccgacgaggtgagctacagaatcaaggagatcgcccaggacgccctgaagttcatgcacatgggcaagagacagaagctgaccaccagcgacatcgactacgccctgaagctgaagaacgtggagcccctgtacggcttccacgcccaggagttcatccccttcagattcgccagcggcggcggcagagagctgtacttctacgaggagaaggaggtggacctgtag

SEQ ID NO: 101775 - DNA, 2034 bp, synthetic construct; identical to SEQ ID NO: 101767
  misc_feature 1..2034: note = Description of Artificial Sequence: Synthetic coding sequence
  source 1..2034: mol_type = other DNA

SEQ ID NO: 101776 - DNA, 2034 bp, synthetic construct; identical to SEQ ID NO: 101767
  misc_feature 1..2034: note = Description of Artificial Sequence: Synthetic coding sequence
  source 1..2034: mol_type = other DNA

SEQ ID NO: 101777 - DNA, 30 bp, synthetic construct
  misc_feature 1..30: note = Description of Artificial Sequence: Synthetic coding sequence
  source 1..30: mol_type = other DNA
atggccgaggagaagaagctgaagctgtag

SEQ ID NO: 101778 - DNA, 2205 bp, synthetic construct
  misc_feature 1..2205: note = Description of Artificial Sequence: Synthetic coding sequence
  source 1..2205: mol_type = other DNA
atggacatcagacacagcgagttcctgccctgcctgcactgcccccccttcgtgggccccctgcccgtgagccacgtgagcttcagcagcgcctgccccgtgcccctgcccggcagccccagcctgcacagaggcctgcaccccagcagagaggagaagagagacagcagaatggccgaggagaagaagctgaagctgagcaacaccgtgctgcccagcgagagcatgaaggtggtggccgagagcatgggcatcgcccagatccaggaggagacctgccagctgctgaccgacgaggtgagctacagaatcaaggagatcgcccaggacgccctgaagttcatgcacatgggcaagagacagaagctgaccaccagcgacatcgactacgccctgaagctgaagaacgtggagcccctgtacggcttccacgcccaggagttcatccccttcagattcgccagcggcggcggcagagagctgtacttctacgaggagaaggaggtggacctgagcgacatcatcaacacccccctgcccagagtgcccctggacgtgtgcctgaaggcccactggctgagcatcgagggctgccagcccgccatccccgagaaccccccccccgcccccaaggagcagcagaaggccgaggccaccgagcccctgaagagcgccaagcccggccaggaggaggacggccccctgaagggcaagggccagggcgccaccaccgccgacggcaagggcaaggagaagaaggccccccccctgctggagggcgcccccctgagactgaagcccagaagcatccacgagctgagcgtggagcagcagctgtactacaaggagatcaccgaggcctgcgtgggcagctgcgaggccaagagagccgaggccctgcagagcatcgccaccgaccccggcctgtaccagatgctgcccagattcagcaccttcatcagcgagggcgtgagagtgaacgtggtgcagaacaacctggccctgctgatctacctgatgagaatggtgaaggccctgatggacaaccccaccctgtacctggagaagtacgtgcacgagctgatccccgccgtgatgacctgcatcgtgagcagacagctgtgcctgagacccgacgtggacaaccactgggccctgagagacttcgccgccagactggtggcccagatctgcaagcacttcagcaccaccaccaacaacatccagagcagaatcaccaagaccttcaccaagagctgggtggacgagaagaccccctggaccaccagatacggcagcatcgccggcctggccgagctgggccacgacgtgatcaagaccctgatcctgcccagactgcagcaggagggcgagagaatcagaagcgtgctggacggccccgtgctgagcaacatcgacagaatcggcgccgaccacgtgcagagcctgctgctgaagcactgcgcccccgtgctggccaagctgagacccccccccgacaaccaggacgcctacagagccgagttcggcagcctgggccccctgctgtgcagccaggtggtgaaggccagagcccaggccgccctgcaggcccagcaggtgaacagaaccaccctgaccatcacccagcccagacccaccctgaccctgagccaggccccccagcccggccccagaacccccggcctgctgaaggtgcccggcagcatcgccctgcccgtgcagaccctggtgagcgccagagccgccgcccccccccagcccagccccccccccaccaagttcatcgtgatgagcagcagcagcagcgcccccagcacccagcaggtgctgagcctgagcaccagcgcccccggcagcggcagcaccaccaccagccccgtgaccaccaccgtgcccagcgtgcagcccatcgtgaagctggtgagcaccgccaccaccgccccccccagcaccgcccccagcggccccggcagcgtgcagaagtacatcgtggtgagcctgccccccaccggcgagggcaagggcggccccaccagccaccccagccccgtgcccccccccgccagcagccccagccccctgagcggcagcgccctgtgcggcggcaagcaggaggccggcgacagccccccccccgcccccggcacccccaaggccaacggcagccagcccaacagcggcagcccccagcccgccccctag

SEQ ID NO: 101779 - DNA, 768 bp, synthetic construct
  misc_feature 1..768: note = Description of Artificial Sequence: Synthetic coding sequence
  source 1..768: mol_type = other DNA
atggccgaggagaagaagctgaagctgagcaacaccgtgctgcccagcgagagcatgaaggtggtggccgagagcatgggcatcgcccagatccaggaggagacctgccagctgctgaccgacgaggtgagctacagaatcaaggagatcgcccaggacgccctgaagttcatgcacatgggcaagagacagaagctgaccaccagcgacatcgactacgccctgaagctgaagaacgtggagcccctgtacggcttccacgcccaggagttcatccccttcagattcgccagcggcggcggcagagagctgtacttctacgaggagaaggaggtggacctgagcgacatcatcaacacccccctgcccagagtgcccctggacgtgtgcctgaaggcccactggctgagcatcgagggctgccagcccgccatccccgagaaccccccccccgcccccaaggagcagcagaaggccgaggccaccgagcccctgaagagcgccaagcccggccaggaggaggacggccccctgaagggcaagggccagggcgccaccaccgccgacggcaagggcaaggagaagaaggccccccccctgctggagggcgcccccctgagactgaagcccagaagcatccacgagctgagcgtggagcagcagctgtactacaaggagatcaccgaggcctgcgtgggcagctgcgaggccaagagagccgaggccctgcagagcatcgccaccgaccccggcctgtaccagatgtag

SEQ ID NO: 101780 - DNA, 1050 bp, synthetic construct
  misc_feature 1..1050: note = Description of Artificial Sequence: Synthetic coding sequence
  source 1..1050: mol_type = other DNA
atgagcaagagcaaggacgacgccccccacgagctggagagccagttcatcctgagactgccccccgagtacgccagcaccgtgagaagagccgtgcagagcggccacgtgaacctgaaggacagactgaccatcgagctgcaccccgacggcagacacggcatcgtgagagtggacagagtgcccctggccagcaagctggtggacctgccctgcgtgatggagagcctgaagaccatcgacaagaagaccttctacaagaccgccgacatctgccagatgctggtgagcaccgtggacggcgacctgtacccccccgtggaggagcccgtggccagcaccgaccccaaggccagcaagaagaaggacaaggacaaggagaagaagttcatctggaaccacggcatcaccctgcccctgaagaacgtgagaaagagaagattcagaaagaccgccaagaagaagtacatcgagagccccgacgtggagaaggaggtgaagagactgctgagcaccgacgccgaggccgtgagcaccagatgggagatcatcgccgaggacgagaccaaggaggccgagaaccagggcctggacatcagcagccccggcatgagcggccacagacagggccacgacagcctggagcacgacgagctgagagagatcttcaacgacctgagcagcagcagcgaggacgaggacgagacccagcaccaggacgaggaggacatcaacatcatcgacaccgaggaggacctggagagacagctgcaggacaagctgaacgagagcgacgagcagcaccaggagaacgagggcaccaaccagctggtgatgggcatccagaagcagatcgacaacatgaagggcaagctgcaggagacccaggacagagccaagagacaggaggacctgatcatgaaggtggagaacctggccctgaagaacagattccaggccgtgctggacgagctgaagcagaaggaggacagagagaaggagcagctgagcagcctgcaggaggagctggagagcctgctggagaagtag

SEQ ID NO: 101781 - DNA, 909 bp, synthetic construct
  misc_feature 1..909: note = Description of Artificial Sequence: Synthetic coding sequence
  source 1..909: mol_type = other DNA
atgagcgagagccaggacgaggtgcccgacgaggtggagaaccagttcatcctgagactgcccctggagcacgcctgcaccgtgagaaacctggccagaagccagagcgtgaagatgaaggacaagctgaagatcgacctgctgcccgacggcagacacgccgtggtggaggtggaggacgtgcccctggccgccaagctggtggacctgccctgcgtgatcgagagcctgagaaccctggacaagaagaccttctacaagaccgccgacatcagccagatgctggtgtgcaccgccgacggcgacatccacctgagccccgaggagcccgccgccagcaccgaccccaacatcgtgagaaagaaggagagaggcagagaggagaagtgcgtgtggaagcacggcatcaccccccccctgaagaacgtgagaaagaagagattcagaaagacccagaagaaggtgcccgacgtgaaggagatggagaagagcagcttcaccgagtacatcgagagccccgacgtggagaacgaggtgaagagactgctgagaagcgacgccgaggccgtgagcaccagatgggaggtgatcgccgaggacggcaccaaggagatcgagagccagggcagcatccccggcttcctgatcagcagcggcatgagcagccacaagcagggccacaccagcagcgtgatggagatccagaagcagatcgagaagaaggagaagaagctgcacaagatccagaacaaggcccagagacagaaggacctgatcatgaaggtggagaacctgaccctgaagaaccacttccagagcgtgctggagcagctggagctgcaggagaagcagaagaacgagaagctgatcagcctgcaggagcagctgcagagattcctgaagaagtag

SEQ ID NO: 101782 - DNA, 1131 bp, synthetic construct
  misc_feature 1..1131: note = Description of Artificial Sequence: Synthetic coding sequence
  source 1..1131: mol_type = other DNA
atgagcgagagccaggacgaggtgcccgacgaggtggagaaccagttcatcctgagactgcccctggagcacgcctgcaccgtgagaaacctggccagaagccagagcgtgaagatgaaggacaagctgaagatcgacctgctgcccgacggcagacacgccgtggtggaggtggaggacgtgcccctggccgccaagctggtggacctgccctgcgtgatcgagagcctgagaaccctggacaagaagaccttctacaagaccgccgacatcagccagatgctggtgtgcaccgccgacggcgacatccacctgagccccgaggagcccgccgccagcaccgaccccaacatcgtgagaaagaaggagagaggcagagaggagaagtgcgtgtggaagcacggcatcaccccccccctgaagaacgtgagaaagaagagattcagaaagacccagaagaaggtgcccgacgtgaaggagatggagaagagcagcttcaccgagtacatcgagagccccgacgtggagaacgaggtgaagagactgctgagaagcgacgccgaggccgtgagcaccagatgggaggtgatcgccgaggacggcaccaaggagatcgagagccagggcagcatccccggcttcctgatcagcagcggcatgagcagccacaagcagggccacaccagcagcgagtacgacatgctgagagagatgttcagcgacagcagaagcaacaacgacgacgacgaggacgaggacgacgaggacgaggacgaggacgaggacgaggacgaggacgaggacaaggaggaggaggaggaggactgcagcgaggagtacctggagagacagctgcaggccgagttcatcgagagcggccagtacagagccaacgagggcaccagcagcatcgtgatggagatccagaagcagatcgagaagaaggagaagaagctgcacaagatccagaacaaggcccagagacagaaggacctgatcatgaaggtggagaacctgaccctgaagaaccacttccagagcgtgctggagcagctggagctgcaggagaagcagaagaacgagaagctgatcagcctgcaggagcagctgcagagattcctgaagaagtag

SEQ ID NO: 101783 - DNA, 909 bp, synthetic construct; identical to SEQ ID NO: 101781
  misc_feature 1..909: note = Description of Artificial Sequence: Synthetic coding sequence
  source 1..909: mol_type = other DNA

SEQ ID NO: 101784 - DNA, 1389 bp, synthetic construct
  misc_feature 1..1389: note = Description of Artificial Sequence: Synthetic coding sequence
  source 1..1389: mol_type = other DNA
atggagtgccccgagggccagctgcccatcagcagcgagaacgacagcacccccaccgtgagcaccagcgaggtgaccagccagcaggagccccagatcctggtggacagaggcagcgagaccacctacgagagcagcgccgacatcgccggcgacgagggcacccagatccccgccgacgaggacacccagaccgacgccgacagcagcgcccaggccgccgcccaggcccccgagaacttccaggagggcaaggacatgagcgagagccaggacgaggtgcccgacgaggtggagaaccagttcatcctgagactgcccctggagcacgcctgcaccgtgagaaacctggccagaagccagagcgtgaagatgaaggacaagctgaagatcgacctgctgcccgacggcagacacgccgtggtggaggtggaggacgtgcccctggccgccaagctggtggacctgccctgcgtgatcgagagcctgagaaccctggacaagaagaccttctacaagaccgccgacatcagccagatgctggtgtgcaccgccgacggcgacatccacctgagccccgaggagcccgccgccagcaccgaccccaacatcgtgagaaagaaggagagaggcagagaggagaagtgcgtgtggaagcacggcatcaccccccccctgaagaacgtgagaaagaagagattcagaaagacccagaagaaggtgcccgacgtgaaggagatggagaagagcagcttcaccgagtacatcgagagccccgacgtggagaacgaggtgaagagactgctgagaagcgacgccgaggccgtgagcaccagatgggaggtgatcgccgaggacggcaccaaggagatcgagagccagggcagcatccccggcttcctgatcagcagcggcatgagcagccacaagcagggccacaccagcagcgagtacgacatgctgagagagatgttcagcgacagcagaagcaacaacgacgacgacgaggacgaggacgacgaggacgaggacgaggacgaggacgaggacgaggacgaggacaaggaggaggaggaggaggactgcagcgaggagtacctggagagacagctgcaggccgagttcatcgagagcggccagtacagagccaacgagggcaccagcagcatcgtgatggagatccagaagcagatcgagaagaaggagaagaagctgcacaagatccagaacaaggcccagagacagaaggacctgatcatgaaggtggagaacctgaccctgaagaaccacttccagagcgtgctggagcagctggagctgcaggagaagcagaagaacgagaagctgatcagcctgcaggagcagctgcagagattcctgaagaagtag

SEQ ID NO: 101785 - DNA, 1548 bp, synthetic construct
  misc_feature 1..1548: note = Description of Artificial Sequence: Synthetic coding sequence
  source 1..1548: mol_type = other DNA
atgggcaactgggtggtgaaccactggttcagcgtgctgttcctggtggtgtggctgggcctgaacgtgttcctgttcgtggacgccttcctgaagtacgagaaggccgacaagtactactacaccagaaagatcctgggcagcaccctggcctgcgccagagccagcgccctgtgcctgaacttcaacagcaccctgatcctgctgcccgtgtgcagaaacctgctgagcttcctgagaggcacctgcagcttctgcagcagaaccctgagaaagcagctggaccacaacctgaccttccacaagctggtggcctacatgatctgcctgcacaccgccatccacatcatcgcccacctgttcaacttcgactgctacagcagaagcagacaggccaccgacggcagcctggccagcatcctgagcagcctgagccacgacgagaagaagggcggcagctggctgaaccccatccagagcagaaacaccaccgtggagtacgtgaccttcaccagcatcgccggcctgaccggcgtgatcatgaccatcgccctgatcctgatggtgaccagcgccaccgagttcatcagaagaagctacttcgaggtgttctggtacacccaccacctgttcatcttctacatcctgggcctgggcatccacggcatcggcggcatcgtgagaggccagaccgaggagagcatgaacgagagccaccccagaaagtgcgccgagagcttcgagatgtgggacgacagagacagccactgcagaagacccaagttcgagggccacccccccgagagctggaagtggatcctggcccccgtgatcctgtacatctgcgagagaatcctgagattctacagaagccagcagaaggtggtgatcaccaaggtggtgatgcaccccagcaaggtgctggagctgcagatgaacaagagaggcttcagcatggaggtgggccagtacatcttcgtgaactgccccagcatcagcctgctggagtggcaccccttcaccctgaccagcgcccccgaggaggacttcttcagcatccacatcagagccgccggcgactggaccgagaacctgatcagagccttcgagcagcagtacagccccatccccagaatcgaggtggacggccccttcggcaccgccagcgaggacgtgttccagtacgaggtggccgtgctggtgggcgccggcatcggcgtgacccccttcgccagcatcctgaagagcatctggtacaagttccagtgcgccgaccacaacctgaagaccaagaaggtgggccacgccgccctgaacttcgacaaggccaccgacatcgtgaccggcctgaagcagaagaccagcttcggcagacccatgtgggacaacgagttcagcaccatcgccaccagccaccccaagagcgtggtgggcgtgttcctgtgcggccccagaaccctggccaagagcctgagaaagtgctgccacagatacagcagcctggaccccagaaaggtgcagttctacttcaacaaggagaacttctag

SEQ ID NO: 101786 - DNA, 795 bp, synthetic construct; identical to SEQ ID NO: 85835
  misc_feature 1..795: note = Description of Artificial Sequence: Synthetic coding sequence
  source 1..795: mol_type = other DNA

SEQ ID NO: 101787 - DNA, 510 bp, synthetic construct
  misc_feature 1..510: note = Description of Artificial Sequence: Synthetic coding sequence
  source 1..510: mol_type = other DNA
atgtgccacagaaagcccggcacccccggcgtgggcaagaccaccctgggcaaggagctggccagcaagagcggcctgaagtacatcaacgtgggcgacctggccagagaggagcagctgtacgacggctacgacgaggagtacgactgccccatcctggacgaggacagagtggtggacgagctggacaaccagatgagagagggcggcgtgatcgtggactaccacggctgcgacttcttccccgagagatggttccacatcgtgttcgtgctgagaaccgacaccaacgtgctgtacgagagactggagaccagaggctacaacgagaagaagctgaccgacaacatccagtgcgagatcttccaggtgctgtacgaggaggccaccgccagctacaaggaggagatcgtgcaccagctgcccagcaacaagcccgaggagctggagaacaacgtggaccagatcctgaagtggatcgagcagtggatcaaggaccacaacagctag

SEQ ID NO: 101788 - DNA, 519 bp, synthetic construct
  misc_feature 1..519: note = Description of Artificial Sequence: Synthetic coding sequence
  source 1..519: mol_type = other DNA
atgctgctgcccaacatcctgctgaccggcacccccggcgtgggcaagaccaccctgggcaaggagctggccagcaagagcggcctgaagtacatcaacgtgggcgacctggccagagaggagcagctgtacgacggctacgacgaggagtacgactgccccatcctggacgaggacagagtggtggacgagctggacaaccagatgagagagggcggcgtgatcgtggactaccacggctgcgacttcttccccgagagatggttccacatcgtgttcgtgctgagaaccgacaccaacgtgctgtacgagagactggagaccagaggctacaacgagaagaagctgaccgacaacatccagtgcgagatcttccaggtgctgtacgaggaggccaccgccagctacaaggaggagatcgtgcaccagctgcccagcaacaagcccgaggagctggagaacaacgtggaccagatcctgaagtggatcgagcagtggatcaaggaccacaacagctag

SEQ ID NO: 101789 - DNA, 597 bp, synthetic construct
  misc_feature 1..597: note = Description of Artificial Sequence: Synthetic coding sequence
  source 1..597: mol_type = other DNA
atggagagcggcaagaccgccagccccaagagcatgcccaaggacgcccagatgatggcccagatcctgaaggacatgggcatcaccgagtacgagcccagagtgatcaaccagatgctggagttcgccttcagatacgtgaccaccatcctggacgacgccaagatctacagcagccacgccaagaaggccaccgtggacgccgacgacgtgagactggccatccagtgcagagccgaccagagcttcaccagccccccccccagagacttcctgctggacatcgccagacagagaaaccagacccccctgcccctgatcaagccctacagcggccccagactgccccccgacagatactgcctgaccgcccccaactacagactgaagagcctgcagaagaaggccagcaccagcgccggcagaatcaccgtgcccagactgagcgtgggcagcgtgaccagcagacccagcacccccaccctgggcacccccaccccccagaccatgagcgtgagcaccaaggtgggcacccccatgagcctgaccggccagagattcaccgtgcagatgcccaccagccagagccccgcctag

SEQ ID NO: 101790 - DNA, 411 bp, synthetic construct
  misc_feature 1..411: note = Description of Artificial Sequence: Synthetic coding sequence
  source 1..411: mol_type = other DNA
atggagagcggcaagaccgccagccccaagagcatgcccaaggacgcccagatgatggcccagatcctgaaggacatgggcatcaccgagtacgagcccagagtgatcaaccagatgctggagttcgccttcagatacgtgaccaccatcctggacgacgccaagatctacagcagccacgccaagaaggccaccgtggacgccgacgacgtgagactggccatccagtgcagagccgaccagagcttcaccagccccccccccagagacttcctgctggacatcgccagacagagaaaccagacccccctgcccctgatcaagccctacagcggccccagactgccccccgacagatactgcctgaccgcccccaactacagactgaagagcctgcagaagaaggcctag

SEQ ID NO: 101791 - DNA, 795 bp, synthetic construct; identical to SEQ ID NO: 85835
  misc_feature 1..795: note = Description of Artificial Sequence: Synthetic coding sequence
  source 1..795: mol_type = other DNA

SEQ ID NO: 101792 - DNA, 309 bp, synthetic construct
  misc_feature 1..309: note = Description of Artificial Sequence: Synthetic coding sequence
  source 1..309: mol_type = other DNA
atggagagcggcaagaccgccagccccaagagcatgcccaaggacgcccagatgatggcccagatcctgaaggacatgggcatcaccgagtacgagcccagagtgatcaaccagatgctggagttcgccttcagatacgtgaccaccatcctggacgacgccaagatctacagcagccacgccaagaaggccaccgtggacgccgacgacgtgagactggccatccagtgcagagccgaccagagcttcaccagccccccccccagagacttcctgctggacatcgccagacagagaaaccagacctag

SEQ ID NO: 101793 - DNA, 501 bp, synthetic construct
  misc_feature 1..501: note = Description of Artificial Sequence: Synthetic coding sequence
  source 1..501: mol_type = other DNA
atggagagcggcaagaccgccagccccaagagcatgcccaaggacgcccagatgatggcccagatcctgaaggacatgggcatcaccgagtacgagcccagagtgatcaaccagatgctggagttcgccttcagatacgtgaccaccatcctggacgacgccaagatctacagcagccacgccaagaaggccaccgtggacgccgacgacgtgagactggccatccagtgcagagccgaccagagcttcaccagccccccccccagagacttcctgctggacatcgccagacagagaaaccagacccccctgcccctgatcaagccctacagcggccccagactgccccccgacagatactgcctgaccgcccccaactacagactgaagagcctgcagaagaaggccagcaccagcgccggcagaatcaccgtgcccagactgagcgtgggcagcgtgaccagcagacccagcacccccaccctgggcacccccacctag

SEQ ID NO: 101794 - DNA, 384 bp, synthetic construct
  misc_feature 1..384: note = Description of Artificial Sequence: Synthetic coding sequence
  source 1..384: mol_type = other DNA
atggagagcggcaagaccgccagccccaagagcatgcccaaggacgcccagatgatggcccagatcctgaaggacatgggcatcaccgagtacgagcccagagtgatcaaccagatgctggagttcgccttcagatacgtgaccaccatcctggacgacgccaagatctacagcagccacgccaagaaggccaccgtggacgccgacgacgtgagactggccatccagtgcagagccgaccagagcttcaccagccccccccccagagacttcctgctggacatcgccagacagagaaaccagacccccctgcccctgatcaagccctacagcggccccagactgccccccgacagatactgcctgaccgcccccaactactag

SEQ ID NO: 101795 - DNA, 756 bp, synthetic construct
  misc_feature 1..756: note = Description of Artificial Sequence: Synthetic coding sequence
  source 1..756: mol_type = other DNA
atggagagcggcaagatggccccccccaagaacgcccccagagacgccctggtgatggcccagatcctgaaggacatgggcatcaccgagtacgagcccagagtgatcaaccagatgctggagttcgccttcagatacgtgaccaccatcctggacgacgccaagatctacagcagccacgccaagaagcccaacgtggacgccgacgacgtgagactggccatccagtgcagagccgaccagagcttcaccagccccccccccagagacttcctgctggacatcgccagacagaagaaccagacccccctgcccctgatcaagccctacgccggccccagactgccccccgacagatactgcctgaccgcccccaactacagactgaagagcctgatcaagaagggccccaaccagggcagactggtgcccagactgagcgtgggcgccgtgagcagcaagcccaccacccccaccatcgccaccccccagaccgtgagcgtgcccaacaaggtggccacccccatgagcgtgaccagccagagattcaccgtgcagatcccccccagccagagcacccccgtgaagcccgtgcccgccaccaccgccgtgcagaacgtgctgatcaaccccagcatgatcggccccaagaacatcctgatcaccaccaacatggtgagcagccagaacaccgccaacgaggccaaccccctgaagagaaagcacgaggacgacgacgacaacgacatcatgtag

SEQ ID NO: 101796 - DNA, 879 bp, synthetic construct
  misc_feature 1..879: note = Description of Artificial Sequence: Synthetic coding sequence
  source 1..879: mol_type = other DNA
atgcccctgcacgtgaagtggcccttccccgccgtgccccccctgacctggaccctggccagcagcgtggtgatgggcctggtgggcacctacagctgcttctggaccaagtacatgaaccacctgaccgtgcacaacagagaggtgctgtacgagctgatcgagaagagaggccccgccacccccctgatcaccgtgagcaaccaccagagctgcatggacgacccccacctgtggggcatcctgaagctgagacacatctggaacctgaagctgatgagatggacccccgccgccgccgacatctgcttcaccaaggagctgcacagccacttcttcagcctgggcaagtgcgtgcccgtgtgcagaggcgccgagttcttccaggccgagaacgagggcaagggcgtgctggacaccggcagacacatgcccggcgccggcaagagaagagagaagggcgacggcgtgtaccagaagggcatggacttcatcctggagaagctgaaccacggcgactgggtgcacatcttccccgagggcaaggtgaacatgagcagcgagttcctgagattcaagtggggcatcggcagactgatcgccgagtgccacctgaaccccatcatcctgcccctgtggcacgtgggcatgaacgacgtgctgcccaacagccccccctacttccccagattcggccagaagatcaccgtgctgatcggcaagcccttcagcgccctgcccgtgctggagagactgagagccgagaacaagagcgccgtggagatgagaaaggccctgaccgacttcatccaggaggagttccagcacctgaagacccaggccgagcagctgcacaaccacctgcagcccggcagatag

SEQ ID NO: 101797 - DNA, 789 bp, synthetic construct
  misc_feature 1..789: note = Description of Artificial Sequence: Synthetic coding sequence
  source 1..789: mol_type = other DNA
atgcccctgcacgtgaagtggcccttccccgccgtgccccccctgacctggaccctggccagcagcgtggtgatgggcctggtgggcacctacagctgcttctggaccaagtacatgaaccacctgaccgtgcacaacagagaggtgctgtacgagctgatcgagaagagaggccccgccacccccctgatcaccgtgagcaaccaccagagctgcatggacgacccccacctgtggggcatcctgaagctgagacacatctggaacctgaagctgatgagatggacccccgccgccgccgacatctgcttcaccaaggagctgcacagccacttcttcagcctgggcaagtgcgtgcccgtgtgcagaggcgacggcgtgtaccagaagggcatggacttcatcctggagaagctgaaccacggcgactgggtgcacatcttccccgagggcaaggtgaacatgagcagcgagttcctgagattcaagtggggcatcggcagactgatcgccgagtgccacctgaaccccatcatcctgcccctgtggcacgtgggcatgaacgacgtgctgcccaacagccccccctacttccccagattcggccagaagatcaccgtgctgatcggcaagcccttcagcgccctgcccgtgctggagagactgagagccgagaacaagagcgccgtggagatgagaaaggccctgaccgacttcatccaggaggagttccagcacctgaagacccaggccgagcagctgcacaaccacctgcagcccggcagatag

SEQ ID NO: 101798 - DNA, 837 bp, synthetic construct
  misc_feature 1..837: note = Description of Artificial Sequence: Synthetic coding sequence
  source 1..837: mol_type = other DNA
atgcccctgcacgtgaagtggcccttccccgccgtgccccccctgacctggaccctggccagcagcgtggtgatgggcctggtgggcacctacagctgcttctggaccaagtacatgaaccacctgaccgtgcacaacagagaggtgctgtacgagctgatcgagaagagaggccccgccacccccctgatcaccgtgagcaaccaccagagctgcatggacgacccccacctgtggggcatcctgaagctgagacacatctggaacctgaagctgatgagatggacccccgccgccgccgacatctgcttcaccaaggagctgcacagccacttcttcagcctgggcaagtgcgtgcccgtgtgcagaggcgccgagttcttccaggccgagaacgagggcaagggcgtgctggacaccggcagacacatgcccggcgccggcaagagaagagagaagggcgacggcgtgtaccagaagggcatggacttcatcctggagaagctgaaccacggcgactgggtgcacatcttccccgagggcatcggcagactgatcgccgagtgccacctgaaccccatcatcctgcccctgtggcacgtgggcatgaacgacgtgctgcccaacagccccccctacttccccagattcggccagaagatcaccgtgctgatcggcaagcccttcagcgccctgcccgtgctggagagactgagagccgagaacaagagcgccgtggagatgagaaaggccctgaccgacttcatccaggaggagttccagcacctgaagacccaggccgagcagctgcacaaccacctgcagcccggcagatag

SEQ ID NO: 101799 - DNA, 747 bp, synthetic construct
  misc_feature 1..747: note = Description of Artificial Sequence: Synthetic coding sequence
  source 1..747: mol_type = other DNA
atgcccctgcacgtgaagtggcccttccccgccgtgccccccctgacctggaccctggccagcagcgtggtgatgggcctggtgggcacctacagctgcttctggaccaagtacatgaaccacctgaccgtgcacaacagagaggtgctgtacgagctgatcgagaagagaggccccgccacccccctgatcaccgtgagcaaccaccagagctgcatggacgacccccacctgtggggcatcctgaagctgagacacatctggaacctgaagctgatgagatggacccccgccgccgccgacatctgcttcaccaaggagctgcacagccacttcttcagcctgggcaagtgcgtgcccgtgtgcagaggcgacggcgtgtaccagaagggcatggacttcatcctggagaagctgaaccacggcgactgggtgcacatcttccccgagggcatcggcagactgatcgccgagtgccacctgaaccccatcatcctgcccctgtggcacgtgggcatgaacgacgtgctgcccaacagccccccctacttccccagattcggccagaagatcaccgtgctgatcggcaagcccttcagcgccctgcccgtgctggagagactgagagccgagaacaagagcgccgtggagatgagaaaggccctgaccgacttcatccaggaggagttccagcacctgaagacccaggccgagcagctgcacaaccacctgcagcccggcagatag

SEQ ID NO: 101800 - DNA, 798 bp, synthetic construct
  misc_feature 1..798: note = Description of Artificial Sequence: Synthetic coding sequence
  source 1..798: mol_type = other DNA
atgcccctgcacgtgaagtggcccttccccgccgtgccccccctgacctggaccctggccagcagcgtggtgatgggcctggtgggcacctacagctgcttctggaccaagtacatgaaccacctgaccgtgcacaacagagaggtgctgtacgagctgatcgagaagagaggccccgccacccccctgatcaccgtgagcaaccaccagagctgcatggacgacccccacctgtggggcatcctgaagctgagacacatctggaacctgaagctgatgagatggacccccgccgccgccgacatctgcttcaccaaggagctgcacagccacttcttcagcctgggcaagtgcgtgcccgtgtgcagaggcgccgagttcttccaggccgagaacgagggcaagggcgtgctggacaccggcagacacatgcccggcgccggcaagagaagagagaagggcaaggtgaacatgagcagcgagttcctgagattcaagtggggcatcggcagactgatcgccgagtgccacctgaaccccatcatcctgcccctgtggcacgtgggcatgaacgacgtgctgcccaacagccccccctacttccccagattcggccagaagatcaccgtgctgatcggcaagcccttcagcgccctgcccgtgctggagagactgagagccgagaacaagagcgccgtggagatgagaaaggccctgaccgacttcatccaggaggagttccagcacctgaagacccaggccgagcagctgcacaaccacctgcagcccggcagatag

SEQ ID NO: 101801 - DNA, 7629 bp, synthetic construct
  misc_feature 1..7629: note = Description of Artificial Sequence: Synthetic coding sequence
  source 1..7629: mol_type = other DNA
atggtggccctgagcctgaagatctgcgtgagacactgcaacgtggtgaagaccatgcagttcgagcccagcaccgccgtgtacgacgcctgcagagtgatcagagagagagtgcccgaggcccagaccggccaggccagcgactacggcctgttcctgagcgacgaggaccccagaaagggcatctggctggaggccggcagaaccctggactactacatgctgagaaacggcgacatcctggagtacaagaagaagcagagaccccagaagatcagaatgctggacggcagcgtgaagaccgtgatggtggacgacagcaagaccgtgggcgagctgctggtgaccatctgcagcagaatcggcatcaccaactacgaggagtacagcctgatccaggagaccatcgaggagaagaaggaggagggcaccggcaccctgaagaaggacagaaccctgctgagagacgagagaaagatggagaagctgaaggccaagctgcacaccgacgacgacctgaactggctggaccacagcagaaccttcagagagcagggcgtggacgagaacgagaccctgctgctgagaagaaagttcttctacagcgaccagaacgtggacagcagagaccccgtgcagctgaacctgctgtacgtgcaggccagagacgacatcctgaacggcagccaccccgtgagcttcgagaaggcctgcgagttcggcggcttccaggcccagatccagttcggcccccacgtggagcacaagcacaagcccggcttcctggacctgaaggagttcctgcccaaggagtacatcaagcagagaggcgccgagaagagaatcttccaggagcacaagaactgcggcgagatgagcgagatcgaggccaaggtgaagtacgtgaagctggccagaagcctgagaacctacggcgtgagcttcttcctggtgaaggagaagatgaagggcaagaacaagctggtgcccagactgctgggcatcaccaaggacagcgtgatgagagtggacgagaagaccaaggaggtgctgcaggagtggcccctgaccaccgtgaagagatgggccgccagccccaagagcttcaccctggacttcggcgagtaccaggagagctactacagcgtgcagaccaccgagggcgagcagatcagccagctgatcgccggctacatcgacatcatcctgaagaagaagcagagcaaggacagattcggcctggagggcgacgaggagagcaccatgctggaggagagcgtgagccccaagaagagcaccatcctgcagcagcagttcaacagaaccggcaaggccgagcacggcagcgtggccctgcccgccgtgatgagaagcggcagcagcggccccgagaccttcaacgtgggcagcatgcccagcccccagcagcaggtgatggtgggccagatgcacagaggccacatgccccccctgaccagcgcccagcaggccctgatgggcaccatcaacaccagcatgcacgccgtgcagcaggcccaggacgacctgagcgagctggacagcctgccccccctgggccaggacatggccagcagagtgtgggtgcagaacaaggtggacgagagcaagcacgagatccacagccaggtggacgccatcaccgccggcaccgccagcgtggtgaacctgaccgccggcgaccccgccgacaccgactacaccgccgtgggctgcgccatcaccaccatcagcagcaacctgaccgagatgagcaagggcgtgaagctgctggccgccctgatggacgacgaggtgggcagcggcgaggacctgctgagagccgccagaaccctggccggcgccgtgagcgacctgctgaaggccgtgcagcccaccagcggcgagcccagacagaccgtgctgaccgccgccggcagcatcggccaggccagcggcgacctgctgagacagatcggcgagaacgagaccgacgagagattccaggacgtgctgatgagcctggccaaggccgtggccaacgccgccgccatgctggtgctgaaggccaagaacgtggcccaggtggccgaggacaccgtgctgcagaacagagtgatcgccgccgccacccagtgcgccctgagcaccagccagctggtggcctgcgccaaggtggtgagccccaccatcagcagccccgtgtgccaggagcagctgatcgaggccggcaagctggtggacagaagcgtggagaactgcgtgagagcctgccaggccgccaccaccgacagcgagctgctgaagcaggtgagcgccgccgccagcgtggtgagccaggccctgcacgacctgctgcagcacgtgagacagttcgccagcagaggcgagcccatcggcagatacgaccaggccaccgacaccatcatgtgcgtgaccgagagcatcttcagcagcatgggcgacgccggcgagatggtgagacaggccagagtgctggcccaggccaccagcgacctggtgaacgccatgagaagcgacgccgaggccgagatcgacatggagaacagcaagaagctgctggccgccgccaagctgctggccgacagcaccgccagaatggtggaggccgccaagggcgccgccgccaaccccgagaacgaggaccagcagcagagactgagagaggccgccgagggcctgagagtggccaccaacgccgccgcccagaacgccatcaagaagaagatcgtgaacagactggaggtggccgccaagcaggccgccgccgccgccacccagaccatcgccgccagccagaacgccgccgtgagcaacaagaaccccgccgcccagcagcagctggtgcagagctgcaaggccgtggccgaccacatcccccagctggtgcagggcgtgagaggcagccaggcccaggccgaggacctgagcgcccagctggccctgatcatcagcagccagaacttcctgcagcccggcagcaagatggtgagcagcgccaaggccgccgtgcccaccgtgagcgaccaggccgccgccatgcagctgagccagtgcgccaagaacctggccaccagcctggccgagctgagaaccgccagccagaaggcccacgaggcctgcggccccatggagatcgacagcgccctgaacaccgtgcagaccctgaagaacgagctgcaggacgccaagatggccgccgtggagagccagctgaagcccctgcccggcgagaccctggagaagtgcgcccaggacctgggcagcaccagcaaggccgtgggcagcagcatggcccagctgctgacctgcgccgcccagggcaacgagcactacaccggcgtggccgccagagagaccgcccaggccctgaagaccctggcccaggccgccagaggcgtggccgccagcaccaccgaccccgccgccgcccacgccatgctggacagcgccagagacgtgatggagggcagcgccatgctgatccaggaggccaagcaggccctgatcgcccccggcgacgccgagagacagcagagactggcccaggtggccaaggccgtgagccacagcctgaacaactgcgtgaactgcctgcccggccagaaggacgtggacgtggccctgaagagcatcggcgagagcagcaagaagctgctggtggacagcctgccccccagcaccaagcccttccaggaggcccagagcgagctgaaccaggccgccgccgacctgaaccagagcgccggcgaggtggtgcacgccaccagaggccagagcggcgagctggccgccgccagcggcaagttcagcgacgacttcgacgagttcctggacgccggcatcgagatggccggccaggcccagaccaaggaggaccagatccaggtgatcggcaacctgaagaacatcagcatggccagcagcaagctgctgctggccgccaagagcctgagcgtggaccccggcgcccccaacgccaagaacctgctggccgccgccgccagagccgtgaccgagagcatcaaccagctgatcaccctgtgcacccagcaggcccccggccagaaggagtgcgacaacgccctgagagagctggagaccgtgaagggcatgctggacaaccccaacgagcccgtgagcgacctgagctacttcgactgcatcgagagcgtgatggagaacagcaaggtgctgggcgagagcatggccggcatcagccagaacgccaagaccggcgacctgcccgccttcggcgagtgcgtgggcatcgccagcaaggccctgtgcggcctgaccgaggccgccgcccaggccgcctacctggtgggcatcagcgaccccaacagccaggccggccaccagggcctggtggaccccatccagttcgccagagccaaccaggccatccagatggcctgccagaacctggtggaccccggcagcagccccagccaggtgctgagcgccgccaccatcgtggccaagcacaccagcgccctgtgcaacgcctgcagaatcgccagcagcaagaccgccaaccccgtggccaagagacacttcgtgcagagcgccaaggaggtggccaacagcaccgccaacctggtgaagaccatcaaggccctggacggcgacttcagcgaggacaacagaaacaagtgcagaatcgccaccgcccccctgatcgaggccgtggagaacctgaccgccttcgccagcaaccccgagttcgtgagcatccccgcccagatcagcagcgagggcagccaggcccaggagcccatcctggtgagcgccaagaccatgctggagagcagcagctacctgatcagaaccgccagaagcctggccatcaaccccaaggacccccccacctggagcgtgctggccggccacagccacaccgtgagcgacagcatcaagagcctgatcaccagcatcagagacaaggcccccggccagagagagtgcgactacagcatcgacggcatcaacagatgcatcagagacatcgagcaggccagcctggccgccgtgagccagagcctggccaccagagacgacatcagcgtggaggccctgcaggagcagctgaccagcgtggtgcaggagatcggccacctgatcgaccccatcgccaccgccgccagaggcgaggccgcccagctgggccacaaggtgacccagctggccagctacttcgagcccctgatcctggccgccgtgggcgtggccagcaagatcctggaccaccagcagcagatgaccgtgctggaccagaccaagaccctggccgagagcgccctgcagatgctgtacgccgccaaggagggcggcggcaaccccaaggcccagcacacccacgacgccatcaccgaggccgcccagctgatgaaggaggccgtggacgacatcatggtgaccctgaacgaggccgccagcgaggtgggcctggtgggcggcatggtggacgccatcgccgaggccatgagcaagctggacgagggcaccccccccgagcccaagggcaccttcgtggactaccagaccaccgtggtgaagtacagcaaggccatcgccgtgaccgcccaggagatgatgaccaagagcgtgaccaaccccgaggagctgggcggcctggccagccagatgaccagcgactacggccacctggccttccagggccagatggccgccgccaccgccgagcccgaggagatcggcttccagatcagaaccagagtgcaggacctgggccacggctgcatcttcctggtgcagaaggccggcgccctgcaggtgtgccccaccgacagctacaccaagagagagctgatcgagtgcgccagagccgtgaccgagaaggtgagcctggtgctgagcgccctgcaggccggcaacaagggcacccaggcctgcatcaccgccgccaccgccgtgagcggcatcatcgccgacctggacaccaccatcatgttcgccaccgccggcaccctgaacgccgagaacagcgagaccttcgccgaccacagagagaacatcctgaagaccgccaaggccctggtggaggacaccaagctgctggtgagcggcgccgccagcacccccgacaagctggcccaggccgcccagagcagcgccgccaccatcacccagctggccgaggtggtgaagctgggcgccgccagcctgggcagcgacgaccccgagacccaggtggtgctgatcaacgccatcaaggacgtggccaaggccctgagcgacctgatcagcgccaccaagggcgccgccagcaagcccgtggacgaccccagcatgtaccagctgaagggcgccgccaaggtgatggtgaccaacgtgaccagcctgctgaagaccgtgaaggccgtggaggacgaggccaccagaggcaccagagccctggaggccaccatcgagtgcatcaagcaggagctgaccgtgttccagagcaaggacgtgcccgagaagaccagcagccccgaggagagcatcagaatgaccaagggcatcaccatggccaccgccaaggccgtggccgccggcaacagctgcagacaggaggacgtgatcgccaccgccaacctgagcagaaaggccgtgagcgacatgctgaccgcctgcaagcaggccagcttccaccccgacgtgagcgacgaggtgagaaccagagccctgagattcggcaccgagtgcaccctgggctacctggacctgctggagcacgtgctggtgatcctgcagaagcccacccccgagttcaagcagcagctggccgccttcagcaagagagtggccggcgccgtgaccgagctgatccaggccgccgaggccatgaagggcaccgagtgggtggaccccgaggaccccaccgtgatcgccgagaccgagctgctgggcgccgccgccagcatcgaggccgccgccaagaagctggagcagctgaagcccagagccaagcccaagcaggccgacgagaccctggacttcgaggagcagatcctggaggccgccaagagcatcgccgccgccaccagcgccctggtgaagagcgccagcgccgcccagagagagctggtggcccagggcaaggtgggcagcatccccgccaacgccgccgacgacggccagtggagccagggcctgatcagcgccgccagaatggtggccgccgccaccagcagcctgtgcgaggccgccaacgccagcgtgcagggccacgccagcgaggagaagctgatcagcagcgccaagcaggtggccgccagcaccgcccagctgctggtggcctgcaaggtgaaggccgaccaggacagcgaggccatgagaagactgcaggccgccggcaacgccgtgaagagagccagcgacaacctggtgagagccgcccagaaggccgccttcggcaaggccgacgacgacgacgtggtggtgaagaccaagttcgtgggcggcatcgcccagatcatcgccgcccaggaggagatgctgaagaaggagagagagctggaggaggccagaaagaagctggcccagatcagacagcagcagtacaagttcctgcccaccgagctgagagaggacgagggctag

SEQ ID NO: 101802 - DNA, 7629 bp, synthetic construct; identical to SEQ ID NO: 101801
  misc_feature 1..7629: note = Description of Artificial Sequence: Synthetic coding sequence
  source 1..7629: mol_type = other DNA

SEQ ID NO: 101803 - DNA, 5190 bp, synthetic construct
  misc_feature 1..5190: note = Description of Artificial Sequence: Synthetic coding sequence
  source 1..5190: mol_type = other DNA
atgaaggtgagcaccctgagagagagcagcgccatggccagccccctgcccagagagatggaggaggagctggtgcccaccggcagcgagcccggcgacaccagagccaagccccccgtgaagcccaagcccagagccctgcccgccaagcccgccctgcccgccaagcccagcctgctggtgcccgtgggccccagaccccccagaggccccctggccgagctgcccagcgccagaaagatgaacatgctggccggcccccagccctacggcggcagcaagagacccctgcccttcgcccccagacccgccgtggaggccagcaccggcggcgaggccacccaggagaccggcaaggaggaggccggcaaggaggagcccccccccctgaccccccccgccagatgcgccgcccccggcggcgtgagaaaggcccccgcccccttcagacccgccagcgagagattcgccgccaccaccgtggaggagatcctggccaagatggagcagcccagaaaggaggtgctggccagccccgacagactgtggggcagcagactgaccttcaaccacgacggcagcagcagatacggccccagaacctacggcaccaccaccgcccccagagacgaggacggcagcaccctgttcagaggctggagccaggagggccccgtgaagagccccgccgagtgcagagaggagcacagcaagacccccgaggagagaagcctgcccagcgacctggccttcaacggcgacctggccaaggccgccagcagcgagctgcccgccgacatcagcaagccctggatccccagcagccccgcccccagcagcgagaacggcggccccgccagccccggcctgcccgccgaggccagcggcagcggccccggcagcccccacctgcacccccccgacaagagcagcccctgccacagccagctgctggaggcccagacccccgaggccagccaggccagcccctgccccgccgtgacccccagcgcccccagcgccgccctgcccgacgagggcagcagacacacccccagccccggcctgcccgccgagggcgcccccgaggcccccagacccagcagccccccccccgaggtgctggagccccacagcctggaccagccccccgccaccagccccagacccctgatcgaggtgggcgagctgctggacctgaccagaaccttccccagcggcggcgaggaggaggccaagggcgacgcccacctgagacccaccagcctggtgcagagaagattcagcgagggcgtgctgcagagccccagccaggaccaggagaagctgggcggcagcctggccgccctgccccagggccagggcagccagctggccctggacagacccttcggcgccgagagcaactggagcctgagccagagcttcgagtggaccttccccaccagacccagcggcctgggcgtgtggagactggacagccccccccccagccccatcaccgaggccagcgaggccgccgaggccgccgaggccggcaacctggccgtgagcagcagagaggagggcgtgagccagcagggccagggcgccggcagcgcccccagcggcagcggcagcagctgggtgcagggcgacgaccccagcatgagcctgacccagaagggcgacggcgagagccagccccagttccccgccgtgcccctggagcccctgcccaccaccgagggcacccccggcctgcccctgcagcaggccgaggagagatacgagagccaggagcccctggccggccaggagagccccctgcccctggccaccagagaggccgccctgcccatcctggagcccgtgctgggccaggagcagcccgccgcccccgaccagccctgcgtgctgttcgccgacgcccccgagcccggccaggccctgcccgtggaggaggaggccgtgaccctggccagagccgagaccacccaggccagaaccgaggcccaggacctgtgcagagccagccccgagccccccggccccgagagcagcagcagatggctggacgacctgctggccagccccccccccagcggcggcggcgccagaagaggcgccggcgccgagctgaaggacacccagagccccagcacctgcagcgagggcctgctgggctggagccagaaggacctgcagagcgagttcggcatcaccggcgacccccagcccagcagcttcagccccagcagctggtgccagggcgccagccaggactacggcctgggcggcgccagccccagaggcgaccccggcctgggcgagagagactggaccagcaagtacggccagggcgccggcgagggcagcaccagagagtgggccagcagatgcggcatcggccaggaggagatggaggccagcagcagccaggaccagagcaaggtgagcgcccccggcgtgctgaccgcccaggacagagtggtgggcaagcccgcccagctgggcacccagagaagccaggaggccgacgtgcaggactgggagttcagaaagagagacagccagggcacctacagcagcagagacgccgagctgcaggaccaggagttcggcaagagagacagcctgggcacctacagcagcagagacgtgagcctgggcgactgggagttcggcaagagagacagcctgggcgcctacgccagccaggacgccaacgagcagggccaggacctgggcaagagagaccaccacggcagatacagcagccaggacgccgacgagcaggactgggagttccagaagagagacgtgagcctgggcacctacggcagcagagccgccgagccccaggagcaggagttcggcaagagcgcctggatcagagactacagcagcggcggcagcagcagaaccctggacgcccaggacagaagcttcggcaccagacccctgagcagcggcttcagccccgaggaggcccagcagcaggacgaggagttcgagaagaagatccccagcgtggaggacagcctgggcgagggcagcagagacgccggcagacccggcgagagaggcagcggcggcctgttcagccccagcaccgcccacgtgcccgacggcgccctgggccagagagaccagagcagctggcagaacagcgacgccagccaggaggtgggcggccaccaggagagacagcaggccggcgcccagggccccggcagcgccgacctggaggacggcgagatgggcaagagaggctgggtgggcgagttcagcctgagcgtgggcccccagagagaggccgccttcagccccggccagcaggactggagcagagacttctgcatcgaggccagcgagagaagctaccagttcggcatcatcggcaacgacagagtgagcggcgccggcttcagccccagcagcaagatggagggcggccacttcgtgccccccggcaagaccaccgccggcagcgtggactggaccgaccagctgggcctgagaaacctggaggtgagcagctgcgtgggcagcggcggcagcagcgaggccagagagagcgccgtgggccagatgggctggagcggcggcctgagcctgagagacatgaacctgaccggctgcctggagagcggcggcagcgaggagcccggcggcatcggcgtgggcgagaaggactggaccagcgacgtgaacgtgaagagcaaggacctggccgaggtgggcgagggcggcggccacagccaggccagagagagcggcgtgggccagaccgactggagcggcgtggaggccggcgagttcctgaagagcagagagagaggcgtgggccaggccgactggacccccgacctgggcctgagaaacatggcccccggcgccgtgtgcagccccggcgagagcaaggagctgggcgtgggccagatggactggggcaacaacctgggcctgagagacctggaggtgacctgcgaccccgacagcggcggcagccagggcctgagaggctgcggcgtgggccagatggactggacccaggacctggccccccagaacgtggagctgttcggcgcccccagcgaggccagagagcacggcgtgggcggcgtgagccagtgccccgagcccggcctgagacacaacggcagcctgagccccggcctggaggccagagaccccctggaggccagagagctgggcgtgggcgagaccagcggccccgagacccagggcgaggactacagcagcagcagcctggagccccaccccgccgaccccggcatggagaccggcgaggccctgagcttcggcgccagccccggcagatgccccgccagacccccccccagcggcagccagggcctgctggaggagatgctggccgccagcagcagcaaggccgtggccagaagagagagcgccgccagcggcctgggcggcctgctggaggaggagggcgccggcgccggcgccgcccaggaggaggtgctggagcccggcagagacagcccccccagctggagaccccagcccgacggcgaggccagccagaccgaggacgtggacggcacctggggcagcagcgccgccagatggagcgaccagggccccgcccagaccagcagaagacccagccagggcccccccgccagaagccccagccaggacttcagcttcatcgaggacaccgagatcctggacagcgccatgtacagaagcagagccaacctgggcagaaagagaggccacagagcccccgtgatcagacccggcggcaccctgggcctgagcgaggccgccgacagcgacgcccacctgttccaggacagcaccgagcccagagccagcagagtgcccagcagcgacgaggaggtggtggaggagccccagagcagaagaaccagaatgagcctgggcaccaagggcctgaaggtgaacctgttccccggcctgagccccagcgccctgaaggccaagctgagacccagaaacagaagcgccgaggagggcgagctggccgagagcaagagcagccagaaggagagcgccgtgcagagaagcaagagctgcaaggtgcccggcctgggcaagcccctgaccctgccccccaagcccgagaagagcagcggcagcgagggcagcagccccaactggctgcaggccctgaagctgaagaagaagaaggtgtag

SEQ ID NO: 101804 - DNA, 432 bp, synthetic construct
  misc_feature 1..432: note = Description of Artificial Sequence: Synthetic coding sequence
  source 1..432: mol_type = other DNA
atgaaggtgagcaccctgagagagagcagcgccatggccagccccctgcccagagagatggaggaggagctggtgcccaccggcagcgagcccggcgacaccagagccaagccccccgtgaagcccaagcccagagccctgcccgccaagcccgccctgcccgccaagcccagcctgctggtgcccgtgggccccagaccccccagaggccccctggccgagctgcccagcgccagaaagatgaacatgctggccggcccccagccctacggcggcagcaagagacccctgcccttcgcccccagacccgccgtggaggccagcaccggcggcgaggccacccaggagaccggcaaggaggaggccggcaaggaggagcccccccccctgaccccccccgccagatgcgccgcccccggcggcgtgagatag

SEQ ID NO: 101805 - DNA, 5190 bp, synthetic construct; identical to SEQ ID NO: 101803
  misc_feature 1..5190: note = Description of Artificial Sequence: Synthetic coding sequence
  source 1..5190: mol_type = other DNA

SEQ ID NO: 101806 - DNA, 3006 bp, synthetic construct
  misc_feature 1..3006: note = Description of Artificial Sequence: Synthetic coding sequence
  source 1..3006: mol_type = other DNA
atgcccagcaccaacagagccggcagcctgaaggaccccgagatcgccgagctgttcttcaaggaggaccccgagaagctgttcaccgacctgagagagatcggccacggcagcttcggcgccgtgtacttcgccagagacgtgagaaccaacgaggtggtggccatcaagaagatgagctacagcggcaagcagagcaccgagaagtggcaggacatcatcaaggaggtgaagttcctgcagagaatcaagcaccccaacagcatcgagtacaagggctgctacctgagagagcacaccgcctggctggtgatggagtactgcctgggcagcgccagcgacctgctggaggtgcacaagaagcccctgcaggaggtggagatcgccgccatcacccacggcgccctgcagggcctggcctacctgcacagccacaccatgatccacagagacatcaaggccggcaacatcctgctgaccgagcccggccaggtgaagctggccgacttcggcagcgccagcatggccagccccgccaacagcttcgtgggcaccccctactggatggcccccgaggtgatcctggccatggacgagggccagtacgacggcaaggtggacgtgtggagcctgggcatcacctgcatcgagctggccgagagaaagccccccctgttcaacatgaacgccatgagcgccctgtaccacatcgcccagaacgagagccccaccctgcagagcaacgagtggagcgactacttcagaaacttcgtggacagctgcctgcagaagatcccccaggacagacccaccagcgaggagctgctgaagcacatcttcgtgctgagagagagacccgagaccgtgctgatcgacctgatccagagaaccaaggacgccgtgagagagctggacaacctgcagtacagaaagatgaagaagctgctgttccaggaggcccacaacggccccgccgtggaggcccaggaggaggaggaggagcaggaccacggcgtgggcagaaccggcaccgtgaacagcgtgggcagcaaccagagcatccccagcatgagcatcagcgccagcagccagagcagcagcgtgaacagcctgcccgacgtgagcgacgacaagagcgagctggacatgatggagggcgaccacaccgtgatgagcaacagcagcgtgatccacctgaagcccgaggaggagaactacagagaggagggcgaccccagaaccagagccagcgacccccagagccccccccaggtgagcagacacaagagccactacagaaacagagagcacttcgccaccatcagaaccgccagcctggtgaccagacagatgcaggagcacgagcaggacagcgagctgagagagcagatgagcggctacaagagaatgagaagacagcaccagaagcagctgatgaccctggagaacaagctgaaggccgagatggacgagcacagactgagactggacaaggacctggagacccagagaaacaacttcgccgccgagatggagaagctgatcaagaagcaccaggccgccatggagaaggaggccaaggtgatgagcaacgaggagaagaagttccagcagcacatccaggcccagcagaagaaggagctgaacagcttcctggagagccagaagagagagtacaagctgagaaaggagcagctgaaggaggagctgaacgagaaccagagcacccccaagaaggagaagcaggagtggctgagcaagcagaaggagaacatccagcacttccaggccgaggaggaggccaacctgctgagaagacagagacagtacctggagctggagtgcagaagattcaagagaagaatgctgctgggcagacacaacctggagcaggacctggtgagagaggagctgaacaagagacagacccagaaggacctggagcacgccatgctgctgagacagcacgagagcatgcaggagctggagttcagacacctgaacaccatccagaagatgagatgcgagctgatcagactgcagcaccagaccgagctgaccaaccagctggagtacaacaagagaagagagagagagctgagaagaaagcacgtgatggaggtgagacagcagcccaagagcctgaagagcaaggagctgcagatcaagaagcagttccaggacacctgcaagatccagaccagacagtacaaggccctgagaaaccacctgctggagaccacccccaagagcgagcacaaggccgtgctgaagagactgaaggaggagcagaccagaaagctggccatcctggccgagcagtacgaccacagcatcaacgagatgctgagcacccaggccctgagactggacgaggcccaggaggccgagtgccaggtgctgaagatgcagctgcagcaggagctggagctgctgaacgcctaccagagcaagatcaagatgcaggccgaggcccagcacgacagagagctgagagagctggagcagagagtgagcctgagaagagccctgctggagcagaagatcgaggaggagatgctggccctgcagaacgagagaaccgagagaatcagaagcctgctggagagacaggccagagagatcgaggccttcgacagcgagagcatgagactgggcttcagcaacatggtgctgagcaacctgagccccgaggccttcagccacagctaccccggcgccagcggctggagccacaaccccaccggcggccccggcccccactggggccaccccatgggcggccccccccaggcctggggccaccccatgcagggcggcccccagccctggggccaccccagcggccccatgcagggcgtgcccagaggcagcagcatgggcgtgagaaacagcccccaggccctgagaagaaccgccagcggcggcagaaccgagcagggcatgagcagaagcaccagcgtgaccagccagatcagcaacggcagccacatgagctacacctag

SEQ ID NO: 101807 - DNA, 2562 bp, synthetic construct
  misc_feature 1..2562: note = Description of Artificial Sequence: Synthetic coding sequence
  source 1..2562: mol_type = other DNA
atgcccagcaccaacagagccggcagcctgaaggaccccgagatcgccgagctgttcttcaaggaggaccccgagaagctgttcaccgacctgagagagatcggccacggcagcttcggcgccgtgtacttcgccagagacgtgagaaccaacgaggtggtggccatcaagaagatgagctacagcggcaagcagagcaccgagaagtggcaggacatcatcaaggaggtgaagttcctgcagagaatcaagcaccccaacagcatcgagtacaagggctgctacctgagagagcacaccgcctggctggtgatggagtactgcctgggcagcgccagcgacctgctggaggtgcacaagaagcccctgcaggaggtggagatcgccgccatcacccacggcgccctgcagggcctggcctacctgcacagccacaccatgatccacagagacatcaaggccggcaacatcctgctgaccgagcccggccaggtgaagctggccgacttcggcagcgccagcatggccagccccgccaacagcttcgtgggcaccccctactggatggcccccgaggtgatcctggccatggacgagggccagtacgacggcaaggtggacgtgtggagcctgggcatcacctgcatcgagctggccgagagaaagccccccctgttcaacatgaacgccatgagcgccctgtaccacatcgcccagaacgagagccccaccctgcagagcaacgagtggagcgactacttcagaaacttcgtggacagctgcctgcagaagatcccccaggacagacccaccagcgaggagctgctgaagcacatcttcgtgctgagagagagacccgagaccgtgctgatcgacctgatccagagaaccaaggacgccgtgagagagctggacaacctgcagtacagaaagatgaagaagctgctgttccaggaggcccacaacggccccgccgtggaggcccaggaggaggaggaggagcaggaccacggcgtgggcagaaccggcaccgtgaacagcgtgggcagcaaccagagcatccccagcatgagcatcagcgccagcagccagagcagcagcgtgaacagcctgcccgacgtgagcgacgacaagagcgagctggacatgatggagggcgaccacaccgtgatgagcaacagcagcgtgatccacctgaagcccgaggaggagaactacagagaggagggcgaccccagaaccagagccagcgacccccagagccccccccaggtgagcagacacaagagccactacagaaacagagagcacttcgccaccatcagaaccgccagcctggtgaccagacagatgcaggagcacgagcaggacagcgagctgagagagcagatgagcggctacaagagaatgagaagacagcaccagaagcagctgatgaccctggagaacaagctgaaggccgagatggacgagcacagactgagactggacaaggacctggagacccagagaaacaacttcgccgccgagatggagaagctgatcaagaagcaccaggccgccatggagaaggaggccaaggtgatgagcaacgaggagaagaagttccagcagcacatccaggcccagcagaagaaggagctgaacagcttcctggagagccagaagagagagtacaagctgagaaaggagcagctgaaggagagcaaggagctgcagatcaagaagcagttccaggacacctgcaagatccagaccagacagtacaaggccctgagaaaccacctgctggagaccacccccaagagcgagcacaaggccgtgctgaagagactgaaggaggagcagaccagaaagctggccatcctggccgagcagtacgaccacagcatcaacgagatgctgagcacccaggccctgagactggacgaggcccaggaggccgagtgccaggtgctgaagatgcagctgcagcaggagctggagctgctgaacgcctaccagagcaagatcaagatgcaggccgaggcccagcacgacagagagctgagagagctggagcagagagtgagcctgagaagagccctgctggagcagaagatcgaggaggagatgctggccctgcagaacgagagaaccgagagaatcagaagcctgctggagagacaggccagagagatcgaggccttcgacagcgagagcatgagactgggcttcagcaacatggtgctgagcaacctgagccccgaggccttcagccacagctaccccggcgccagcggctggagccacaaccccaccggcggccccggcccccactggggccaccccatgggcggccccccccaggcctggggccaccccatgcagggcggcccccagccctggggccaccccagcggccccatgcagggcgtgcccagaggcagcagcatgggcgtgagaaacagcccccaggccctgagaagaaccgccagcggcggcagaaccgagcagggcatgagcagaagcaccagcgtgaccagccagatcagcaacggcagccacatgagctacacctag

SEQ ID NO: 101808 - DNA, 3150 bp, synthetic construct
  misc_feature 1..3150: note = Description of Artificial Sequence: Synthetic coding sequence
  source 1..3150: mol_type = other DNA
atgcccgccggcggcagagccggcagcctgaaggaccccgacgtggccgagctgttcttcaaggacgaccccgagaagctgttcagcgacctgagagagatcggccacggcagcttcggcgccgtgtacttcgccagagacgtgagaaacagcgaggtggtggccatcaagaagatgagctacagcggcaagcagagcaacgagaagtggcaggacatcatcaaggaggtgagattcctgcagaagctgagacaccccaacaccatccagtacagaggctgctacctgagagagcacaccgcctggctggtgatggagtactgcctgggcagcgccagcgacctgctggaggtgcacaagaagcccctgcaggaggtggagatcgccgccgtgacccacggcgccctgcagggcctggcctacctgcacagccacaacatgatccacagagacgtgaaggccggcaacatcctgctgagcgagcccggcctggtgaagctgggcgacttcggcagcgccagcatcatggcccccgccaacagcttcgtgggcaccccctactggatggcccccgaggtgatcctggccatggacgagggccagtacgacggcaaggtggacgtgtggagcctgggcatcacctgcatcgagctggccgagagaaagccccccctgttcaacatgaacgccatgagcgccctgtaccacatcgcccagaacgagagccccgtgctgcagagcggccactggagcgagtacttcagaaacttcgtggacagctgcctgcagaagatcccccaggacagacccaccagcgaggtgctgctgaagcacagattcgtgctgagagagagaccccccaccgtgatcatggacctgatccagagaaccaaggacgccgtgagagagctggacaacctgcagtacagaaagatgaagaagatcctgttccaggaggcccccaacggccccggcgccgaggcccccgaggaggaggaggaggccgagccctacatgcacagagccggcaccctgaccagcctggagagcagccacagcgtgcccagcatgagcatcagcgccagcagccagagcagcagcgtgaacagcctggccgacgccagcgacaacgaggaggaggaggaggaggaggaggaggaggaggaggaggaggagggccccgaggccagagagatggccatgatgcaggagggcgagcacaccgtgaccagccacagcagcatcatccacagactgcccggcagcgacaacctgtacgacgacccctaccagcccgagatcacccccagccccctgcagccccccgccgcccccgcccccaccagcaccaccagcagcgccagaagaagagcctactgcagaaacagagaccacttcgccaccatcagaaccgccagcctggtgagcagacagatccaggagcacgagcaggacagcgccctgagagagcagctgagcggctacaagagaatgagaagacagcaccagaagcagctgctggccctggagagcagactgagaggcgagagagaggagcacagcgccagactgcagagagagctggaggcccagagagccggcttcggcgccgaggccgagaagctggccagaagacaccaggccatcggcgagaaggaggccagagccgcccaggccgaggagagaaagttccagcagcacatcctgggccagcagaagaaggagctggccgccctgctggaggcccagaagagaacctacaagctgagaaaggagcagctgaaggaggagctgcaggagaaccccagcacccccaagagagagaaggccgagtggctgctgagacagaaggagcagctgcagcagtgccaggccgaggaggaggccggcctgctgagaagacagagacagtacttcgagctgcagtgcagacagtacaagagaaagatgctgctggccagacacagcctggaccaggacctgctgagagaggacctgaacaagaagcagacccagaaggacctggagtgcgccctgctgctgagacagcacgaggccaccagagagctggagctgagacagctgcaggccgtgcagagaaccagagccgagctgaccagactgcagcaccagaccgagctgggcaaccagctggagtacaacaagagaagagagcaggagctgagacagaagcacgccgcccaggtgagacagcagcccaagagcctgaagagcaaggagctgcagatcaagaagcagttccaggagacctgcaagatccagaccagacagtacaaggccctgagagcccacctgctggagaccacccccaaggcccagcacaagagcctgctgaagagactgaaggaggagcagaccagaaagctggccatcctggccgagcagtacgaccagagcatcagcgagatgctgagcagccaggccctgagactggacgagacccaggaggccgagttccaggccctgagacagcagctgcagcaggagctggagctgctgaacgcctaccagagcaagatcaagatcagaaccgagagccagcacgagagagagctgagagagctggagcagagagtggccctgagaagagccctgctggagcagagagtggaggaggagctgctggccctgcagaccggcagaagcgagagaatcagaagcctgctggagagacaggccagagagatcgaggccttcgacgccgagagcatgagactgggcttcagcagcatggccctgggcggcatccccgccgaggccgccgcccagggctaccccgcccccccccccgcccccgcctggcccagcagacccgtgcccagaagcggcgcccactggagccacggcccccccccccccggcatgcccccccccgcctggagacagcccagcctgctggccccccccggcccccccaactggctgggcccccccacccagagcggcacccccagaggcggcgccctgctgctgctgagaaacagcccccagcccctgagaagagccgccagcggcggcagcggcagcgagaacgtgggcccccccgccgccgccgtgcccggccccctgagcagaagcaccagcgtggccagccacatcctgaacggcagcagccacttctacagctag

SEQ ID NO: 101809 - DNA, 3708 bp, synthetic construct
  misc_feature 1..3708: note = Description of Artificial Sequence: Synthetic coding sequence
  source 1..3708: mol_type = other DNA
atgcccgccggcggcagagccggcagcctgaaggaccccgacgtggccgagctgttcttcaaggacgaccccgagaagctgttcagcgacctgagagagatcggccacggcagcttcggcgccgtgtacttcgccagagacgtgagaaacagcgaggtggtggccatcaagaagatgagctacagcggcaagcagagcaacgagaagtggcaggacatcatcaaggaggtgagattcctgcagaagctgagacaccccaacaccatccagtacagaggctgctacctgagagagcacaccgcctggctggtgatggagtactgcctgggcagcgccagcgacctgctggaggtgcacaagaagcccctgcaggaggtggagatcgccgccgtgacccacggcgccctgcagggcctggcctacctgcacagccacaacatgatccacagagacgtgaaggccggcaacatcctgctgagcgagcccggcctggtgaagctgggcgacttcggcagcgccagcatcatggcccccgccaacagcttcgtgggcaccccctactggatggcccccgaggtgatcctggccatggacgagggccagtacgacggcaaggtggacgtgtggagcctgggcatcacctgcatcgagctggccgagagaaagccccccctgttcaacatgaacgccatgagcgccctgtaccacatcgcccagaacgagagccccgtgctgcagagcggccactggagcgagtacttcagaaacttcgtggacagctgcctgcagaagatcccccaggacagacccaccagcgaggtgctgctgaagcacagattcgtgctgagagagagaccccccaccgtgatcatggacctgatccagagaaccaaggacgccgtgagagagctggacaacctgcagtacagaaagatgaagaagatcctgttccaggaggcccccaacggccccggcgccgaggcccccgaggaggaggaggaggccgagccctacatgcacagagccggcaccctgaccagcctggagagcagccacagcgtgcccagcatgagcatcagcgccagcagccagagcagcagcgtgaacagcctggccgacgccagcgacaacgaggaggaggaggaggaggaggaggaggaggaggaggaggaggagggccccgaggccagagagatggccatgatgcaggagggcgagcacaccgtgaccagccacagcagcatcatccacagactgcccggcagcgacaacctgtacgacgacccctaccagcccgagatcacccccagccccctgcagccccccgccgcccccgcccccaccagcaccaccagcagcgccagaagaagagcctactgcagaaacagagaccacttcgccaccatcagaaccgccagcctggtgagcagacagatccaggagcacgagcaggacagcgccctgagagagcagctgagcggctacaagagaatgagaagacagcaccagaagcagctgctggccctggagagcagactgagaggcgagagagaggagcacagcgccagactgcagagagagctggaggcccagagagccggcttcggcgccgaggccgagaagctggccagaagacaccaggccatcggcgagaaggaggccagagccgcccaggccgaggagagaaagttccagcagcacatcctgggccagcagaagaaggagctggccgccctgctggaggcccagaagagaacctacaagctgagaaaggagcagctgaaggaggagctgcaggagaaccccagcacccccaagagagagaaggccgagtggctgctgagacagaaggagcagctgcagcagtgccaggccgaggaggaggccggcctgctgagaagacagagacagtacttcgagctgcagtgcagacagtacaagagaaagatgctgctggccagacacagcctggaccaggacctgctgagagaggacctgaacaagaagcagacccagaaggacctggagtgcgccctgctgctgagacagcacgaggccaccagagagctggagctgagacagctgcaggccgtgcagagaaccagagccgagctgaccagactgcagcaccagaccgagctgggcaaccagctggagtacaacaagagaagagagcaggagctgagacagaagcacgccgcccaggtgagacagcagcccaagagcctgaaggtgagagccggccagagaccccccggcctgcccctgcccatccccggcgccctgggcccccccaacaccggcacccccatcgagcagcagccctgcagccccggccaggaggccgtgctggaccagagaatgctgggcgaggaggaggaggccgtgggcgagagaagaatcctgggcaaggagggcgccaccctggagcccaagcagcagagaatcctgggcgaggagagcggcgcccccagccccagcccccagaagcacggcagcctggtggacgaggaggtgtggggcctgcccgaggagatcgaggagctgagagtgcccagcctggtgccccaggagagaagcatcgtgggccaggaggaggccggcacctggagcctgtggggcaaggaggacgagagcctgctggacgaggagttcgagctgggctgggtgcagggccccgccctgacccccgtgcccgaggaggaggaggaggaggaggagggcgcccccatcggcacccccagagaccccggcgacggctgccccagccccgacatcccccccgagcccccccccacccacctgagaccctgccccgccagccagctgcccggcctgctgagccacggcctgctggccggcctgagcttcgccgtgggcagcagcagcggcctgctgcccctgctgctgctgctgctgctgcccctgctggccgcccagggcggcggcggcctgcaggccgccctgctggccctggaggtgggcctggtgggcctgggcgccagctacctgctgctgtgcaccgccctgcacctgcccagcagcctgttcctgctgctggcccagggcaccgccctgggcgccgtgctgggcctgagctggagaagaggcctgatgggcgtgcccctgggcctgggcgccgcctggctgctggcctggcccggcctggccctgcccctggtggccatggccgccggcggcagatgggtgagacagcagggccccagagtgagaagaggcatcagcagactgtggctgagagtgctgctgagactgagccccatggccttcagagccctgcagggctgcggcgccgtgggcgacagaggcctgttcgccctgtaccccaagaccaacaaggacggcttcagaagcagactgcccgtgcccggccccagaagaagaaaccccagaaccacccagcaccccctggccctgctggccagagtgtgggtgctgtgcaagggctggaactggagactggccagagccagccagggcctggccagccacctgcccccctgggccatccacaccctggccagctggggcctgctgagaggcgagagacccaccagaatccccagactgctgcccagaagccagagacagctgggcccccccgccagcagacagcccctgcccggcaccctggccggcagaagaagcagaaccagacagagcagagccctgcccccctggagatag

SEQ ID NO: 101810 - DNA, 2268 bp, synthetic construct
  misc_feature 1..2268: note = Description of Artificial Sequence: Synthetic coding sequence
  source 1..2268: mol_type = other DNA
atgcccgccggcggcagagccggcagcctgaaggaccccgacgtggccgagctgttcttcaaggacgaccccgagaagctgttcagcgacctgagagagatcggccacggcagcttcggcgccgtgtacttcgccagagacgtgagaaacagcgaggtggtggccatcaagaagatgagctacagcggcaagcagagcaacgagaagtggcaggacatcatcaaggaggtgagattcctgcagaagctgagacaccccaacaccatccagtacagaggctgctacctgagagagcacaccgcctggctggtgatggagtactgcctgggcagcgccagcgacctgctggaggtgcacaagaagcccctgcaggaggtggagatcgccgccgtgacccacggcgccctgcagggcctggcctacctgcacagccacaacatgatccacagagacgtgaaggccggcaacatcctgctgagcgagcccggcctggtgaagctgggcgacttcggcagcgccagcatcatggcccccgccaacagcttcgtgggcaccccctactggatggcccccgaggtgatcctggccatggacgagggccagtacgacggcaaggtggacgtgtggagcctgggcatcacctgcatcgagctggccgagagaaagccccccctgttcaacatgaacgccatgagcgccctgtaccacatcgcccagaacgagagccccgtgctgcagagcggccactggagcgagtacttcagaaacttcgtggacagctgcctgcagaagatcccccaggacagacccaccagcgaggtgctgctgaagcacagattcgtgctgagagagagaccccccaccgtgatcatggacctgatccagagaaccaaggacgccgtgagagagctggacaacctgcagtacagaaagatgaagaagatcctgttccaggaggcccccaacggccccggcgccgaggcccccgaggaggaggaggaggccgagccctacatgcacagagccggcaccctgaccagcctggagagcagccacagcgtgcccagcatgagcatcagcgccagcagccagagcagcagcgtgaacagcctggccgacgccagcgacaacgaggaggaggaggaggaggaggaggaggaggaggaggaggaggagggccccgaggccagagagatggccatgatgcaggagggcgagcacaccgtgaccagccacagcagcatcatccacagactgcccggcagcgacaacctgtacgacgacccctaccagcccgagatcacccccagccccctgcagccccccgccgcccccgcccccaccagcaccaccagcagcgccagaagaagagcctactgcagaaacagagaccacttcgccaccatcagaaccgccagcctggtgagcagacagatccaggagcacgagcaggacagcgccctgagagagcagctgagcggctacaagagaatgagaagacagcaccagaagcagctgctggccctggagagcagactgagaggcgagagagaggagcacagcgccagactgcagagagagctggaggcccagagagccggcttcggcgccgaggccgagaagctggccagaagacaccaggccatcggcgagaaggaggccagagccgcccaggccgaggagagaaagttccagcagcacatcctgggccagcagaagaaggagctggccgccctgctggaggcccagaagagaacctacaagctgagaaaggagcagctgaaggaggagctgcaggagaaccccagcacccccaagagagagaaggccgagtggctgctgagacagaaggagcagctgcagcagtgccaggccgaggaggaggccggcctgctgagaagacagagacagtacttcgagctgcagtgcagacagtacaagagaaagatgctgctggccagacacagcctggaccaggacctgctgagagaggacctgaacaagaagcagacccagaaggacctggagtgcgccctgctgctgagacagcacgaggccaccagagagctggagctgagacagctgcaggccgtgcagagaaccagagccgagctgaccagactgcagcaccagaccgagctgggcaaccagctggagtacaacaagagaagagagcaggagctgagacagaagcacgccgcccaggtgagacagcagcccaagagcctgaagaagaagaccaacaccaacaagatcagcgagagatag

SEQ ID NO: 101811 - DNA, 3369 bp, synthetic construct
  misc_feature 1..3369: note = Description of Artificial Sequence: Synthetic coding sequence
  source 1..3369: mol_type = other DNA
atgcccgccggcggcagagccggcagcctgaaggaccccgacgtggccgagctgttcttcaaggacgaccccgagaagctgttcagcgacctgagagagatcggccacggcagcttcggcgccgtgtacttcgccagagacgtgagaaacagcgaggtggtggccatcaagaagatgagctacagcggcaagcagagcaacgagaagtggcaggacatcatcaaggaggtgagattcctgcagaagctgagacaccccaacaccatccagtacagaggctgctacctgagagagcacaccgcctggctggtgatggagtactgcctgggcagcgccagcgacctgctggaggtgcacaagaagcccctgcaggaggtggagatcgccgccgtgacccacggcgccctgcagggcctggcctacctgcacagccacaacatgatccacagagacgtgaaggccggcaacatcctgctgagcgagcccggcctggtgaagctgggcgacttcggcagcgccagcatcatggcccccgccaacagcttcgtgggcaccccctactggatggcccccgaggtgatcctggccatggacgagggccagtacgacggcaaggtggacgtgtggagcctgggcatcacctgcatcgagctggccgagagaaagccccccctgttcaacatgaacgccatgagcgccctgtaccacatcgcccagaacgagagccccgtgctgcagagcggccactggagcgagtacttcagaaacttcgtggacagctgcctgcagaagatcccccaggacagacccaccagcgaggtgctgctgaagcacagattcgtgctgagagagagaccccccaccgtgatcatggacctgatccagagaaccaaggacgccgtgagagagctggacaacctgcagtacagaaagatgaagaagatcctgttccaggaggcccccaacggccccggcgccgaggcccccgaggaggaggaggaggccgagccctacatgcacagagccggcaccctgaccagcctggagagcagccacagcgtgcccagcatgagcatcagcgccagcagccagagcagcagcgtgaacagcctggccgacgccagcgacaacgaggaggaggaggaggaggaggaggaggaggaggaggaggaggagggccccgaggccagagagatggccatgatgcaggagggcgagcacaccgtgaccagccacagcagcatcatccacagactgcccggcagcgacaacctgtacgacgacccctaccagcccgagatcacccccagccccctgcagccccccgccgcccccgcccccaccagcaccaccagcagcgccagaagaagagcctactgcagaaacagagaccacttcgccaccatcagaaccgccagcctggtgagcagacagatccaggagcacgagcaggacagcgccctgagagagcagctgagcggctacaagagaatgagaagacagcaccagaagcagctgctggccctggagagcagactgagaggcgagagagaggagcacagcgccagactgcagagagagctggaggcccagagagccggcttcggcgccgaggccgagaagctggccagaagacaccaggccatcggcgagaaggaggccagagccgcccaggccgaggagagaaagttccagcagcacatcctgggccagcagaagaaggagctggccgccctgctggaggcccagaagagaacctacaagctgagaaaggagcagctgaaggaggagctgcaggagaaccccagcacccccaagagagagaaggccgagtggctgctgagacagaaggagcagctgcagcagtgccaggccgaggaggaggccggcctgctgagaagacagagacagtacttcgagctgcagtgcagacagtacaagagaaagatgctgctggccagacacagcctggaccaggacctgctgagagaggacctgaacaagaagcagacccagaaggacctggagtgcgccctgctgctgagacagcacgaggccaccagagagctggagctgagacagctgcaggccgtgcagagaaccagagccgagctgaccagactgcagcaccagaccgagctgggcaaccagctggagtacaacaagagaagagagcaggagctgagacagaagcacgccgcccaggtgagacagcagcccaagagcctgaaggagagaagcatcgtgggccaggaggaggccggcacctggagcctgtggggcaaggaggacgagagcctgctggacgaggagttcgagctgggctgggtgcagggccccgccctgacccccgtgcccgaggaggaggaggaggaggaggagggcgcccccatcggcacccccagagaccccggcgacggctgccccagccccgacatcccccccgagcccccccccacccacctgagaccctgccccgccagccagctgcccggcctgctgagccacggcctgctggccggcctgagcttcgccgtgggcagcagcagcggcctgctgcccctgctgctgctgctgctgctgcccctgctggccgcccagggcggcggcggcctgcaggccgccctgctggccctggaggtgggcctggtgggcctgggcgccagctacctgctgctgtgcaccgccctgcacctgcccagcagcctgttcctgctgctggcccagggcaccgccctgggcgccgtgctgggcctgagctggagaagaggcctgatgggcgtgcccctgggcctgggcgccgcctggctgctggcctggcccggcctggccctgcccctggtggccatggccgccggcggcagatgggtgagacagcagggccccagagtgagaagaggcatcagcagactgtggctgagagtgctgctgagactgagccccatggccttcagagccctgcagggctgcggcgccgtgggcgacagaggcctgttcgccctgtaccccaagaccaacaaggacggcttcagaagcagactgcccgtgcccggccccagaagaagaaaccccagaaccacccagcaccccctggccctgctggccagagtgtgggtgctgtgcaagggctggaactggagactggccagagccagccagggcctggccagccacctgcccccctgggccatccacaccctggccagctggggcctgctgagaggcgagagacccaccagaatccccagactgctgcccagaagccagagacagctgggcccccccgccagcagacagcccctgcccggcaccctggccggcagaagaagcagaaccagacagagcagagccctgcccccctggagatag

SEQ ID NO: 101812 - DNA, 1401 bp, synthetic construct
  misc_feature 1..1401: note = Description of Artificial Sequence: Synthetic coding sequence
  source 1..1401: mol_type = other DNA
atgaagagcctgagcctgctgctggccgtggccctgggcctggccaccgccgtgagcgccggccccgccgtgatcgagtgctggttcgtggaggacgccagcggcaagggcctggccaagagacccggcgccctgctgctgagacagggccccggcgagcccccccccagacccgacctggaccccgagctgtacctgagcgtgcacgaccccgccggcgccctgcaggccgccttcagaagataccccagaggcgcccccgccccccactgcgagatgagcagattcgtgcccctgcccgccagcgccaagtgggccagcggcctgacccccgcccagaactgccccagagccctggacggcgcctggctgatggtgagcatcagcagccccgtgctgagcctgagcagcctgctgagaccccagcccgagccccagcaggagcccgtgctgatcaccatggccaccgtggagatgggcttccaccacgtgggccaggccgccctggagctgctgaccagcgtggtgctgaccgtgctgacccacacccccgcccccagagtgagactgggccaggacgccctgctggacctgagcttcgcctacatgccccccaccagcgaggccgccagcagcctggcccccggccccccccccttcggcctggagtggagaagacagcacctgggcaagggccacctgctgctggccgccacccccggcctgaacggccagatgcccgccgcccaggagggcgccgtggccttcgccgcctgggacgacgacgagccctggggcccctggaccggcaacggcaccttctggctgcccagagtgcagcccttccaggagggcacctacctggccaccatccacctgccctacctgcagggccaggtgaccctggagctggccgtgtacaagccccccaaggtgagcctgatgcccgccaccctggccagagccgcccccggcgaggccccccccgagctgctgtgcctggtgagccacttctaccccagcggcggcctggaggtggagtgggagctgagaggcggccccggcggcagaagccagaaggccgagggccagagatggctgagcgccctgagacaccacagcgacggcagcgtgagcctgagcggccacctgcagcccccccccgtgaccaccgagcagcacggcgccagatacgcctgcagaatccaccaccccagcctgcccgccagcggcagaagcgccgaggtgaccctggaggtggccggcctgagcggccccagcctggaggacagcgtgggcctgttcctgagcgccttcctgctgctgggcctgttcaaggccctgggctgggccgccgtgtacctgagcacctgcaaggacagcaagaagaaggccgagtag

SEQ ID NO: 101813 - DNA, 1347 bp, synthetic construct
  misc_feature 1..1347: note = Description of Artificial Sequence: Synthetic coding sequence
  source 1..1347: mol_type = other DNA
atgaagagcctgagcctgctgctggccgtggccctgggcctggccaccgccgtgagcgccggccccgccgtgatcgagtgctggttcgtggaggacgccagcggcaagggcctggccaagagacccggcgccctgctgctgagacagggccccggcgagcccccccccagacccgacctggaccccgagctgtacctgagcgtgcacgaccccgccggcgccctgcaggccgccttcagaagataccccagaggcgcccccgccccccactgcgagatgagcagattcgtgcccctgcccgccagcgccaagtgggccagcggcctgacccccgcccagaactgccccagagccctggacggcgcctggctgatggtgagcatcagcagccccgtgctgagcctgagcagcctgctgagaccccagcccgagccccagcaggagcccgtgctgatcaccatggccaccgtggtgctgaccgtgctgacccacacccccgcccccagagtgagactgggccaggacgccctgctggacctgagcttcgcctacatgccccccaccagcgaggccgccagcagcctggcccccggccccccccccttcggcctggagtggagaagacagcacctgggcaagggccacctgctgctggccgccacccccggcctgaacggccagatgcccgccgcccaggagggcgccgtggccttcgccgcctgggacgacgacgagccctggggcccctggaccggcaacggcaccttctggctgcccagagtgcagcccttccaggagggcacctacctggccaccatccacctgccctacctgcagggccaggtgaccctggagctggccgtgtacaagccccccaaggtgagcctgatgcccgccaccctggccagagccgcccccggcgaggccccccccgagctgctgtgcctggtgagccacttctaccccagcggcggcctggaggtggagtgggagctgagaggcggccccggcggcagaagccagaaggccgagggccagagatggctgagcgccctgagacaccacagcgacggcagcgtgagcctgagcggccacctgcagcccccccccgtgaccaccgagcagcacggcgccagatacgcctgcagaatccaccaccccagcctgcccgccagcggcagaagcgccgaggtgaccctggaggtggccggcctgagcggccccagcctggaggacagcgtgggcctgttcctgagcgccttcctgctgctgggcctgttcaaggccctgggctgggccgccgtgtacctgagcacctgcaaggacagcaagaagaaggccgagtag

SEQ ID NO: 101814 - DNA, 1515 bp, synthetic construct
  misc_feature 1..1515: note = Description of Artificial Sequence: Synthetic coding sequence
  source 1..1515: mol_type = other DNA
atgaagagcctgagcctgctgctggccgtggccctgggcctggccaccgccgtgagcgccggccccgccgtgatcgagtgctggttcgtggaggacgccagcggcaagggcctggccaagagacccggcgccctgctgctgagacagggccccggcgagcccccccccagacccgacctggaccccgagctgtacctgagcgtgcacgaccccgccggcgccctgcaggccgccttcagaagataccccagaggcgcccccgccccccactgcgagatgagcagattcgtgcccctgcccgccagcgccaagtgggccagcggcctgacccccgcccagaactgccccagagccctggacggcgcctggctgatggtgagcatcagcagccccgtgctgagcctgagcagcctgctgagaccccagcccgagccccagcaggagcccgtgctgatcaccatggccaccgtggtgctgaccgtgctgacccacacccccgcccccagagtgagactgggccaggacgccctgctggacctgagcttcgcctacatgccccccaccagcgaggccgccagcagcctggcccccggccccccccccttcggcctggagtggagaagacagcacctgggcaagggccacctgctgctggccgccacccccggcctgaacggccagatgcccgccgcccaggagggcgccgtggccttcgccgcctgggacgacgacgagccctggggcccctggaccggcaacggcaccttctggctgcccaccgtgcagcccttccaggagggcacctacctggccaccatccacctgccctacctgcagggccaggtgaccctggagctggccgtgtacaagccccccaaggtgagcctgatgcccgccaccctggccagagccgcccccggcgaggccccccccgagctgctgtgcctggtgagccacttctaccccagcggcggcctggaggtggagtgggagctgagaggcggccccggcggcagaagccagaaggccgagggccagagatggctgagcgccctgagacaccacagcgacggcagcgtgagcctgagcggccacctgcagcccccccccgtgaccaccgagcagcacggcgccagatacgcctgcagaatccaccaccccagcctgcccgccagcggcagaagcgccgaggtgaccctggaggtggccggcctgagcggccccagcctggaggacagcgtgggcctgttcctgagcgccttcctgctgctgggcctgttcaaggccctgggctgggccgccgtgtacctgagcacctgcaaggacagcaagaaggtgcagtgcagcaccagcctgtacctgagcctggtgaccctgagcccccaccccatcagcaagcccatggagggcggctgctggtgcggcagacagaacctgggcctggagttcaccctgatctgggtgaagacctggcactacatcctgaccgtgggcctgttcgagcacgccacctag

SEQ ID NO: 101815 - DNA, 1347 bp, synthetic construct
  misc_feature 1..1347: note = Description of Artificial Sequence: Synthetic coding sequence
  source 1..1347: mol_type = other DNA
atgaagagcctgagcctgctgctggccgtggccctgggcctggccaccgccgtgagcgccggccccgccgtgatcgagtgctggttcgtggaggacgccagcggcaagggcctggccaagagacccggcgccctgctgctgagacagggccccggcgagcccccccccagacccgacctggaccccgagctgtacctgagcgtgcacgaccccgccggcgccctgcaggccgccttcagaagataccccagaggcgcccccgccccccactgcgagatgagcagattcgtgcccctgcccgccagcgccaagtgggccagcggcctgacccccgcccagaactgccccagagccctggacggcgcctggctgatggtgagcatcagcagccccgtgctgagcctgagcagcctgctgagaccccagcccgagccccagcaggagcccgtgctgatcaccatggccaccgtggtgctgaccgtgctgacccacacccccgcccccagagtgagactgggccaggacgccctgctggacctgagcttcgcctacatgccccccaccagcgaggccgccagcagcctggcccccggccccccccccttcggcctggagtggagaagacagcacctgggcaagggccacctgctgctggccgccacccccggcctgaacggccagatgcccgccgcccaggagggcgccgtggccttcgccgcctgggacgacgacgagccctggggcccctggaccggcaacggcaccttctggctgcccaccgtgcagcccttccaggagggcacctacctggccaccatccacctgccctacctgcagggccaggtgaccctggagctggccgtgtacaagccccccaaggtgagcctgatgcccgccaccctggccagagccgcccccggcgaggccccccccgagctgctgtgcctggtgagccacttctaccccagcggcggcctggaggtggagtgggagctgagaggcggccccggcggcagaagccagaaggccgagggccagagatggctgagcgccctgagacaccacagcgacggcagcgtgagcctgagcggccacctgcagcccccccccgtgaccaccgagcagcacggcgccagatacgcctgcagaatccaccaccccagcctgcccgccagcggcagaagcgccgaggtgaccctggaggtggccggcctgagcggccccagcctggaggacagcgtgggcctgttcctgagcgccttcctgctgctgggcctgttcaaggccctgggctgggccgccgtgtacctgagcacctgcaaggacagcaagaagaaggccgagtag

SEQ ID NO: 101816 - DNA, 1401 bp, synthetic construct
  misc_feature 1..1401: note = Description of Artificial Sequence: Synthetic coding sequence
  source 1..1401: mol_type = other DNA
atgaagagcctgagcctgctgctggccgtggccctgggcctggccaccgccgtgagcgccggccccgccgtgatcgagtgctggttcgtggaggacgccagcggcaagggcctggccaagagacccggcgccctgctgctgagacagggccccggcgagcccccccccagacccgacctggaccccgagctgtacctgagcgtgcacgaccccgccggcgccctgcaggccgccttcagaagataccccagaggcgcccccgccccccactgcgagatgagcagattcgtgcccctgcccgccagcgccaagtgggccagcggcctgacccccgcccagaactgccccagagccctggacggcgcctggctgatggtgagcatcagcagccccgtgctgagcctgagcagcctgctgagaccccagcccgagccccagcaggagcccgtgctgatcaccatggccaccgtggagatgggcttccaccacgtgggccaggccgccctggagctgctgaccagcgtggtgctgaccgtgctgacccacacccccgcccccagagtgagactgggccaggacgccctgctggacctgagcttcgcctacatgccccccaccagcgaggccgccagcagcctggcccccggccccccccccttcggcctggagtggagaagacagcacctgggcaagggccacctgctgctggccgccacccccggcctgaacggccagatgcccgccgcccaggagggcgccgtggccttcgccgcctgggacgacgacgagccctggggcccctggaccggcaacggcaccttctggctgcccaccgtgcagcccttccaggagggcacctacctggccaccatccacctgccctacctgcagggccaggtgaccctggagctggccgtgtacaagccccccaaggtgagcctgatgcccgccaccctggccagagccgcccccggcgaggccccccccgagctgctgtgcctggtgagccacttctaccccagcggcggcctggaggtggagtgggagctgagaggcggccccggcggcagaagccagaaggccgagggccagagatggctgagcgccctgagacaccacagcgacggcagcgtgagcctgagcggccacctgcagcccccccccgtgaccaccgagcagcacggcgccagatacgcctgcagaatccaccaccccagcctgcccgccagcggcagaagcgccgaggtgaccctggaggtggccggcctgagcggccccagcctggaggacagcgtgggcctgttcctgagcgccttcctgctgctgggcctgttcaaggccctgggctgggccgccgtgtacctgagcacctgcaaggacagcaagaagaaggccgagtag

SEQ ID NO: 101817 - DNA, 1515 bp, synthetic construct
  misc_feature 1..1515: note = Description of Artificial Sequence: Synthetic coding sequence
  source 1..1515: mol_type = other DNA
atgaagagcctgagcctgctgctggccgtggccctgggcctggccaccgccgtgagcgccggccccgccgtgatcgagtgctggttcgtggaggacgccagcggcaagggcctggccaagagacccggcgccctgctgctgagacagggccccggcgagcccccccccagacccgacctggaccccgagctgtacctgagcgtgcacgaccccgccggcgccctgcaggccgccttcagaagataccccagaggcgcccccgccccccactgcgagatgagcagattcgtgcccctgcccgccagcgccaagtgggccagcggcctgacccccgcccagaactgccccagagccctggacggcgcctggctgatggtgagcatcagcagccccgtgctgagcctgagcagcctgctgagaccccagcccgagccccagcaggagcccgtgctgatcaccatggccaccgtggtgctgaccgtgctgacccacacccccgcccccagagtgagactgggccaggacgccctgctggacctgagcttcgcctacatgccccccaccagcgaggccgccagcagcctggcccccggccccccccccttcggcctggagtggagaagacagcacctgggcaagggccacctgctgctggccgccacccccggcctgaacggccagatgcccgccgcccaggagggcgccgtggccttcgccgcctgggacgacgacgagccctggggcccctggaccggcaacggcaccttctggctgcccagagtgcagcccttccaggagggcacctacctggccaccatccacctgccctacctgcagggccaggtgaccctggagctggccgtgtacaagccccccaaggtgagcctgatgcccgccaccctggccagagccgcccccggcgaggccccccccgagctgctgtgcctggtgagccacttctaccccagcggcggcctggaggtggagtgggagctgagaggcggccccggcggcagaagccagaaggccgagggccagagatggctgagcgccctgagacaccacagcgacggcagcgtgagcctgagcggccacctgcagcccccccccgtgaccaccgagcagcacggcgccagatacgcctgcagaatccaccaccccagcctgcccgccagcggcagaagcgccgaggtgaccctggaggtggccggcctgagcggccccagcctggaggacagcgtgggcctgttcctgagcgccttcctgctgctgggcctgttcaaggccctgggctgggccgccgtgtacctgagcacctgcaaggacagcaagaaggtgcagtgcagcaccagcctgtacctgagcctggtgaccctgagcccccaccccatcagcaagcccatggagggcggctgctggtgcggcagacagaacctgggcctggagttcaccctgatctgggtgaagacctggcactacatcctgaccgtgggcctgttcgagcacgccacctag

SEQ ID NO: 101818 - DNA, 1347 bp, synthetic construct; identical to SEQ ID NO: 101813
  misc_feature 1..1347: note = Description of Artificial Sequence: Synthetic coding sequence
  source 1..1347: mol_type = other DNA

SEQ ID NO: 101819 - DNA, 1515 bp, synthetic construct; identical to SEQ ID NO: 101817
  misc_feature 1..1515: note = Description of Artificial Sequence: Synthetic coding sequence
  source 1..1515: mol_type = other DNA

SEQ ID NO: 101820 - DNA, 1401 bp, synthetic construct; identical to SEQ ID NO: 101812
  misc_feature 1..1401: note = Description of Artificial Sequence: Synthetic coding sequence
  source 1..1401: mol_type = other DNA

SEQ ID NO: 101821 - DNA, 1347 bp, synthetic construct; identical to SEQ ID NO: 101813
  misc_feature 1..1347: note = Description of Artificial Sequence: Synthetic coding sequence
  source 1..1347: mol_type = other DNA

SEQ ID NO: 101822 - DNA, 1515 bp, synthetic construct; identical to SEQ ID NO: 101814
  misc_feature 1..1515: note = Description of Artificial Sequence: Synthetic coding sequence
  source 1..1515: mol_type = other DNA

SEQ ID NO: 101823 - DNA, 609 bp, synthetic construct
  misc_feature 1..609: note = Description of Artificial Sequence: Synthetic coding sequence
  source 1..609: mol_type = other DNA
atgaagagcctgagcctgctgctggccgtggccctgggcctggccaccgccgtgagcgccggccccgccgtgatcgagtgctggttcgtggaggacgccagcggcaagggcctggccaagagacccggcgccctgctgctgagacagggccccggcgagcccccccccagacccgacctggaccccgagctgtacctgagcgtgcacgtggtgctgaccgtgctgacccacacccccgcccccagagtgagactgggccaggacgccctgctggacctgagcttcgcctacatgccccccaccagcgaggccgccagcagcctggcccccggccccccccccttcggcctggagtggagaagacagcacctgggcaagggccacctgctgctggccgccacccccggcctgaacggccagatgcccgccgcccaggagggcgccgtggccttcgccgcctgggacgacgacgagccctggggcccctggaccggcaacggcaccttctggctgcccagagtgcagcccttccaggagggcacctacctggccaccatccacctgccctacctgcagggccaggtgaccctggagctggccgtgtactag

SEQ ID NO: 101824 - DNA, 1347 bp, synthetic construct; identical to SEQ ID NO: 101815
  misc_feature 1..1347: note = Description of Artificial Sequence: Synthetic coding sequence
  source 1..1347: mol_type = other DNA

SEQ ID NO: 101825 - DNA, 1401 bp, synthetic construct; identical to SEQ ID NO: 101812
  misc_feature 1..1401: note = Description of Artificial Sequence: Synthetic coding sequence
  source 1..1401: mol_type = other DNA

SEQ ID NO: 101826 - DNA, 609 bp, synthetic construct
  misc_feature 1..609: note = Description of Artificial Sequence: Synthetic coding sequence
  source 1..609: mol_type = other DNA
atgaagagcctgagcctgctgctggccgtggccctgggcctggccaccgccgtgagcgccggccccgccgtgatcgagtgctggttcgtggaggacgccagcggcaagggcctggccaagagacccggcgccctgctgctgagacagggccccggcgagcccccccccagacccgacctggaccccgagctgtacctgagcgtgcacgtggtgctgaccgtgctgacccacacccccgcccccagagtgagactgggccaggacgccctgctggacctgagcttcgcctacatgccccccaccagcgaggccgccagcagcctggcccccggccccccccccttcggcctggagtggagaagacagcacctgggcaagggccacctgctgctggccgccacccccggcctgaacggccagatgcccgccgcccaggagggcgccgtggccttcgccgcctgggacgacgacgagccctggggcccctggaccggcaacggcaccttctggctgcccaccgtgcagcccttccaggagggcacctacctggccaccatccacctgccctacctgcagggccaggtgaccctggagctggccgtgtactag

SEQ ID NO: 101827 - DNA, 609 bp, synthetic construct; identical to SEQ ID NO: 101823
  misc_feature 1..609: note = Description of Artificial Sequence: Synthetic coding sequence
  source 1..609: mol_type = other DNA

SEQ ID NO: 101828 - DNA, 609 bp, synthetic construct; identical to SEQ ID NO: 101823
  misc_feature 1..609: note = Description of Artificial Sequence: Synthetic coding sequence
  source 1..609: mol_type = other DNA

SEQ ID NO: 101829 - DNA, 1347 bp, synthetic construct
  misc_feature 1..1347: note = Description of Artificial Sequence: Synthetic coding sequence
  source 1..1347: mol_type = other DNA
atgaagagcctgagcctgctgctggccgtggccctgggcctggccaccgccgtgagcgccggccccgccgtgatcgagtgctggttcgtggaggacgccagcggcaagggcctggccaagagacccggcgccctgctgctgagacagggccccggcgagcccccccccagacccgacctggaccccgagctgtacctgagcgtgcacgaccccgccggcgccctgcaggccgccttcagaagataccccagaggcgcccccgccccccactgcgagatgagcagattcgtgcccctgcccgccagcgccaagtgggccagcggcctgacccccgcccagaactgccccagagccctggacggcgcctggctgatggtgagcatcagcagccccgtgctgagcctgagcagcctgctgagaccccagcccgagccccagcaggagcccgtgctgatcaccatggccaccgtggtgctgaccgtgctgacccacacccccgcccccagagtgagactgggccaggacgccctgctggacctgagcttcgcctacatgccccccaccagcgaggccgccagcagcctggcccccggccccccccccttcggcctggagtggagaagacagcacctgggcaagggccacctgctgctggccgccacccccggcctgaacggccagatgcccgccgcccaggagggcgccgtggccttcgccgcctgggacgacgacgagccctggggcccctggaccggcaacggcaccttctggctgcccaccgtgcagcccttccaggagggcacctacctggccaccatccacctgccctacctgcagggccaggtgaccctggagctggccgtgtacaagccccccaaggtgagcctgatgcccgccaccctggccagagccgcccccggcgaggccccccccgagctgctgtgcctggtgagccacttctaccccagcggcggcctggaggtggagtgggagctgagaggcggccccggcggcagaagccagaaggccgagggccagagatggctgagcgccctgagacaccacagcgacggcagcgtgagcctgagcggccacctgcagcccccccccgtgaccaccgagcagcacggcgccagatacgcctgcagaatccaccaccccagcctgcccgccagcggcagaagcgccgaggtgaccctggaggtggccggcctgagcggccccagcctggaggacagcgtgggcctgttcctgagcgccttcctgctgctgggcctgttcaaggccctgggctgggccgccgtgtacctgagcacctgcaaggacagcaagaagcacgccacctag

SEQ ID NO: 101830 - DNA, 1515 bp, synthetic construct; identical to SEQ ID NO: 101817
  misc_feature 1..1515: note = Description of Artificial Sequence: Synthetic coding sequence
  source 1..1515: mol_type = other DNA

SEQ ID NO: 101831 - DNA, 471 bp, synthetic construct
  misc_feature 1..471: note = Description of Artificial Sequence: Synthetic coding sequence
  source 1..471: mol_type = other DNA
atgaagagcctgagcctgctgctggccgtggccctgggcctggccaccgccgtgagcgccggccccgccgtgatcgagtgctggttcgtggaggacgccagcggcaagggcctggccaagagacccggcgccctgctgctgagacagggccccggcgagcccccccccagacccgacctggaccccgagctgtacctgagcgtgcacgaccccgccggcgccctgcaggccgccttcagaagataccccagaggcgcccccgccccccactgcgagatgagcagattcgtgcccctgcccgccagcgccaagtgggccagcggcctgacccccgcccagaactgccccagagccctggacggcgcctggctgatggtgagcatcagcagcatgggccacgccatgcccgtggagttcaccatccccgcctgcctgcccagaggcgccgccctgagaagcccctggagatag

SEQ ID NO: 101832 - DNA, 1401 bp, synthetic construct; identical to SEQ ID NO: 101816
  misc_feature 1..1401: note = Description of Artificial Sequence: Synthetic coding sequence
  source 1..1401: mol_type = other DNA

SEQ ID NO: 101833 - DNA, 1086 bp, synthetic construct
  misc_feature 1..1086: note = Description of Artificial Sequence: Synthetic coding sequence
  source 1..1086: mol_type = other DNA
atgaagagcctgagcctgctgctggccgtggccctgggcctggccaccgccgtgagcgccggccccgccgtgatcgagtgctggttcgtggaggacgccagcggcaagggcctggccaagagacccggcgccctgctgctgagacagggccccggcgagcccccccccagacccgacctggaccccgagctgtacctgagcgtgcacgtggtgctgaccgtgctgacccacacccccgcccccagagtgagactgggccaggacgccctgctggacctgagcttcgcctacatgccccccaccagcgaggccgccagcagcctggcccccggccccccccccttcggcctggagtggagaagacagcacctgggcaagggccacctgctgctggccgccacccccggcctgaacggccagatgcccgccgcccaggagggcgccgtggccttcgccgcctgggacgacgacgagccctggggcccctggaccggcaacggcaccttctggctgcccaccgtgcagcccttccaggagggcacctacctggccaccatccacctgccctacctgcagggccaggtgaccctggagctggccgtgtacaagccccccaaggtgagcctgatgcccgccaccctggccagagccgcccccggcgaggccccccccgagctgctgtgcctggtgagccacttctaccccagcggcggcctggaggtggagtgggagctgagaggcggccccggcggcagaagccagaaggccgagggccagagatggctgagcgccctgagacaccacagcgacggcagcgtgagcctgagcggccacctgcagcccccccccgtgaccaccgagcagcacggcgccagatacgcctgcagaatccaccaccccagcctgcccgccagcggcagaagcgccgaggtgaccctggaggtggccggcctgagcggccccagcctggaggacagcgtgggcctgttcctgagcgccttcctgctgctgggcctgttcaaggccctgggctgggccgccgtgtacctgagcacctgcaaggacagcaagaagaaggccgagtag

SEQ ID NO: 101834 - DNA, 1347 bp, synthetic construct; identical to SEQ ID NO: 101829
  misc_feature 1..1347: note = Description of Artificial Sequence: Synthetic coding sequence
  source 1..1347: mol_type = other DNA

SEQ ID NO: 101835 - DNA, 471 bp, synthetic construct; identical to SEQ ID NO: 101831
  misc_feature 1..471: note = Description of Artificial Sequence: Synthetic coding sequence
  source 1..471: mol_type = other DNA

SEQ ID NO: 101836 - DNA, 1086 bp, synthetic construct
  misc_feature 1..1086: note = Description of Artificial Sequence: Synthetic coding sequence
  source 1..1086: mol_type = other DNA
atgaagagcctgagcctgctgctggccgtggccctgggcctggccaccgccgtgagcgccggccccgccgtgatcgagtgctggttcgtggaggacgccagcggcaagggcctggccaagagacccggcgccctgctgctgagacagggccccggcgagcccccccccagacccgacctggaccccgagctgtacctgagcgtgcacgtggtgctgaccgtgctgacccacacccccgcccccagagtgagactgggccaggacgccctgctggacctgagcttcgcctacatgccccccaccagcgaggccgccagcagcctggcccccggccccccccccttcggcctggagtggagaagacagcacctgggcaagggccacctgctgctggccgccacccccggcctgaacggccagatgcccgccgcccaggagggcgccgtggccttcgccgcctgggacgacgacgagccctggggcccctggaccggcaacggcaccttctggctgcccagagtgcagcccttccaggagggcacctacctggccaccatccacctgccctacctgcagggccaggtgaccctggagctggccgtgtacaagccccccaaggtgagcctgatgcccgccaccctggccagagccgcccccggcgaggccccccccgagctgctgtgcctggtgagccacttctaccccagcggcggcctggaggtggagtgggagctgagaggcggccccggcggcagaagccagaaggccgagggccagagatggctgagcgccctgagacaccacagcgacggcagcgtgagcctgagcggccacctgcagcccccccccgtgaccaccgagcagcacggcgccagatacgcctgcagaatccaccaccccagcctgcccgccagcggcagaagcgccgaggtgaccctggaggtggccggcctgagcggccccagcctggaggacagcgtgggcctgttcctgagcgccttcctgctgctgggcctgttcaaggccctgggctgggccgccgtgtacctgagcacctgcaaggacagcaagaagcacgccacctag

SEQ ID NO: 101837 - DNA, 1347 bp, synthetic construct
  misc_feature 1..1347: note = Description of Artificial Sequence: Synthetic coding sequence
  source 1..1347: mol_type = other DNA
atgaagagcctgagcctgctgctggccgtggccctgggcctggccaccgccgtgagcgccggccccgccgtgatcgagtgctggttcgtggaggacgccagcggcaagggcctggccaagagacccggcgccctgctgctgagacagggccccggcgagcccccccccagacccgacctggaccccgagctgtacctgagcgtgcacgaccccgccggcgccctgcaggccgccttcagaagataccccagaggcgcccccgccccccactgcgagatgagcagattcgtgcccctgcccgccagcgccaagtgggccagcggcctgacccccgcccagaactgccccagagccctggacggcgcctggctgatggtgagcatcagcagccccgtgctgagcctgagcagcctgctgagaccccagcccgagccccagcaggagcccgtgctgatcaccatggccaccgtggtgctgaccgtgctgacccacacccccgcccccagagtgagactgggccaggacgccctgctggacctgagcttcgcctacatgccccccaccagcgaggccgccagcagcctggcccccggccccccccccttcggcctggagtggagaagacagcacctgggcaagggccacctgctgctggccgccacccccggcctgaacggccagatgcccgccgcccaggagggcgccgtggccttcgccgcctgggacgacgacgagccctggggcccctggaccggcaacggcaccttctggctgcccagagtgcagcccttccaggagggcacctacctggccaccatccacctgccctacctgcagggccaggtgaccctggagctggccgtgtacaagccccccaaggtgagcctgatgcccgccaccctggccagagccgcccccggcgaggccccccccgagctgctgtgcctggtgagccacttctaccccagcggcggcctggaggtggagtgggagctgagaggcggccccggcggcagaagccagaaggccgagggccagagatggctgagcgccctgagacaccacagcgacggcagcgtgagcctgagcggccacctgcagcccccccccgtgaccaccgagcagcacggcgccagatacgcctgcagaatccaccaccccagcctgcccgccagcggcagaagcgccgaggtgaccctggaggtggccggcctgagcggccccagcctggaggacagcgtgggcctgttcctgagcgccttcctgctgctgggcctgttcaaggccctgggctgggccgccgtgtacctgagcacctgcaaggacagcaagaagcacgccacctag

SEQ ID NO: 101838 - DNA, 1086 bp, synthetic construct; identical to SEQ ID NO: 101836
  misc_feature 1..1086: note = Description of Artificial Sequence: Synthetic coding sequence
  source 1..1086: mol_type = other DNA

SEQ ID NO: 101839 - DNA, 471 bp, synthetic construct; identical to SEQ ID NO: 101831
  misc_feature 1..471: note = Description of Artificial Sequence: Synthetic coding sequence
  source 1..471: mol_type = other DNA

SEQ ID NO: 101840 - DNA, 1347 bp, synthetic construct; identical to SEQ ID NO: 101837
  misc_feature 1..1347: note = Description of Artificial Sequence: Synthetic coding sequence
  source 1..1347: mol_type = other DNA

SEQ ID NO: 101841 - DNA, 1086 bp, synthetic construct; identical to SEQ ID NO: 101833
  misc_feature 1..1086: note = Description of Artificial Sequence: Synthetic coding sequence
  source 1..1086: mol_type = other DNA

SEQ ID NO: 101842 - DNA, 1347 bp, synthetic construct; identical to SEQ ID NO: 101837
  misc_feature 1..1347: note = Description of Artificial Sequence: Synthetic coding sequence
  source 1..1347: mol_type = other DNA

SEQ ID NO: 101843 - DNA, 1086 bp, synthetic construct; identical to SEQ ID NO: 101836
  misc_feature 1..1086: note = Description of Artificial Sequence: Synthetic coding sequence
  source 1..1086: mol_type = other DNA

SEQ ID NO: 101844 - DNA, 2037 bp, synthetic construct
  misc_feature 1..2037: note = Description of Artificial Sequence: Synthetic coding sequence
  source 1..2037: mol_type = other DNA
atgctgctggaggccgagagaagaagaggcggcggcgccgccggcgccagactgctggagagatacagaagagtgcccggcgtgagagccctgagagccgacagcgtgctgatcatcgagaccgtgcccggcttcccccccgccccccccgcccccggcgccgcccagatcagagccgccgaggtgctggtgtacggcgccccccccggcagagtgagcagactgctggagagattcgacccccccgccgcccccagaagaagaggcagccccgagagagccagaccccccccccccccccccccccccgccccccccagacccccccccgccgcccccagcccccccgccgcccccggccccagaggcggcggcgccagccccggcgccagaagaagcgacttcctgcagaagaccggcagcaacagcttcaccgtgcaccccagaggcctgcacagaggcgccggcgccagactgctgagcaacggccacagcgcccccgagcccagagccggccccgccaacagactggccggcagcccccccggcagcggccagtggaagcccaaggtggagagcggcgaccccagcctgcaccccccccccagccccggcacccccagcgccacccccgccagcccccccgccagcgccacccccagccagagacagtgcgtgagcgccgccaccagcaccaacgacagcttcgagatcagacccgcccccaagcccgtgatggagaccatccccctgggcgacctgcaggccagagccctggccagcctgagagccaacagcagaaacagcttcatggtgatccccaagagcaaggccagcggcgcccccccccccgagggcagacagagcgtggagctgcccaagggcgacctgggccccgccagccccagccaggagctgggcagccagcccgtgcccggcggcgacggcgcccccgccctgggcaagagccccctggaggtggaggcccagtgggccgtggaggagggcgcctgccccagaaccgccaccgccctggccgacagagccatcagatggcagagacccagcagccccccccccttcctgcccgccgccagcgaggaggccgagcccgccgagggcctgagagtgcccggcctggccaagaacagcagagagtacgtgagacccggcctgcccgtgaccttcatcgacgaggtggacagcgaggaggccccccaggccgccaagctgccctacctgccccaccccgccagacccctgcaccccgccagacccggctgcgtggccgagctgcagcccagaggcagcaacaccttcaccgtggtgcccaagagaaagcccggcaccctgcaggaccagcacttcagccaggccaacagagagcccagacccagagaggccgaggaggaggaggccagctgcctgctgggccccaccctgaagaagagataccccaccgtgcacgagatcgaggtgatcggcggctacctggccctgcagaagagctgcctgaccaaggccggcagcagcagaaagaagatgaagatcagcttcaacgacaagagcctgcagaccaccttcgagtaccccagcgagagcagcctggagcaggaggaggaggtggaccagcaggaggaggaggaggaggaggaggaggaggaggaggaggaggaggagggcagcggcagcgaggagaagcccttcgccctgttcctgcccagagccaccttcgtgagcagcgtgagacccgagagcagcagactgcccgagggcagcagcggcctgagcagctacacccccaagcacagcgtggccttcagcaagtggcaggagcaggccctggagcaggcccccagagaggccgagcccccccccgtggaggccatggtgagatgcggcggcgtggagagatggggcgagagcgacaccagagccagcccctgcgtgcacatcctgagcagccacttccagctgacccccgccagccagaacgacctgagcgacttcagaagcgagcccgccctgtacttctag

SEQ ID NO: 101845 - DNA, 2136 bp, synthetic construct
  misc_feature 1..2136: note = Description of Artificial Sequence: Synthetic coding sequence
  source 1..2136: mol_type = other DNA
atggccgccctgggcagacccggcagcggccccagagccgccgtgcccgcctggaagagagagatcctggagagaaagagagccaagctggccgccctgggcggcggcgccggccccggcgccgccgagcccgagcagagagtgctggccgagagcctgggccccctgagagagaaccccttcatgctgctggaggccgagagaagaagaggcggcggcgccgccggcgccagactgctggagagatacagaagagtgcccggcgtgagagccctgagagccgacagcgtgctgatcatcgagaccgtgcccggcttcccccccgccccccccgcccccggcgccgcccagatcagagccgccgaggtgctggtgtacggcgccccccccggcagagtgagcagactgctggagagattcgacccccccgccgcccccagaagaagaggcagccccgagagagccagaccccccccccccccccccccccccgccccccccagacccccccccgccgcccccagcccccccgccgcccccggccccagaggcggcggcgccagccccggcgccagaagaagcgacttcctgcagaagaccggcagcaacagcttcaccgtgcaccccagaggcctgcacagaggcgccggcgccagactgctgagcaacggccacagcgcccccgagcccagagccggccccgccaacagactggccggcagcccccccggcagcggccagtggaagcccaaggtggagagcggcgaccccagcctgcaccccccccccagccccggcacccccagcgccacccccgccagcccccccgccagcgccacccccagccagagacagtgcgtgagcgccgccaccagcaccaacgacagcttcgagatcagacccgcccccaagcccgtgatggagaccatccccctgggcgacctgcaggccagagccctggccagcctgagagccaacagcagaaacagcttcatggtgatccccaagagcaaggccagcggcgcccccccccccgagggcagacagagcgtggagctgcccaagggcgacctgggccccgccagccccagccaggagctgggcagccagcccgtgcccggcggcgacggcgcccccgccctgggcaagagccccctggaggtggaggcccagtgggccgtggaggagggcgcctgccccagaaccgccaccgccctggccgacagagccatcagatggcagagacccagcagccccccccccttcctgcccgccgccagcgaggaggccgagcccgccgagggcctgagagtgcccggcctggccaagaacagcagagagtacgtgagacccggcctgcccgtgaccttcatcgacgaggtggacagcgaggaggccccccaggccgccaagctgccctacctgccccaccccgccagacccctgcaccccgccagacccggctgcgtggccgagctgcagcccagaggcagcaacaccttcaccgtggtgcccaagagaaagcccggcaccctgcaggaccagcacttcagccaggccaacagagagcccagacccagagaggccgaggaggaggaggccagctgcctgctgggccccaccctgaagaagagataccccaccgtgcacgagatcgaggtgatcggcggctacctggccctgcagaagagctgcctgaccaaggccggcagcagcagaaagaagatgaagatcagcttcaacgacaagagcctgcagaccaccttcgagtaccccagcgagagcagcctggagcaggaggaggaggtggaccagcaggaggaggaggaggaggaggaggaggaggaggaggaggaggaggagggcagcggcagcgaggagaagcccttcgccctgttcctgcccagagccaccttcgtgagcagcgtgagacccgagagcagcagactgcccgagggcagcagcggcctgagcagctacacccccaagcacagcgtggccttcagcaagtggcaggagcaggccctggagcaggcccccagagaggccgagcccccccccgtggaggccatgctgacccccgccagccagaacgacctgagcgacttcagaagcgagcccgccctgtacttctag

SEQ ID NO: 101846 - DNA, 4866 bp, synthetic construct
  misc_feature 1..4866: note = Description of Artificial Sequence: Synthetic coding sequence
  source 1..4866: mol_type = other DNA
atggagtgggtgctggccgaggccctgctgagccagagcagagaccccagagccctgctgggcgccctgtgccagggcgaggccagcgccgagagagtggagaccctgagattcctgctgcagagactggaggacgaggaggccagaggcagcggcggcgccggcgccctgcccgaggccgccagagaggtggccgccggctacctggtgcccctgctgagaagcctgagaggcagacccgccggcggccccgaccccagcctgcagcccagacacagaagaagagtgctgagagccgccggcgccgccctgagaagctgcgtgagactggccggcagaccccagctggccgccgccctggccgaggaggccctgagagacctgctggccggctggagagcccccggcgccgaggccgccgtggaggtgctggccgccgtgggcccctgcctgagacccagagaggacggccccctgctggagagagtggccggcaccgccgtggccctggccctgggcggcggcggcgacggcgacgaggccggccccgccgaggacgccgccgccctggtggccggcagactgctgcccgtgctggtgcagtgcggcggcgccgccctgagagccgtgtggggcggcctggccgcccccggcgccagcctgggcagcggcagagtggaggagaagctgctggtgctgagcgccctggccgagaagctgctgcccgagcccggcggcgacagagccagaggcgccagagaggccggccccgacgccagaagatgctggagattctggagaaccgtgcaggccggcctgggccaggccgacgccctgaccagaaagagagccagatacctgctgcagagagccgtggaggtgagcgccgagctgggcgccgactgcacctgcggcccccaggagggcaacggccccagcctgttctggtggagcgagagaaagaaggacgagctgctgaagttctgggagaactacatcctgatcatggagaccctggagggcaaccagatccacgtgatcaagcccgtgctgcccaagctgaacaacctgttcgagtacgccgtgagcgaggagaacggctgctggctgttccaccccagctggcacatgtgcatctacaagagaatgttcgagagcgagaacaagatcctgagcaaggagggcgtgatccacttcctggagctgtacgagaccaagatcctgcccttcagccccgagttcagcgagttcatcatcggccccctgatggacgccctgagcgagagcagcctgtacagcagaagccccggccagcccatcggcagctgcagccccctgggcctgaagctgcagaagttcctggtgacctacatcagcctgctgcccgaggagatcaagagcagcttcctgctgaagttcatcagaaagatgaccagcagacactggtgcgccgtgcccatcctgttcctgagcaaggccctggccaacgtgcccagacacaaggccctgggcatcgacggcctgctggccctgagagacgtgatccactgcaccatgatcacccaccagatcctgctgagaggcgccgcccagtgctacctgctgcagaccgccatgaacctgctggacgtggagaaggtgagcctgagcgacgtgagcaccttcctgatgagcctgagacaggaggagagcctgggcagaggcaccagcctgtggaccgagctgtgcgactggctgagagtgaacgagagctacttcaagcccagccccacctgcagcagcatcggcctgcacaagaccagcctgaacgcctacgtgaagagcatcgtgcaggagtacgtgaagagcagcgcctgggagaccggcgagaactgcttcatgcccgactggttcgaggccaagctggtgagcctgatggtgctgctggccgtggacgtggagggcatgaagacccagtacagcggcaagcagagaaccgagaacgtgctgagaatcttcctggaccccctgctggacgtgctgatgaagttcagcaccaacgcctacatgcccctgctgaagaccgacagatgcctgcagctgctgctgaagctgctgaacacctgcagactgaagggcagcagcgcccaggacgacgaggtgagcaccgtgctgcagaacttcttcatgagcaccaccgagagcatcagcgagttcatcctgagaagactgaccatgaacgagctgaacagcgtgagcgacctggacagatgccacctgtacctgatggtgctgaccgagctgatcaacctgcacctgaaggtgggctggaagagaggcaaccccatctggagagtgatcagcctgctgaagaacgccagcatccagcacctgcaggagatggacagcggccaggagcccaccgtgggcagccagatccagagagtggtgagcatggccgccctggccatggtgtgcgaggccatcgaccagaagcccgagctgcagctggacagcctgcacgccggccccctggagagcttcctgagcagcctgcagctgaaccagaccctgcagaagccccacgccgaggagcagagcagctacgcccaccccctggagtgcagcagcgtgctggaggagagcagcagcagccagggctggggcaagatcgtggcccagtacatccacgaccagtgggtgtgcctgagcttcctgctgaagaagtaccacaccctgatccccaccaccggcagcgagatcctggagcccttcctgcccgccgtgcagatgcccatcagaaccctgcagagcgccctggaggccctgaccgtgctgagcagcgaccaggtgctgcccgtgttccactgcctgaaggtgctggtgcccaagctgctgaccagcagcgagagcctgtgcatcgagagcttcgacatggcctggaagatcatcagcagcctgagcaacacccagctgatcttctgggccaacctgaaggccttcgtgcagttcgtgttcgacaacaaggtgctgaccatcgccgccaagatcaagggccaggcctacttcaagatcaaggagatcatgtacaagatcatcgagatgagcgccatcaagaccggcgtgttcaacaccctgatcagctactgctgccagagctggatcgtgagcgccagcaacgtgagccagggcagcctgagcagcgccaagaactacagcgagctgatcctggaggcctgcatcttcggcaccgtgttcagaagagaccagagactggtgcaggacgtgcagaccttcatcgagaacctgggccacgactgcgccgccaacatcgtgatggagaacaccaagagagaggaccactacgtgagaatctgcgccgtgaagttcctgtgcctgctggacggcagcaacatgagccacaagctgttcatcgaggacctggccatcaagctgctggacaaggacgagctggtgagcaagagcaagaagagatactacgtgaacagcctgcagcacagagtgaagaacagagtgtggcagaccctgctggtgctgttccccagactggaccagaacttcctgaacggcatcatcgacagaatcttccaggccggcttcaccaacaaccaggccagcatcaagtacttcatcgagtggatcatcatcctgatcctgcacaagttcccccagttcctgcccaagttctgggactgcttcagctacggcgaggagaacctgaagaccagcatctgcaccttcctggccgtgctgagccacctggacatcatcacccagaacatccccgagaagaagctgatcctgaagcaggccctgatcgtggtgctgcagtggtgcttcaaccacaacttcagcgtgagactgtacgccctggtggccctgaagaagctgtggaccgtgtgcaaggtgctgagcgtggaggagttcgacgccctgacccccgtgatcgagagcagcctgcaccaggtggagagcatgcacggcgccggcaacgccaagaagaactggcagagaatccaggagcacttcttcttcgccaccttccaccccctgaaggactactgcctggagaccatcttctacatcctgcccagactgagcggcctgatcgaggacgagtggatcaccatcgacaagttcaccagattcaccgacgtgcccctggccgccggcttccagtggtacctgagccagacccagctgagcaagctgaagcccggcgactggagccagcaggacatcggcaccaacctggtggaggccgacaaccaggccgagtggaccgacgtgcagaagaagatcatcccctggaacagcagagtgagcgacctggacctggagctgctgttccaggacagagccgccagactgggcaagagcatcagcagactgatcgtggtggccagcctgatcgacaagcccaccaacctgggcggcctgtgcagaacctgcgaggtgttcggcgccagcgtgctggtggtgggcagcctgcagtgcatcagcgacaagcagttccagcacctgagcgtgagcgccgagcagtggctgcccctggtggaggtgaagcccccccagctgatcgactacctgcagcagaagaagaccgagggctacaccatcatcggcgtggagcagaccgccaagagcctggacctgacccagtactgcttccccgagaagagcctgctgctgctgggcaacgagagagagggcatccccgccaacctgatccagcagctggacgtgtgcgtggagatcccccagcagggcatcatcagaagcctgaacgtgcacgtgagcggcgccctgctgatctgggagtacaccagacagcagctgctgagccacggcgacaccaagccctag

SEQ ID NO: 101847 - DNA, 1101 bp, synthetic construct
  misc_feature 1..1101: note = Description of Artificial Sequence: Synthetic coding sequence
  source 1..1101: mol_type = other DNA
atgagcgaggaggagcagggcagcggcaccaccaccggctgcggcctgcccagcatcgagcagatgctggccgccaaccccggcaagacccccatcagcctgctgcaggagtacggcaccagaatcggcaagacccccgtgtacgacctgctgaaggccgagggccaggcccaccagcccaacttcaccttcagagtgaccgtgggcgacaccagctgcaccggccagggccccagcaagaaggccgccaagcacaaggccgccgaggtggccctgaagcacctgaagggcggcagcatgctggagcccgccctggaggacagcagcagcttcagccccctggacagcagcctgcccgaggacatccccgtgttcaccgccgccgccgccgccacccccgtgcccagcgtggtgctgaccagaagcccccccatggagctgcagccccccgtgagcccccagcagagcgagtgcaaccccgtgggcgccctgcaggagctggtggtgcagaagggctggagactgcccgagtacaccgtgacccaggagagcggccccgcccacagaaaggagttcaccatgacctgcagagtggagagattcatcgagatcggcagcggcaccagcaagaagctggccaagagaaacgccgccgccaagatgctgctgagagtgcacaccgtgcccctggacgccagagacggcaacgaggtggagcccgacgacgaccacttcagcatcggcgtgggcagcagactggacggcctgagaaacagaggccccggctgcacctgggacagcctgagaaacagcgtgggcgagaagatcctgagcctgagaagctgcagcctgggcagcctgggcgccctgggccccgcctgctgcagagtgctgagcgagctgagcgaggagcaggccttccacgtgagctacctggacatcgaggagctgagcctgagcggcctgtgccagtgcctggtggagctgagcacccagcccgccaccgtgtgccacggcagcgccaccaccagagaggccgccagaggcgaggccgccagaagagccctgcagtacctgaagatcatggccggcagcaagtag

SEQ ID NO: 101848 - DNA, 1038 bp, synthetic construct
  misc_feature 1..1038: note = Description of Artificial Sequence: Synthetic coding sequence
  source 1..1038: mol_type = other DNA
atgctggccgccaaccccggcaagacccccatcagcctgctgcaggagtacggcaccagaatcggcaagacccccgtgtacgacctgctgaaggccgagggccaggcccaccagcccaacttcaccttcagagtgaccgtgggcgacaccagctgcaccggccagggccccagcaagaaggccgccaagcacaaggccgccgaggtggccctgaagcacctgaagggcggcagcatgctggagcccgccctggaggacagcagcagcttcagccccctggacagcagcctgcccgaggacatccccgtgttcaccgccgccgccgccgccacccccgtgcccagcgtggtgctgaccagaagcccccccatggagctgcagccccccgtgagcccccagcagagcgagtgcaaccccgtgggcgccctgcaggagctggtggtgcagaagggctggagactgcccgagtacaccgtgacccaggagagcggccccgcccacagaaaggagttcaccatgacctgcagagtggagagattcatcgagatcggcagcggcaccagcaagaagctggccaagagaaacgccgccgccaagatgctgctgagagtgcacaccgtgcccctggacgccagagacggcaacgaggtggagcccgacgacgaccacttcagcatcggcgtgggcagcagactggacggcctgagaaacagaggccccggctgcacctgggacagcctgagaaacagcgtgggcgagaagatcctgagcctgagaagctgcagcctgggcagcctgggcgccctgggccccgcctgctgcagagtgctgagcgagctgagcgaggagcaggccttccacgtgagctacctggacatcgaggagctgagcctgagcggcctgtgccagtgcctggtggagctgagcacccagcccgccaccgtgtgccacggcagcgccaccaccagagaggccgccagaggcgaggccgccagaagagccctgcagtacctgaagatcatggccggcagcaagtag

SEQ ID NO: 101849 - DNA, 1038 bp, synthetic construct; identical to SEQ ID NO: 101848
  misc_feature 1..1038: note = Description of Artificial Sequence: Synthetic coding sequence
  source 1..1038: mol_type = other DNA

SEQ ID NO: 101850 - DNA, 1245 bp, synthetic construct
  misc_feature 1..1245: note = Description of Artificial Sequence: Synthetic coding sequence
  source 1..1245: mol_type = other DNA
atgagcgagtacatcagagtgaccgaggacgagaacgacgagcccatcgagatccccagcgaggacgacggcaccgtgctgctgagcaccgtgaccgcccagttccccggcgcctgcggcctgagatacagaaaccccgtgagccagtgcatgagaggcgtgagactggtggagggcatcctgcacgcccccgacgccggctggggcaacctggtgtacgtggtgaactaccccaaggacaacaagagaaagatggacgagaccgacgccagcagcgccgtgaaggtgaagagagccgtgcagaagaccagcgacctgatcgtgctgggcctgccctggaagaccaccgagcaggacctgaaggagtacttcagcaccttcggcgaggtgctgatggtgcaggtgaagaaggacctgaagaccggccacagcaagggcttcggcttcgtgagattcaccgagtacgagacccaggtgaaggtgatgagccagagacacatgatcgacggcagatggtgcgactgcaagctgcccaacagcaagcagagccaggacgagcccctgagaagcagaaaggtgttcgtgggcagatgcaccgaggacatgaccgaggacgagctgagagagttcttcagccagtacggcgacgtgatggacgtgttcatccccaagcccttcagagccttcgccttcgtgaccttcgccgacgaccagatcgcccagagcctgtgcggcgaggacctgatcatcaagggcatcagcgtgcacatcagcaacgccgagcccaagcacaacagcaacagacagctggagagaagcggcagattcggcggcaaccccggcggcttcggcaaccagggcggcttcggcaacagcagaggcggcggcgccggcctgggcaacaaccagggcagcaacatgggcggcggcatgaacttcggcgccttcagcatcaaccccgccatgatggccgccgcccaggccgccctgcagagcagctggggcatgatgggcatgctggccagccagcagaaccagagcggccccagcggcaacaaccagaaccagggcaacatgcagagagagcccaaccaggccttcggcagcggcaacaacagctacagcggcagcaacagcggcgccgccatcggctggggcagcgccagcaacgccggcagcggcagcggcttcaacggcggcttcggcagcagcatggacagcaagagcagcggctggggcatgtag

SEQ ID NO: 101851 - DNA, 888 bp, synthetic construct
  misc_feature 1..888: note = Description of Artificial Sequence: Synthetic coding sequence
  source 1..888: mol_type = other DNA
atgagcgagtacatcagagtgaccgaggacgagaacgacgagcccatcgagatccccagcgaggacgacggcaccgtgctgctgagcaccgtgaccgcccagttccccggcgcctgcggcctgagatacagaaaccccgtgagccagtgcatgagaggcgtgagactggtggagggcatcctgcacgcccccgacgccggctggggcaacctggtgtacgtggtgaactaccccaaggacaacaagagaaagatggacgagaccgacgccagcagcgccgtgaaggtgaagagagccgtgcagaagaccagcgacctgatcgtgctgggcctgccctggaagaccaccgagcaggacctgaaggagtacttcagcaccttcggcgaggtgctgatggtgcaggtgaagaaggacctgaagaccggccacagcaagggcttcggcttcgtgagattcaccgagtacgagacccaggtgaaggtgatgagccagagacacatgatcgacggcagatggtgcgactgcaagctgcccaacagcaagcagagccaggacgagcccctgagaagcagaaaggtgttcgtgggcagatgcaccgaggacatgaccgaggacgagctgagagagttcttcagccagtacggcgacgtgatggacgtgttcatccccaagcccttcagagccttcgccttcgtgaccttcgccgacgaccagatcgcccagagcctgtgcggcgaggacctgatcatcaagggcatcagcgtgcacatcagcaacgccgagcccaagcacaacagcaacagacagctggagagaagcggcagattcggcgtgcacctgatcagcaacgtgtacggcagaagcaccagcctgaaggtggtgctgtag

SEQ ID NO: 101852 - DNA, 897 bp, synthetic construct
  misc_feature 1..897: note = Description of Artificial Sequence: Synthetic coding sequence
  source 1..897: mol_type = other DNA
atgccccagatgctggccggcgagatctggtgcatgctgagcaccatccagaaggtgaagaaggacctgaagaccggccacagcaagggcttcggcttcgtgagattcaccgagtacgagacccaggtgaaggtgatgagccagagacacatgatcgacggcagatggtgcgactgcaagctgcccaacagcaagcagagccaggacgagcccctgagaagcagaaaggtgttcgtgggcagatgcaccgaggacatgaccgaggacgagctgagagagttcttcagccagtacggcgacgtgatggacgtgttcatccccaagcccttcagagccttcgccttcgtgaccttcgccgacgaccagatcgcccagagcctgtgcggcgaggacctgatcatcaagggcatcagcgtgcacatcagcaacgccgagcccaagcacaacagcaacagacagctggagagaagcggcagattcggcggcaaccccggcggcttcggcaaccagggcggcttcggcaacagcagaggcggcggcgccggcctgggcaacaaccagggcagcaacatgggcggcggcatgaacttcggcgccttcagcatcaaccccgccatgatggccgccgcccaggccgccctgcagagcagctggggcatgatgggcatgctggccagccagcagaaccagagcggccccagcggcaacaaccagaaccagggcaacatgcagagagagcccaaccaggccttcggcagcggcaacaacagctacagcggcagcaacagcggcgccgccatcggctggggcagcgccagcaacgccggcagcggcagcggcttcaacggcggcttcggcagcagcatggacagcaagagcagcggctggggcatgtag

SEQ ID NO: 101853 - DNA, 1533 bp, synthetic construct
  misc_feature 1..1533: note = Description of Artificial Sequence: Synthetic coding sequence
  source 1..1533: mol_type = other DNA
atggccgccgacagcgacgacggcgccgtgagcgcccccgccgccagcgacggcggcgtgagcaagagcaccaccagcggcgaggagctggtggtgcaggtgcccgtggtggacgtgcagagcaacaacttcaaggagatgtggcccagcctgctgctggccatcaagaccgccaacttcgtggccgtggacaccgagctgagcggcctgggcgacagaaagagcctgctgaaccagtgcatcgaggagagatacaaggccgtgtgccacgccgccagaaccagaagcatcctgagcctgggcctggcctgcttcaagagacagcccgacaagggcgagcacagctacctggcccaggtgttcaacctgaccctgctgtgcatggaggagtacgtgatcgagcccaagagcgtgcagttcctgatccagcacggcttcaacttcaaccagcagtacgcccagggcatcccctaccacaagggcaacgacaagggcgacgagagccagagccagagcgtgagaaccctgttcctggagctgatcagagccagaagacccctggtgctgcacaacggcctgatcgacctggtgttcctgtaccagaacttctacgcccacctgcccgagagcctgggcaccttcaccgccgacctgtgcgagatgttccccgccggcatctacgacaccaagtacgccgccgagttccacgccagattcgtggccagctacctggagtacgccttcagaaagtgcgagagagagaacggcaagcagagagccgccggcagcccccacctgaccctggagttctgcaactaccccagcagcatgagagaccacatcgactacagatgctgcctgccccccgccacccacagaccccaccccaccagcatctgcgacaacttcagcgcctacggctggtgccccctgggcccccagtgcccccagagccacgacatcgacctgatcatcgacaccgacgaggccgccgccgaggacaagagaagaagaagaagaagaagagagaagagaaagagagccctgctgaacctgcccggcacccagaccagcggcgaggccaaggacggcccccccaagaagcaggtgtgcggcgacagcatcaagcccgaggagaccgagcaggaggtggccgccgacgagaccagaaacctgccccacagcaagcagggcaacaagaacgacctggagatgggcatcaaggccgccagacccgagatcgccgacagagccaccagcgaggtgcccggcagccaggccagccccaaccccgtgcccggcgacggcctgcacagagccggcttcgacgccttcatgaccggctacgtgatggcctacgtggaggtgagccagggcccccagccctgcagcagcggcccctggctgcccgagtgccacaacaaggtgtacctgagcggcaaggccgtgcccctgaccgtggccaagagccagttcagcagaagcagcaaggcccacaaccagaagatgaagctgacctggggcagcagctag

SEQ ID NO: 101854 - DNA, 1293 bp, synthetic construct
  misc_feature 1..1293: note = Description of Artificial Sequence: Synthetic coding sequence
  source 1..1293: mol_type = other DNA
atggccgccgacagcgacgacggcgccgtgagcgcccccgccgccagcgacggcgccgagtgggcctggggccaggaggagttcgccgagcccggcgagcacagctacctggcccaggtgttcaacctgaccctgctgtgcatggaggagtacgtgatcgagcccaagagcgtgcagttcctgatccagcacggcttcaacttcaaccagcagtacgcccagggcatcccctaccacaagggcaacgacaagggcgacgagagccagagccagagcgtgagaaccctgttcctggagctgatcagagccagaagacccctggtgctgcacaacggcctgatcgacctggtgttcctgtaccagaacttctacgcccacctgcccgagagcctgggcaccttcaccgccgacctgtgcgagatgttccccgccggcatctacgacaccaagtacgccgccgagttccacgccagattcgtggccagctacctggagtacgccttcagaaagtgcgagagagagaacggcaagcagagagccgccggcagcccccacctgaccctggagttctgcaactaccccagcagcatgagagaccacatcgactacagatgctgcctgccccccgccacccacagaccccaccccaccagcatctgcgacaacttcagcgcctacggctggtgccccctgggcccccagtgcccccagagccacgacatcgacctgatcatcgacaccgacgaggccgccgccgaggacaagagaagaagaagaagaagaagagagaagagaaagagagccctgctgaacctgcccggcacccagaccagcggcgaggccaaggacggcccccccaagaagcaggtgtgcggcgacagcatcaagcccgaggagaccgagcaggaggtggccgccgacgagaccagaaacctgccccacagcaagcagggcaacaagaacgacctggagatgggcatcaaggccgccagacccgagatcgccgacagagccaccagcgaggtgcccggcagccaggccagccccaaccccgtgcccggcgacggcctgcacagagccggcttcgacgccttcatgaccggctacgtgatggcctacgtggaggtgagccagggcccccagccctgcagcagcggcccctggctgcccgagtgccacaacaaggtgtacctgagcggcaaggccgtgcccctgaccgtggccaagagccagttcagcagaagcagcaaggcccacaaccagaagatgaagctgacctggggcagcagctag

SEQ ID NO: 101855 - DNA, 1263 bp, synthetic construct
  misc_feature 1..1263: note = Description of Artificial Sequence: Synthetic coding sequence
  source 1..1263: mol_type = other DNA
atgaccatggagaagggcatgagcagcggcgagggcctgcccagcagaagcagccaggtgagcgccggcaagatcaccgccaaggagctggagaccaagcagagctacaaggagaagagaggcggcttcgtgctggtgcacgccggcgccggctaccacagcgagagcaaggccaaggagtacaagcacgtgtgcaagagagcctgccagaaggccatcgagaagctgcaggccggcgccctggccaccgacgccgtgaccgccgccctggtggagctggaggacagccccttcaccaacgccggcatgggcagcaacctgaacctgctgggcgagatcgagtgcgacgccagcatcatggacggcaagagcctgaacttcggcgccgtgggcgccctgagcggcatcaagaaccccgtgagcgtggccaacagactgctgtgcgagggccagaagggcaagctgagcgccggcagaatccccccctgcttcctggtgggcgagggcgcctacagatgggccgtggaccacggcatccccagctgcccccccaacatcatgaccaccagattcagcctggccgccttcaagagaaacaagagaaagctggagctggccgagagagtggacaccgacttcatgcagctgaagaagagaagacagagcagcgagaaggagaacgacagcggcaccctggacaccgtgggcgccgtggtggtggaccacgagggcaacgtggccgccgccgtgagcagcggcggcctggccctgaagcaccccggcagagtgggccaggccgccctgtacggctgcggctgctgggccgagaacaccggcgcccacaacccctacagcaccgccgtgagcaccagcggctgcggcgagcacctggtgagaaccatcctggccagagagtgcagccacgccctgcaggccgaggacgcccaccaggccctgctggagaccatgcagaacaagttcatcagcagccccttcctggccagcgaggacggcgtgctgggcggcgtgatcgtgctgagaagctgcagatgcagcgccgagcccgacagcagccagaacaagcagaccctgctggtggagttcctgtggagccacaccaccgagagcatgtgcgtgggctacatgagcgcccaggacggcaaggccaagacccacatcagcagactgccccccggcgccgtggccggccagagcgtggccatcgagggcggcgtgtgcagactggagagccccgtgaactag

SEQ ID NO: 101856 - DNA, 918 bp, synthetic construct
  misc_feature 1..918: note = Description of Artificial Sequence: Synthetic coding sequence
  source 1..918: mol_type = other DNA
atgaccatggagaagggcatgagcagcggcgagggcctgcccagcagaagcagccaggtgagcgccggcaagatcaccgccaaggagctggagaccaagcagagctacaaggagaagagaggcggcttcgtgctggtgcacgccggcgccggctaccacagcgagagcaaggccaaggagtacaagcacgtgtgcaagagagcctgccagaaggacagccccttcaccaacgccggcatgggcagcaacctgaacctgctgggcgagatcgagtgcgacgccagcatcatggacggcaagagcctgaacttcggcgccgtgggcgccctgagcggcatcaagaaccccgtgagcgtggccaacagactgctgtgcgagggccagaagggcaagctgagcgccggcagaatccccccctgcttcctggtgggcgagggcgcctacagatgggccgtggaccacggcatccccagctgcccccccaacatcatgaccaccagattcagcctggccgccttcaagagaaacaagagaaagctggagctggccgagagagtggacaccgacttcatgcagctgaagaagagaagacagagcagcgagaaggagaacgacagcggcaccctggacaccgtgggcgccgtggtggtggaccacgagggcaacgtggccgccgccgtgagcagcggcggcctggccctgaagcaccccggcagagtgggccaggccgccctgtacggctgcggctgctgggccgagaacaccggcgcccacaacccctacagcaccgccgtgagcaccagcggctgcggcgagcacctggtgagaaccatcctggccagagagtgcagccacgccctgcaggccgaggacgcccaccaggccctgctggagaccatgcagaacaagttcatctag

SEQ ID NO: 101857 - DNA, 333 bp, synthetic construct
  misc_feature 1..333: note = Description of Artificial Sequence: Synthetic coding sequence
  source 1..333: mol_type = other DNA
tgaaagatcaccgccaaggagctggagaccaagcagagctacaaggagaagagaggcggcttcgtgctggtgcacgccggcgccggctaccacagcgagagcaaggccaaggagtacaagcacgtgtgcaagagagcctgccagaaggccatcgagaagctgcaggccggcgccctggccaccgacgccgtgaccgccgccctggtggagctggagctgatgtggaagggccagttccaggtgctgtgcgtgctgaccaacctgttcctggacatcatcaagaaccccaccaagaccaagttcaagaccatcagcaacgtgaaggtgtactag

SEQ ID NO: 101858 - DNA, 918 bp, synthetic construct; identical to SEQ ID NO: 101856
  misc_feature 1..918: note = Description of Artificial Sequence: Synthetic coding sequence
  source 1..918: mol_type = other DNA

SEQ ID NO: 101859 - DNA, 438 bp, synthetic construct
  misc_feature 1..438: note = Description of Artificial Sequence: Synthetic coding sequence
  source 1..438: mol_type = other DNA
atgaccatggagaagggcatgagcagcggcgagggcctgcccagcagaagcagccaggtgagcgccggcaagatcaccgccaaggagctggagaccaagcagagctacaaggagaagagaggcggcttcgtgctggtgcacgccggcgccggctaccacagcgagagcaaggccaaggagtacaagcacgtgtgcaagagagcctgccagaaggccatcgagaagctgcaggccggcgccctggccaccgacgccgtgaccgccgccctggtggagctggaggacgtggagagcatcctgtgcgccccctactggctggagaacgtgcacatgctgtacaagctgagaatgctgaccaagccctgctggagactgtgcaagaccagcctgagcgtgcacctgagcctgcccgtgaagatggcctgcctggccgagtag

SEQ ID NO: 101860 - DNA, 390 bp, synthetic construct
  misc_feature 1..390: note = Description of Artificial Sequence: Synthetic coding sequence
  source 1..390: mol_type = other DNA
atgaccatggagaagggcatgagcagcggcgagggcctgcccagcagaagcagccaggtgagcgccggcaagatcaccgccaaggagctggagaccaagcagagctacaaggagaagagaggcggcttcgtgctggtgcacgccggcgccggctaccacagcgagagcaaggccaaggagtacaagcacgtgtgcaagagagcctgccagaaggccatcgagaagctgcaggccggcgccctggccaccgacgccgtgaccgccgccctggtggagctggaggtgtacacccacagctacaccagctggagctgcatccagcccagcatccacgtgctgctggtgaagagacagagaaagagccccctgcccagaatcagcaccttctag

SEQ ID NO: 101861 - DNA, 1443 bp, synthetic construct
  misc_feature 1..1443: note = Description of Artificial Sequence: Synthetic coding sequence
  source 1..1443: mol_type = other DNA
atgctgctgtgcaccgccagactggtgggcctgcagctgctgatcagctgctgctgggccttcgcctgccacagcaccgagagcagccccgacttcaccctgcccggcgactacctgctggccggcctgttccccctgcacagcggctgcctgcaggtgagacacagacccgaggtgaccctgtgcgacagaagctgcagcttcaacgagcacggctaccacctgttccaggccatgagactgggcgtggaggagatcaacaacagcaccgccctgctgcccaacatcaccctgggctaccagctgtacgacgtgtgcagcgacagcgccaacgtgtacgccaccctgagagtgctgagcctgcccggccagcaccacatcgagctgcagggcgacctgctgcactacagccccaccgtgctggccgtgatcggccccgacagcaccaacagagccgccaccaccgccgccctgctgagccccttcctggtgcccatgatcagctacgccgccagcagcgagaccctgagcgtgaagagacagtaccccagcttcctgagaaccatccccaacgacaagtaccaggtggagaccatggtgctgctgctgcagaagttcggctggacctggatcagcctggtgggcagcagcgacgactacggccagctgggcgtgcaggccctggagaaccaggccaccggccagggcatctgcatcgccttcaaggacatcatgcccttcagcgcccaggtgggcgacgagagaatgcagtgcctgatgagacacctggcccaggccggcgccaccgtggtggtggtgttcagcagcagacagctggccagagtgttcttcgagagcgtggtgctgaccaacctgaccggcaaggtgtgggtggccagcgaggcctgggccctgagcagacacatcaccggcgtgcccggcatccagagaatcggcatggtgctgggcgtggccatccagaagagagccgtgcccggcctgaaggccttcgaggaggcctacgccagagccgacaagaaggcccccagaccctgccacaagggcagctggtgcagcagcaaccagctgtgcagagagtgccaggccttcatggcccacaccatgcccaagctgaaggccttcagcatgagcagcgcctacaacgcctacagagccgtgtacgccgtggcccacggcctgcaccagctgctgggctgcgccagcggcgcctgcagcagaggcagagtgtacccctggcagaccagcaccgacgccagcctggtgggcaagaagagcggccacctgagagaggccagacccgccagcagagccctgtggtgcttctggctgtgcgtgagcacccccctgggctgctgctggcagctgaccagatgctgctgctgctgctgcctgggcctgctggcctgcctgcccggcacctag

SEQ ID NO: 101862 - DNA, 2526 bp, synthetic construct
  misc_feature 1..2526: note = Description of Artificial Sequence: Synthetic coding sequence
  source 1..2526: mol_type = other DNA
atgctgctgtgcaccgccagactggtgggcctgcagctgctgatcagctgctgctgggccttcgcctgccacagcaccgagagcagccccgacttcaccctgcccggcgactacctgctggccggcctgttccccctgcacagcggctgcctgcaggtgagacacagacccgaggtgaccctgtgcgacagaagctgcagcttcaacgagcacggctaccacctgttccaggccatgagactgggcgtggaggagatcaacaacagcaccgccctgctgcccaacatcaccctgggctaccagctgtacgacgtgtgcagcgacagcgccaacgtgtacgccaccctgagagtgctgagcctgcccggccagcaccacatcgagctgcagggcgacctgctgcactacagccccaccgtgctggccgtgatcggccccgacagcaccaacagagccgccaccaccgccgccctgctgagccccttcctggtgcccatgatcagctacgccgccagcagcgagaccctgagcgtgaagagacagtaccccagcttcctgagaaccatccccaacgacaagtaccaggtggagaccatggtgctgctgctgcagaagttcggctggacctggatcagcctggtgggcagcagcgacgactacggccagctgggcgtgcaggccctggagaaccaggccaccggccagggcatctgcatcgccttcaaggacatcatgcccttcagcgcccaggtgggcgacgagagaatgcagtgcctgatgagacacctggcccaggccggcgccaccgtggtggtggtgttcagcagcagacagctggccagagtgttcttcgagagcgtggtgctgaccaacctgaccggcaaggtgtgggtggccagcgaggcctgggccctgagcagacacatcaccggcgtgcccggcatccagagaatcggcatggtgctgggcgtggccatccagaagagagccgtgcccggcctgaaggccttcgaggaggcctacgccagagccgacaagaaggcccccagaccctgccacaagggcagctggtgcagcagcaaccagctgtgcagagagtgccaggccttcatggcccacaccatgcccaagctgaaggccttcagcatgagcagcgcctacaacgcctacagagccgtgtacgccgtggcccacggcctgcaccagctgctgggctgcgccagcggcgcctgcagcagaggcagagtgtacccctggcagctgctggagcagatccacaaggtgcacttcctgctgcacaaggacaccgtggccttcaacgacaacagagaccccctgagcagctacaacatcatcgcctgggactggaacggccccaagtggaccttcaccgtgctgggcagcagcacctggagccccgtgcagctgaacatcaacgagaccaagatccagtggcacggcaaggacaaccaggtgcccaagagcgtgtgcagcagcgactgcctggagggccaccagagagtggtgaccggcttccaccactgctgcttcgagtgcgtgccctgcggcgccggcaccttcctgaacaagagcgacctgtacagatgccagccctgcggcaaggaggagtgggcccccgagggcagccagacctgcttccccagaaccgtggtgttcctggccctgagagagcacaccagctgggtgctgctggccgccaacaccctgctgctgctgctgctgctgggcaccgccggcctgttcgcctggcacctggacacccccgtggtgagaagcgccggcggcagactgtgcttcctgatgctgggcagcctggccgccggcagcggcagcctgtacggcttcttcggcgagcccaccagacccgcctgcctgctgagacaggccctgttcgccctgggcttcaccatcttcctgagctgcctgaccgtgagaagcttccagctgatcatcatcttcaagttcagcaccaaggtgcccaccttctaccacgcctgggtgcagaaccacggcgccggcctgttcgtgatgatcagcagcgccgcccagctgctgatctgcctgacctggctggtggtgtggacccccctgcccgccagagagtaccagagattcccccacctggtgatgctggagtgcaccgagaccaacagcctgggcttcatcctggccttcctgtacaacggcctgctgagcatcagcgccttcgcctgcagctacctgggcaaggacctgcccgagaactacaacgaggccaagtgcgtgaccttcagcctgctgttcaacttcgtgagctggatcgccttcttcaccaccgccagcgtgtacgacggcaagtacctgcccgccgccaacatgatggccggcctgagcagcctgagcagcggcttcggcggctacttcctgcccaagtgctacgtgatcctgtgcagacccgacctgaacagcaccgagcacttccaggccagcatccaggactacaccagaagatgcggcagcacctag

SEQ ID NO: 101863 - DNA, 1764 bp, synthetic construct
  misc_feature 1..1764: note = Description of Artificial Sequence: Synthetic coding sequence
  source 1..1764: mol_type = other DNA
atgctgctgtgcaccgccagactggtgggcctgcagctgctgatcagctgctgctgggccttcgcctgccacagcaccgagagcagccccgacttcaccctgcccggcgactacctgctggccggcctgttccccctgcacagcggctgcctgcaggtgagacacagacccgaggtgaccctgtgcgacagaagctgcagcttcaacgagcacggctaccacctgttccaggccatgagactgggcgtggaggagatcaacaacagcaccgccctgctgcccaacatcaccctgggctaccagctgtacgacgtgtgcagcgacagcgccaacgtgtacgccaccctgagagtgctgagcctgcccggccagcaccacatcgagctgcagggcgacctgctgcactacagccccaccgtgctggccgtgatcggccccgacagcaccaacagagccgccaccaccgccgccctgctgagccccttcctggtgcccatgctgctggagcagatccacaaggtgcacttcctgctgcacaaggacaccgtggccttcaacgacaacagagaccccctgagcagctacaacatcatcgcctgggactggaacggccccaagtggaccttcaccgtgctgggcagcagcacctggagccccgtgcagctgaacatcaacgagaccaagatccagtggcacggcaaggacaaccaggtgcccaagagcgtgtgcagcagcgactgcctggagggccaccagagagtggtgaccggcttccaccactgctgcttcgagtgcgtgccctgcggcgccggcaccttcctgaacaagagcgacctgtacagatgccagccctgcggcaaggaggagtgggcccccgagggcagccagacctgcttccccagaaccgtggtgttcctggccctgagagagcacaccagctgggtgctgctggccgccaacaccctgctgctgctgctgctgctgggcaccgccggcctgttcgcctggcacctggacacccccgtggtgagaagcgccggcggcagactgtgcttcctgatgctgggcagcctggccgccggcagcggcagcctgtacggcttcttcggcgagcccaccagacccgcctgcctgctgagacaggccctgttcgccctgggcttcaccatcttcctgagctgcctgaccgtgagaagcttccagctgatcatcatcttcaagttcagcaccaaggtgcccaccttctaccacgcctgggtgcagaaccacggcgccggcctgttcgtgatgatcagcagcgccgcccagctgctgatctgcctgacctggctggtggtgtggacccccctgcccgccagagagtaccagagattcccccacctggtgatgctggagtgcaccgagaccaacagcctgggcttcatcctggccttcctgtacaacggcctgctgagcatcagcgccttcgcctgcagctacctgggcaaggacctgcccgagaactacaacgaggccaagtgcgtgaccttcagcctgctgttcaacttcgtgagctggatcgccttcttcaccaccgccagcgtgtacgacggcaagtacctgcccgccgccaacatgatggccggcctgagcagcctgagcagcggcttcggcggctacttcctgcccaagtgctacgtgatcctgtgcagacccgacctgaacagcaccgagcacttccaggccagcatccaggactacaccagaagatgcggcagcacctag

SEQ ID NO: 101864 - DNA, 921 bp, synthetic construct
  misc_feature 1..921: note = Description of Artificial Sequence: Synthetic coding sequence
  source 1..921: mol_type = other DNA
atgagactgggcgtggaggagatcaacaacagcaccgccctgctgcccaacatcaccctgggctaccagctgtacgacgtgtgcagcgacagcgccaacgtgtacgccaccctgagagtgctgagcctgcccggccagcaccacatcgagctgcagggcgacctgctgcactacagccccaccgtgctggccgtgatcggccccgacagcaccaacagagccgccaccaccgccgccctgctgagccccttcctggtgcccatgctgctggagcagatccacaaggtgcacttcctgctgcacaaggacaccgtggccttcaacgacaacagagaccccctgagcagctacaacatcatcgcctgggactggaacggccccaagtggaccttcaccgtgctgggcagcagcacctggagccccgtgcagctgaacatcaacgagaccaagatccagtggcacggcaaggacaaccaggtgcccaagagcgtgtgcagcagcgactgcctggagggccaccagagagtggtgaccggcttccaccactgctgcttcgagtgcgtgccctgcggcgccggcaccttcctgaacaagagcgacctgtacagatgccagccctgcggcaaggaggagtgggcccccgagggcagccagacctgcttccccagaaccgtggtgttcctggccctgagagagcacaccagctgggtgctgctggccgccaacaccctgctgctgctgctgctgctgggcaccgccggcctgttcgcctggcacctggacacccccgtggtgagaagcgccggcggcagactgtgcttcctgatgctgggcagcctggccgccggcagcggcagcctgtacggcttcttcggcgagcccagcctgcccctggtgagccccagcagctgccccgcctag

SEQ ID NO: 101865 - DNA, 2520 bp, synthetic construct
  misc_feature 1..2520: note = Description of Artificial Sequence: Synthetic coding sequence
  source 1..2520: mol_type = other DNA
atgggccccagagccaagaccatcagcagcctgttcttcctgctgtgggtgctggccgagcccgccgagaacagcgacttctacctgcccggcgactacctgctgggcggcctgttcagcctgcacgccaacatgaagggcatcgtgcacctgaacttcctgcaggtgcccatgtgcaaggagtacgaggtgaaggtgatcggctacaacctgatgcaggccatgagattcgccgtggaggagatcaacaacgacagcagcctgctgcccggcgtgctgctgggctacgagatcgtggacgtgtgctacatcagcaacaacgtgcagcccgtgctgtacttcctggcccacgaggacaacctgctgcccatccaggaggactacagcaactacatcagcagagtggtggccgtgatcggccccgacaacagcgagagcgtgatgaccgtggccaacttcctgagcctgttcctgctgccccagatcacctacagcgccatcagcgacgagctgagagacaaggtgagattccccgccctgctgagaaccacccccagcgccgaccaccacatcgaggccatggtgcagctgatgctgcacttcagatggaactggatcatcgtgctggtgagcagcgacacctacggcagagacaacggccagctgctgggcgagagagtggccagaagagacatctgcatcgccttccaggagaccctgcccaccctgcagcccaaccagaacatgaccagcgaggagagacagagactggtgaccatcgtggacaagctgcagcagagcaccgccagagtggtggtggtgttcagccccgacctgaccctgtaccacttcttcaacgaggtgctgagacagaacttcaccggcgccgtgtggatcgccagcgagagctgggccatcgaccccgtgctgcacaacctgaccgagctgagacacctgggcaccttcctgggcatcaccatccagagcgtgcccatccccggcttcagcgagttcagagagtggggcccccaggccggccccccccccctgagcagaaccagccagagctacacctgcaaccaggagtgcgacaactgcctgaacgccaccctgagcttcaacaccatcctgagactgagcggcgagagagtggtgtacagcgtgtacagcgccgtgtacgccgtggcccacgccctgcacagcctgctgggctgcgacaagagcacctgcaccaagagagtggtgtacccctggcagctgctggaggagatctggaaggtgaacttcaccctgctggaccaccagatcttcttcgacccccagggcgacgtggccctgcacctggagatcgtgcagtggcagtgggacagaagccagaaccccttccagagcgtggccagctactaccccctgcagagacagctgaagaacatccaggacatcagctggcacaccatcaacaacaccatccccatgagcatgtgcagcaagagatgccagagcggccagaagaagaagcccgtgggcatccacgtgtgctgcttcgagtgcatcgactgcctgcccggcaccttcctgaaccacaccgaggacgagtacgagtgccaggcctgccccaacaacgagtggagctaccagagcgagaccagctgcttcaagagacagctggtgttcctggagtggcacgaggcccccaccatcgccgtggccctgctggccgccctgggcttcctgagcaccctggccatcctggtgatcttctggagacacttccagacccccatcgtgagaagcgccggcggccccatgtgcttcctgatgctgaccctgctgctggtggcctacatggtggtgcccgtgtacgtgggcccccccaaggtgagcacctgcctgtgcagacaggccctgttccccctgtgcttcaccatctgcatcagctgcatcgccgtgagaagcttccagatcgtgtgcgccttcaagatggccagcagattccccagagcctacagctactgggtgagataccagggcccctacgtgagcatggccttcatcaccgtgctgaagatggtgatcgtggtgatcggcatgctggccaccggcctgagccccaccaccagaaccgaccccgacgaccccaagatcaccatcgtgagctgcaaccccaactacagaaacagcctgctgttcaacaccagcctggacctgctgctgagcgtggtgggcttcagcttcgcctacatgggcaaggagctgcccaccaactacaacgaggccaagttcatcaccctgagcatgaccttctacttcaccagcagcgtgagcctgtgcaccttcatgagcgcctacagcggcgtgctggtgaccatcgtggacctgctggtgaccgtgctgaacctgctggccatcagcctgggctacttcggccccaagtgctacatgatcctgttctaccccgagagaaacacccccgcctacttcaacagcatgatccagggctacaccatgagaagagactag

SEQ ID NO: 101866 - DNA, 2559 bp, synthetic construct
  misc_feature 1..2559: note = Description of Artificial Sequence: Synthetic coding sequence
  source 1..2559: mol_type = other DNA
atgctgggccccgccgtgctgggcctgagcctgtgggccctgctgcaccccggcaccggcgcccccctgtgcctgagccagcagctgagaatgaagggcgactacgtgctgggcggcctgttccccctgggcgaggccgaggaggccggcctgagaagcagaaccagacccagcagccccgtgtgcaccagattcagcagcaacggcctgctgtgggccctggccatgaagatggccgtggaggagatcaacaacaagagcgacctgctgcccggcctgagactgggctacgacctgttcgacacctgcagcgagcccgtggtggccatgaagcccagcctgatgttcctggccaaggccggcagcagagacatcgccgcctactgcaactacacccagtaccagcccagagtgctggccgtgatcggcccccacagcagcgagctggccatggtgaccggcaagttcttcagcttcttcctgatgccccaggtgagctacggcgccagcatggagctgctgagcgccagagagaccttccccagcttcttcagaaccgtgcccagcgacagagtgcagctgaccgccgccgccgagctgctgcaggagttcggctggaactgggtggccgccctgggcagcgacgacgagtacggcagacagggcctgagcatcttcagcgccctggccgccgccagaggcatctgcatcgcccacgagggcctggtgcccctgcccagagccgacgacagcagactgggcaaggtgcaggacgtgctgcaccaggtgaaccagagcagcgtgcaggtggtgctgctgttcgccagcgtgcacgccgcccacgccctgttcaactacagcatcagcagcagactgagccccaaggtgtgggtggccagcgaggcctggctgaccagcgacctggtgatgggcctgcccggcatggcccagatgggcaccgtgctgggcttcctgcagagaggcgcccagctgcacgagttcccccagtacgtgaagacccacctggccctggccaccgaccccgccttctgcagcgccctgggcgagagagagcagggcctggaggaggacgtggtgggccagagatgcccccagtgcgactgcatcaccctgcagaacgtgagcgccggcctgaaccaccaccagaccttcagcgtgtacgccgccgtgtacagcgtggcccaggccctgcacaacaccctgcagtgcaacgccagcggctgccccgcccaggaccccgtgaagccctggcagctgctggagaacatgtacaacctgaccttccacgtgggcggcctgcccctgagattcgacagcagcggcaacgtggacatggagtacgacctgaagctgtgggtgtggcagggcagcgtgcccagactgcacgacgtgggcagattcaacggcagcctgagaaccgagagactgaagatcagatggcacaccagcgacaaccagaagcccgtgagcagatgcagcagacagtgccaggagggccaggtgagaagagtgaagggcttccacagctgctgctacgactgcgtggactgcgaggccggcagctacagacagaaccccgacgacatcgcctgcaccttctgcggccaggacgagtggagccccgagagaagcaccagatgcttcagaagaagaagcagattcctggcctggggcgagcccgccgtgctgctgctgctgctgctgctgagcctggccctgggcctggtgctggccgccctgggcctgttcgtgcaccacagagacagccccctggtgcaggccagcggcggccccctggcctgcttcggcctggtgtgcctgggcctggtgtgcctgagcgtgctgctgttccccggccagcccagccccgccagatgcctggcccagcagcccctgagccacctgcccctgaccggctgcctgagcaccctgttcctgcaggccgccgagatcttcgtggagagcgagctgcccctgagctgggccgacagactgagcggctgcctgagaggcccctgggcctggctggtggtgctgctggccatgctggtggaggtggccctgtgcacctggtacctggtggccttcccccccgaggtggtgaccgactggcacatgctgcccaccgaggccctggtgcactgcagaaccagaagctgggtgagcttcggcctggcccacgccaccaacgccaccctggccttcctgtgcttcctgggcaccttcctggtgagaagccagcccggctgctacaacagagccagaggcctgaccttcgccatgctggcctacttcatcacctgggtgagcttcgtgcccctgctggccaacgtgcaggtggtgctgagacccgccgtgcagatgggcgccctgctgctgtgcgtgctgggcatcctggccgccttccacctgcccagatgctacctgctgatgagacagcccggcctgaacacccccgagttcttcctgggcggcggccccggcgacgcccagggccagaacgacggcaacaccggcaaccagggcaagcacgagtag

SEQ ID NO: 101867 - DNA, 876 bp, synthetic construct
  misc_feature 1..876: note = Description of Artificial Sequence: Synthetic coding sequence
  source 1..876: mol_type = other DNA
atgatccccatccagctgaccgtgttcttcatgatcatctacgtgctggagagcctgaccatcatcgtgcagagcagcctgatcgtggccgtgctgggcagagagtggctgcaggtgagaagactgatgcccgtggacatgatcctgatcagcctgggcatcagcagattctgcctgcagtgggccagcatgctgaacaacttctgcagctacttcaacctgaactacgtgctgtgcaacctgaccatcacctgggagttcttcaacatcctgaccttctggctgaacagcctgctgaccgtgttctactgcatcaaggtgagcagcttcacccaccacatcttcctgtggctgagatggagaatcctgagactgttcccctggatcctgctgggcagcctgatgatcacctgcgtgaccatcatccccagcgccatcggcaactacatccagatccagctgctgaccatggagcacctgcccagaaacagcaccgtgaccgacaagctggagaacttccaccagtaccagttccaggcccacaccgtggccctggtgatccccttcatcctgttcctggccagcaccatcttcctgatggccagcctgaccaagcagatccagcaccacagcaccggccactgcaaccccagcatgaaggccagattcaccgccctgagaagcctggccgtgctgttcatcgtgttcaccagctacttcctgaccatcctgatcaccatcatcggcaccctgttcgacaagagatgctggctgtgggtgtgggaggccttcgtgtacgccttcatcctgatgcacagcaccagcctgatgctgagcagccccaccctgaagagaatcctgaagggcaagtgctag

SEQ ID NO: 101868 - DNA, 900 bp, synthetic construct
  misc_feature 1..900: note = Description of Artificial Sequence: Synthetic coding sequence
  source 1..900: mol_type = other DNA
atgatgtgcttcctgctgatcatcagcagcatcctggtggtgttcgccttcgtgctgggcaacgtggccaacggcttcatcgccctggtgaacgtgatcgactgggtgaacaccagaaagatcagcagcgccgagcagatcctgaccgccctggtggtgagcagaatcggcctgctgtgggtgatgctgttcctgtggtacgccaccgtgttcaacagcgccctgtacggcctggaggtgagaatcgtggccagcaacgcctgggccgtgaccaaccacttcagcatgtggctggccgccagcctgagcatcttctgcctgctgaagatcgccaacttcagcaacctgatcagcctgcacctgaagaagagaatcaagagcgtggtgctggtgatcctgctgggccccctggtgttcctgatctgcaacctggccgtgatcaccatggacgagagagtgtggaccaaggagtacgagggcaacgtgacctggaagatcaagctgagaaacgccatccacctgagcagcctgaccgtgaccaccctggccaacctgatccccttcaccctgagcctgatctgcttcctgctgctgatctgcagcctgtgcaagcacctgaagaagatgagactgcacagcaagggcagccaggaccccagcaccaaggtgcacatcaaggccctgcagaccgtgaccagcttcctgatgctgttcgccatctacttcctgtgcatcatcaccagcacctggaacctgagaacccagcagagcaagctggtgctgctgctgtgccagaccgtggccatcatgtaccccagcttccacagcttcatcctgatcatgggcagcagaaagctgaagcagaccttcctgagcgtgctgtggcagatgaccagatag

SEQ ID NO: 101869 - DNA, 930 bp, synthetic construct
  misc_feature 1..930: note = Description of Artificial Sequence: Synthetic coding sequence
  source 1..930: mol_type = other DNA
atgatgagcttcctgcacatcgtgttcagcatcctggtggtggtggccttcatcctgggcaacttcgccaacggcttcatcgccctgatcaacttcatcgcctgggtgaagagacagaagatcagcagcgccgaccagatcatcgccgccctggccgtgagcagagtgggcctgctgtgggtgatcctgctgcactggtacagcaccgtgctgaaccccaccagcagcaacctgaaggtgatcatcttcatcagcaacgcctgggccgtgaccaaccacttcagcatctggctggccaccagcctgagcatcttctacctgctgaagatcgtgaacttcagcagactgatcttccaccacctgaagagaaaggccaagagcgtggtgctggtgatcgtgctgggcagcctgttcttcctggtgtgccacctggtgatgaagcacacctacatcaacgtgtggaccgaggagtgcgagggcaacgtgacctggaagatcaagctgagaaacgccatgcacctgagcaacctgaccgtggccatgctggccaacctgatccccttcaccctgaccctgatcagcttcctgctgctgatctacagcctgtgcaagcacctgaagaagatgcagctgcacggcaagggcagccaggaccccagcaccaagatccacatcaaggccctgcagaccgtgaccagcttcctgatcctgctggccatctacttcctgtgcctgatcatcagcttctggaacttcaagatgagacccaaggagatcgtgctgatgctgtgccaggccttcggcatcatctaccccagcttccacagcttcatcctgatctggggcaacaagaccctgaagcagaccttcctgagcgtgctgtggcaggtgacctgctgggccaagggccagaaccagagcaccccctag

SEQ ID NO: 101870 - DNA, 951 bp, synthetic construct
  misc_feature 1..951: note = Description of Artificial Sequence: Synthetic coding sequence
  source 1..951: mol_type = other DNA
atgatgggcctgaccgagggcgtgttcctgatcctgagcggcacccagttcaccctgggcatcctggtgaactgcttcatcgagctggtgaacggcagcagctggttcaagaccaagagaatgagcctgagcgacttcatcatcaccaccctggccctgctgagaatcatcctgctgtgcatcatcctgaccgacagcttcctgatcgagttcagccccaacacccacgacagcggcatcatcatgcagatcatcgacgtgagctggaccttcaccaaccacctgagcatctggctggccacctgcctgggcgtgctgtactgcctgaagatcgccagcttcagccaccccaccttcctgtggctgaagtggagagtgagcagagtgatggtgtggatgctgctgggcgccctgctgctgagctgcggcagcaccgccagcctgatcaacgagttcaagctgtacagcgtgttcagaggcatcgaggccaccagaaacgtgaccgagcacttcagaaagaagagaagcgagtactacctgatccacgtgctgggcaccctgtggtacctgccccccctgatcgtgagcctggccagctacagcctgctgatcttcagcctgggcagacacaccagacagatgctgcagaacggcaccagcagcagagaccccaccaccgaggcccacaagagagccatcagaatcatcctgagcttcttcttcctgttcctgctgtacttcctggccttcctgatcgccagcttcggcaacttcctgcccaagaccaagatggccaagatgatcggcgaggtgatgaccatgttctaccccgccggccacagcttcatcctgatcctgggcaacagcaagctgaagcagaccttcgtggtgatgctgagatgcgagagcggccacctgaagcccggcagcaagggccccatcttcagctag

SEQ ID NO: 101871 - DNA, 960 bp, synthetic construct
  misc_feature 1..960: note = Description of Artificial Sequence: Synthetic coding sequence
  source 1..960: mol_type = other DNA
atgatcaccttcctgcccatcatcttcagcatcctgatcgtggtgatcttcgtgatcggcaacttcgccaacggcttcatcgccctggtgaacagcatcgagtgggtgaagagacagaagatcagcttcgtggaccagatcctgaccgccctggccgtgagcagagtgggcctgctgtgggtgctgctgctgcactggtacgccacccagctgaaccccgccttctacagcgtggaggtgagaatcaccgcctacaacgtgtgggccgtgaccaaccacttcagcagctggctggccaccagcctgagcatgttctacctgctgagaatcgccaacttcagcaacctgatcttcctgagaatcaagagaagagtgaagagcgtggtgctggtgatcctgctgggccccctgctgttcctggtgtgccacctgttcgtgatcaacatggacgagaccgtgtggaccaaggagtacgagggcaacgtgacctggaagatcaagctgagaagcgccatgtaccacagcaacatgaccctgaccatgctggccaacttcgtgcccctgaccctgaccctgatcagcttcctgctgctgatctgcagcctgtgcaagcacctgaagaagatgcagctgcacggcaagggcagccaggaccccagcaccaaggtgcacatcaaggccctgcagaccgtgaccagcttcctgctgctgtgcgccatctacttcctgagcatgatcatcagcgtgtgcaacttcggcagactggagaagcagcccgtgttcatgttctgccaggccatcatcttcagctaccccagcacccaccccttcatcctgatcctgggcaacaagaagctgaagcagatcttcctgagcgtgctgagacacgtgagatactgggtgaaggacagaagcctgagactgcacagattcaccagaggcgccctgtgcgtgttctag

SEQ ID NO: 101872 - DNA, 930 bp, synthetic construct
  misc_feature 1..930: note = Description of Artificial Sequence: Synthetic coding sequence
  source 1..930: mol_type = other DNA
atgaccaccttcatccccatcatcttcagcagcgtggtggtggtgctgttcgtgatcggcaacttcgccaacggcttcatcgccctggtgaacagcatcgagagagtgaagagacagaagatcagcttcgccgaccagatcctgaccgccctggccgtgagcagagtgggcctgctgtgggtgctgctgctgaactggtacagcaccgtgttcaaccccgccttctacagcgtggaggtgagaaccaccgcctacaacgtgtgggccgtgaccggccacttcagcaactggctggccaccagcctgagcatcttctacctgctgaagatcgccaacttcagcaacctgatcttcctgcacctgaagagaagagtgaagagcgtgatcctggtgatgctgctgggccccctgctgttcctggcctgccagctgttcgtgatcaacatgaaggagatcgtgagaaccaaggagtacgagggcaacctgacctggaagatcaagctgagaagcgccgtgtacctgagcgacgccaccgtgaccaccctgggcaacctggtgcccttcaccctgaccctgctgtgcttcctgctgctgatctgcagcctgtgcaagcacctgaagaagatgcagctgcacggcaagggcagccaggaccccagcaccaaggtgcacatcaaggccctgcagaccgtgatcttcttcctgctgctgtgcgccgtgtacttcctgagcatcatgatcagcgtgtggagcttcggcagcctggagaacaagcccgtgttcatgttctgcaaggccatcagattcagctaccccagcatccaccccttcatcctgatctggggcaacaagaagctgaagcagaccttcctgagcgtgctgagacaggtgagatactgggtgaagggcgagaagcccagcagcccctag

SEQ ID NO: 101873 - DNA, 1002 bp, synthetic construct
  misc_feature 1..1002: note = Description of Artificial Sequence: Synthetic coding sequence
  source 1..1002: mol_type = other DNA
atgctgaccctgaccagaatcagaaccgtgagctacgaggtgagaagcaccttcctgttcatcagcgtgctggagttcgccgtgggcttcctgaccaacgccttcgtgttcctggtgaacttctgggacgtggtgaagagacaggccctgagcaacagcgactgcgtgctgctgtgcctgagcatcagcagactgttcctgcacggcctgctgttcctgagcgccatccagctgacccacttccagaagctgagcgagcccctgaaccacagctaccaggccatcatcatgctgtggatgatcgccaaccaggccaacctgtggctggccgcctgcctgagcctgctgtactgcagcaagctgatcagattcagccacaccttcctgatctgcctggccagctgggtgagcagaaagatcagccagatgctgctgggcatcatcctgtgcagctgcatctgcaccgtgctgtgcgtgtggtgcttcttcagcagaccccacttcaccgtgaccaccgtgctgttcatgaacaacaacaccagactgaactggcagatcaaggacctgaacctgttctacagcttcctgttctgctacctgtggagcgtgccccccttcctgctgttcctggtgagcagcggcatgctgaccgtgagcctgggcagacacatgagaaccatgaaggtgtacaccagaaacagcagagaccccagcctggaggcccacatcaaggccctgaagagcctggtgagcttcttctgcttcttcgtgatcagcagctgcgccgccttcatcagcgtgcccctgctgatcctgtggagagacaagatcggcgtgatggtgtgcgtgggcatcatggccgcctgccccagcggccacgccgccatcctgatcagcggcaacgccaagctgagaagagccgtgatgaccatcctgctgtgggcccagagcagcctgaaggtgagagccgaccacaaggccgacagcagaaccctgtgctag

SEQ ID NO: 101874 - DNA, 900 bp, synthetic construct
  misc_feature 1..900: note = Description of Artificial Sequence: Synthetic coding sequence
  source 1..900: mol_type = other DNA
atgctgagactgttctacttcagcgccatcatcgccagcgtgatcctgaacttcgtgggcatcatcatgaacctgttcatcaccgtggtgaactgcaagacctgggtgaagagccacagaatcagcagcagcgacagaatcctgttcagcctgggcatcaccagattcctgatgctgggcctgttcctggtgaacaccatctacttcgtgagcagcaacaccgagagaagcgtgtacctgagcgccttcttcgtgctgtgcttcatgttcctggacagcagcagcgtgtggttcgtgaccctgctgaacatcctgtactgcgtgaagatcaccaacttccagcacagcgtgttcctgctgctgaagagaaacatcagccccaagatccccagactgctgctggcctgcgtgctgatcagcgccttcaccacctgcctgtacatcaccctgagccaggccagccccttccccgagctggtgaccaccagaaacaacaccagcttcaacatcagcgagggcatcctgagcctggtggtgagcctggtgctgagcagcagcctgcagttcatcatcaacgtgaccagcgccagcctgctgatccacagcctgagaagacacatccagaagatgcagaagaacgccaccggcttctggaacccccagaccgaggcccacgtgggcgccatgaagctgatggtgtacttcctgatcctgtacatcccctacagcgtggccaccctggtgcagtacctgcccttctacgccggcatggacatgggcaccaagagcatctgcctgatcttcgccaccctgtacagccccggccacagcgtgctgatcatcatcacccaccccaagctgaagaccaccgccaagaagatcctgtgcttcaagaagtag

SEQ ID NO: 101875 - DNA, 972 bp, synthetic construct
  misc_feature 1..972: note = Description of Artificial Sequence: Synthetic coding sequence
  source 1..972: mol_type = other DNA
atggccaccgtgaacaccgacgccaccgacaaggacatcagcaagttcaaggtgaccttcaccctggtggtgagcggcatcgagtgcatcaccggcatcctgggcagcggcttcatcaccgccatctacggcgccgagtgggccagaggcaagaccctgcccaccggcgacagaatcatgctgatgctgagcttcagcagactgctgctgcagatctggatgatgctggagaacatcttcagcctgctgttcagaatcgtgtacaaccagaacagcgtgtacatcctgttcaaggtgatcaccgtgttcctgaaccacagcaacctgtggttcgccgcctggctgaaggtgttctactgcctgagaatcgccaacttcaaccaccccctgttcttcctgatgaagagaaagatcatcgtgctgatgccctggctgctgagactgagcgtgctggtgagcctgagcttcagcttccccctgagcagagacgtgttcaacgtgtacgtgaacagcagcatccccatccccagcagcaacagcaccgagaagaagtacttcagcgagaccaacatggtgaacctggtgttcttctacaacatgggcatcttcgtgcccctgatcatgttcatcctggccgccaccctgctgatcctgagcctgaagagacacaccctgcacatgggcagcaacgccaccggcagcagagaccccagcatgaaggcccacatcggcgccatcaaggccaccagctacttcctgatcctgtacatcttcaacgccatcgccctgttcctgagcaccagcaacatcttcgacacctacagcagctggaacatcctgtgcaagatcatcatggccgcctaccccgccggccacagcgtgcagctgatcctgggcaaccccggcctgagaagagcctggaagagattccagcaccaggtgcccctgtacctgaagggccagaccctgtag

SEQ ID NO: 101876 - DNA, 924 bp, synthetic construct
  misc_feature 1..924: note = Description of Artificial Sequence: Synthetic coding sequence
  source 1..924: mol_type = other DNA
atgcaggccgccctgaccgccttcttcgtgctgctgttcagcctgctgagcctgctgggcatcgccgccaacggcttcatcgtgctggtgctgggcagagagtggctgagatacggcagactgctgcccctggacatgatcctgatcagcctgggcgccagcagattctgcctgcagctggtgggcaccgtgcacaacttctactacagcgcccagaaggtggagtacagcggcggcctgggcagacagttcttccacctgcactggcacttcctgaacagcgccaccttctggttctgcagctggctgagcgtgctgttctgcgtgaagatcgccaacatcacccacagcaccttcctgtggctgaagtggagattccccggctgggtgccctggctgctgctgggcagcgtgctgatcagcttcatcatcaccctgctgttcttctgggtgaactaccccgtgtaccaggagttcctgatcagaaagttcagcggcaacatgacctacaagtggaacaccagaatcgagacctactacttccccagcctgaagctggtgatctggagcatccccttcagcgtgttcctggtgagcatcatgctgctgatcaacagcctgagaagacacacccagagaatgcagcacaacggccacagcctgcaggaccccagcacccaggcccacaccagagccctgaagagcctgatcagcttcctgatcctgtacgccctgagcttcctgagcctgatcatcgacgccgccaagttcatcagcatgcagaacgacttctactggccctggcagatcgccgtgtacctgtgcatcagcgtgcaccccttcatcctgatcttcagcaacctgaagctgagaagcgtgttcagccagctgctgctgctggccagaggcttctgggtggcctag

SEQ ID NO: 101877 - DNA, 945 bp, synthetic construct
  misc_feature 1..945: note = Description of Artificial Sequence: Synthetic coding sequence
  source 1..945: mol_type = other DNA
atggccaccgagctggacaagatcttcctgatcctggccatcgccgagttcatcatcagcatgctgggcaacgtgttcatcggcctggtgaactgcagcgagggcatcaagaaccagaaggtgttcagcgccgacttcatcctgacctgcctggccatcagcaccatcggccagctgctggtgatcctgttcgacagcttcctggtgggcctggccagccacctgtacaccacctacagactgggcaagaccgtgatcatgctgtggcacatgaccaaccacctgaccacctggctggccacctgcctgagcatcttctacttcttcaagatcgcccacttcccccacagcctgttcctgtggctgagatggagaatgaacggcatgatcgtgatgctgctgatcctgagcctgttcctgctgatcttcgacagcctggtgctggagatcttcatcgacatcagcctgaacatcatcgacaagagcaacctgaccctgtacctggacgagagcaagaccctgtacgacaagctgagcatcctgaagaccctgctgagcctgaccagcttcatccccttcagcctgttcctgaccagcctgctgttcctgttcctgagcctggtgagacacaccagaaacctgaagctgagcagcctgggcagcagagacagcagcaccgaggcccacagaagagccatgaagatggtgatgagcttcctgttcctgttcatcgtgcacttcttcagcctgcaggtggccaacggcatcttcttcatgctgtggaacaacaagtacatcaagttcgtgatgctggccctgaacgccttccccagctgccacagcttcatcctgatcctgggcaacagcaagctgagacagaccgccgtgagactgctgtggcacctgagaaactacaccaagacccccaacgccctgcccctgtag

SEQ ID NO: 101878 - DNA, 930 bp, synthetic construct
  misc_feature 1..930: note = Description of Artificial Sequence: Synthetic coding sequence
  source 1..930: mol_type = other DNA
atgatcaccttcctgcccatcatcttcagcagcctggtggtggtgaccttcgtgatcggcaacttcgccaacggcttcatcgccctggtgaacagcatcgagtggttcaagagacagaagatcagcttcgccgaccagatcctgaccgccctggccgtgagcagagtgggcctgctgtgggtgctgctgctgaactggtacagcaccgtgctgaaccccgccttcaacagcgtggaggtgagaaccaccgcctacaacatctgggccgtgatcaaccacttcagcaactggctggccaccaccctgagcatcttctacctgctgaagatcgccaacttcagcaacttcatcttcctgcacctgaagagaagagtgaagagcgtgatcctggtgatgctgctgggccccctgctgttcctggcctgccacctgttcgtgatcaacatgaacgagatcgtgagaaccaaggagttcgagggcaacatgacctggaagatcaagctgaagagcgccatgtacttcagcaacatgaccgtgaccatggtggccaacctggtgcccttcaccctgaccctgctgagcttcatgctgctgatctgcagcctgtgcaagcacctgaagaagatgcagctgcacggcaagggcagccaggaccccagcaccaaggtgcacatcaaggccctgcagaccgtgatcagcttcctgctgctgtgcgccatctacttcctgagcatcatgatcagcgtgtggagcttcggcagcctggagaacaagcccgtgttcatgttctgcaaggccatcagattcagctaccccagcatccaccccttcatcctgatctggggcaacaagaagctgaagcagaccttcctgagcgtgttctggcagatgagatactgggtgaagggcgagaagaccagcagcccctag

SEQ ID NO: 101879 - DNA, 930 bp, synthetic construct
  misc_feature 1..930: note = Description of Artificial Sequence: Synthetic coding sequence
  source 1..930: mol_type = other DNA
atgatcaccttcctgcccatcatcttcagcatcctgatcgtggtgaccttcgtgatcggcaacttcgccaacggcttcatcgccctggtgaacagcatcgagtggttcaagagacagaagatcagcttcgccgaccagatcctgaccgccctggccgtgagcagagtgggcctgctgtgggtgctggtgctgaactggtacgccaccgagctgaaccccgccttcaacagcatcgaggtgagaatcaccgcctacaacgtgtgggccgtgatcaaccacttcagcaactggctggccaccagcctgagcatcttctacctgctgaagatcgccaacttcagcaacctgatcttcctgcacctgaagagaagagtgaagagcgtggtgctggtgatcctgctgggccccctgctgttcctggtgtgccacctgttcgtgatcaacatgaaccagatcatctggaccaaggagtacgagggcaacatgacctggaagatcaagctgagaagcgccatgtacctgagcaacaccaccgtgaccatcctggccaacctggtgcccttcaccctgaccctgatcagcttcctgctgctgatctgcagcctgtgcaagcacctgaagaagatgcagctgcacggcaagggcagccaggaccccagcatgaaggtgcacatcaaggccctgcagaccgtgaccagcttcctgctgctgtgcgccatctacttcctgagcatcatcatgagcgtgtggagcttcgagagcctggagaacaagcccgtgttcatgttctgcgaggccatcgccttcagctaccccagcacccaccccttcatcctgatctggggcaacaagaagctgaagcagaccttcctgagcgtgctgtggcacgtgagatactgggtgaagggcgagaagcccagcagcagctag

SEQ ID NO: 101880 - DNA, 900 bp, synthetic construct
  misc_feature 1..900: note = Description of Artificial Sequence: Synthetic coding sequence
  source 1..900: mol_type = other DNA
atgctgagcgccggcctgggcctgctgatgctggtggccgtggtggagttcctgatcggcctgatcggcaacggcagcctggtggtgtggagcttcagagagtggatcagaaagttcaactggagcagctacaacctgatcatcctgggcctggccggctgcagattcctgctgcagtggctgatcatcctggacctgagcctgttccccctgttccagagcagcagatggctgagatacctgagcatcttctgggtgctggtgagccaggccagcctgtggttcgccaccttcctgagcgtgttctactgcaagaagatcaccaccttcgacagacccgcctacctgtggctgaagcagagagcctacaacctgagcctgtggtgcctgctgggctacttcatcatcaacctgctgctgaccgtgcagatcggcctgaccttctaccaccccccccagggcaacagcagcatcagataccccttcgagagctggcagtacctgtacgccttccagctgaacagcggcagctacctgcccctggtggtgttcctggtgagcagcggcatgctgatcgtgagcctgtacacccaccacaagaagatgaaggtgcacagcgccggcagaagagacgtgagagccaaggcccacatcaccgccctgaagagcctgggctgcttcctgctgctgcacctggtgtacatcatggccagccccttcagcatcaccagcaagacctacccccccgacctgaccagcgtgttcatctgggagaccctgatggccgcctaccccagcctgcacagcctgatcctgatcatgggcatccccagagtgaagcagacctgccagaagatcctgtggaagaccgtgtgcgccagaagatgctggggcccctag

SEQ ID NO: 101881 - DNA, 900 bp, synthetic construct
  misc_feature 1..900: note = Description of Artificial Sequence: Synthetic coding sequence
  source 1..900: mol_type = other DNA
atgatcaccttcctgtacatcttcttcagcatcctgatcatggtgctgttcgtgctgggcaacttcgccaacggcttcatcgccctggtgaacttcatcgactgggtgaagagaaagaagatcagcagcgccgaccagatcctgaccgccctggccgtgagcagaatcggcctgctgtgggccctgctgctgaactggtacctgaccgtgctgaaccccgccttctacagcgtggagctgagaatcaccagctacaacgcctgggtggtgaccaaccacttcagcatgtggctggccgccaacctgagcatcttctacctgctgaagatcgccaacttcagcaacctgctgttcctgcacctgaagagaagagtgagaagcgtgatcctggtgatcctgctgggcaccctgatcttcctggtgtgccacctgctggtggccaacatggacgagagcatgtgggccgaggagtacgagggcaacatgaccggcaagatgaagctgagaaacaccgtgcacctgagctacctgaccgtgaccaccctgtggagcttcatccccttcaccctgagcctgatcagcttcctgatgctgatctgcagcctgtgcaagcacctgaagaagatgcagctgcacggcgagggcagccaggacctgagcaccaaggtgcacatcaaggccctgcagaccctgatcagcttcctgctgctgtgcgccatcttcttcctgttcctgatcgtgagcgtgtggagccccagaagactgagaaacgaccccgtggtgatggtgagcaaggccgtgggcaacatctacctggccttcgacagcttcatcctgatctggagaaccaagaagctgaagcacaccttcctgctgatcctgtgccagatcagatgctag

SEQ ID NO: 101882 - DNA, 957 bp, synthetic construct
  misc_feature 1..957: note = Description of Artificial Sequence: Synthetic coding sequence
  source 1..957: mol_type = other DNA
atgaacggcgaccacatggtgctgggcagcagcgtgaccgacaagaaggccatcatcctggtgaccatcctgctgctgctgagactggtggccatcgccggcaacggcttcatcaccgccgccctgggcgtggagtgggtgctgagaagaatgctgctgccctgcgacaagctgctggtgagcctgggcgccagcagattctgcctgcagagcgtggtgatgggcaagaccatctacgtgttcctgcaccccatggccttcccctacaaccccgtgctgcagttcctggccttccagtgggacttcctgaacgccgccaccctgtggagcagcacctggctgagcgtgttctactgcgtgaagatcgccaccttcacccaccccgtgttcttctggctgaagcacaagctgagcggctggctgccctggatgctgttcagcagcgtgggcctgagcagcttcaccaccatcctgttcttcatcggcaaccacagaatgtaccagaactacctgagaaaccacctgcagccctggaacgtgaccggcgacagcatcagaagctactgcgagaagttctacctgttccccctgaagatgatcacctggaccatgcccaccgccgtgttcttcatctgcatgatcctgctgatcaccagcctgggcagacacagaaagaaggccctgctgaccaccagcggcttcagagagcccagcgtgcaggcccacatcaaggccctgctggccctgctgagcttcgccatgctgttcatcagctacttcctgagcctggtgttcagcgccgccggcatcttcccccccctggacttcaagttctgggtgtgggagagcgtgatctacctgtgcgccgccgtgcaccccatcatcctgctgttcagcaactgcagactgagagccgtgctgaagagcagaagaagcagcagatgcggcaccccctag

SEQ ID NO: 101883 - DNA, 1314 bp, synthetic construct
  misc_feature 1..1314: note = Description of Artificial Sequence: Synthetic coding sequence
  source 1..1314: mol_type = other DNA
atgcccaagttcaaggccgccagaggcgtgggcggccaggagaagcacgcccccctggccgaccagatcctggccggcaacgccgtgagagccggcgtgagagagaagagaagaggcagaggcaccggcgaggccgaggaggagtacgtgggccccagactgagcagaagaatcctgcagcaggccagacagcagcaggaggagctggaggccgagcacggcaccggcgacaagcccgccgcccccagagagagaaccaccagactgggccccagaatgccccaggacggcagcgacgacgaggacgaggagtggcccaccctggagaaggccgccaccatgaccgccgccggccaccacgccgaggtggtggtggaccccgaggacgagagagccatcgagatgttcatgaacaagaacccccccgccagaagaaccctggccgacatcatcatggagaagctgaccgagaagcagaccgaggtggagaccgtgatgagcgaggtgagcggcttccccatgccccagctggaccccagagtgctggaggtgtacagaggcgtgagagaggtgctgagcaagtacagaagcggcaagctgcccaaggccttcaagatcatccccgccctgagcaactgggagcagatcctgtacgtgaccgagcccgaggcctggaccgccgccgccatgtaccaggccaccagaatcttcgccagcaacctgaaggagagaatggcccagagattctacaacctggtgctgctgcccagagtgagagacgacgtggccgagtacaagagactgaacttccacctgtacatggccctgaagaaggccctgttcaagcccggcgcctggttcaagggcatcctgatccccctgtgcgagagcggcacctgcaccctgagagaggccatcatcgtgggcagcatcatcaccaagtgcagcatccccgtgctgcacagcagcgccgccatgctgaagatcgccgagatggagtacagcggcgccaacagcatcttcctgagactgctgctggacaagaagtacgccctgccctacagagtgctggacgccctggtgttccacttcctgggcttcagaaccgagaagagagagctgcccgtgctgtggcaccagtgcctgctgaccctggtgcagagatacaaggccgacctggccaccgaccagaaggaggccctgctggagctgctgagactgcagccccacccccagctgagccccgagatcagaagagagctgcagagcgccgtgcccagagacgtggaggacgtgcccatcaccgtggagtag

SEQ ID NO: 101884 - DNA, 951 bp, synthetic construct
  misc_feature 1..951: note = Description of Artificial Sequence: Synthetic coding sequence
  source 1..951: mol_type = other DNA
atggaccagaacaacagcctgcccccctacgcccagggcctggccagcccccagggcgccatgacccccggcatccccatcttcagccccatgatgccctacggcaccggcctgaccccccagcccatccagaacaccaacagcctgagcatcctggaggagcagcagagacagcagcagcagcagcagcagcagcagcagcagcagcagcagcaggccgtggccgccgccgccgtgcagcagagcaccagccagcaggccacccagggcaccagcggccaggccccccagctgttccacagccagaccctgaccaccgcccccctgcccggcaccacccccctgtaccccagccccatgacccccatgacccccatcacccccgccacccccgccagcgagagcagcggcatcgtgccccagctgcagaacatcgtgagcaccgtgaacctgggctgcaagctggacctgaagaccatcgccctgagagccagaaacgccgagtacaaccccaagagattcgccgccgtgatcatgagaatcagagagcccagaaccaccgccctgatcttcagcagcggcaagatggtgtgcaccggcgccaagagcgaggagcagagcagactggccgccagaaagtacgccagagtggtgcagaagctgggcttccccgccaagttcctggacttcaagatccagaacatggtgggcagctgcgacgtgaagttccccatcagactggagggcctggtgctgacccaccagcagttcagcagctacgagcccgagctgttccccggcctgatctacagaatgatcaagcccagaatcgtgctgctgatcttcgtgagcggcaaggtggtgctgaccggcgccaaggtgagagccgagatctacgaggccttcgagaacatctaccccatcctgaagggcttcagaaagaccacctag

SEQ ID NO: 101885 - DNA, 1020 bp, synthetic construct; identical to SEQ ID NO: 84001
  misc_feature 1..1020: note = Description of Artificial Sequence: Synthetic coding sequence
  source 1..1020: mol_type = other DNA

SEQ ID NO: 101886 - DNA, 627 bp, synthetic construct
  misc_feature 1..627: note = Description of Artificial Sequence: Synthetic coding sequence
  source 1..627: mol_type = other DNA
atggaccagaacaacagcctgcccccctacgcccagggcctggccagcccccagggcgccatgacccccggcatccccatcttcagccccatgatgccctacggcaccggcctgaccccccagcccatccagaacaccaacagcctgagcatcctggaggagcagcagagacagcagcagcagcagcagcagcagcagcagcagcagcagcagcagcagcagcagcagcagcagcagcagcagcagcagcagcagcagcagcagcagcagcagcagcagcagcaggccgtggccgccgccgccgtgcagcagagcaccagccagcaggccacccagggcaccagcggccaggccccccagctgttccacagccagaccctgaccaccgcccccctgcccggcaccacccccctgtaccccagccccatgacccccatgacccccatcacccccgccacccccgccagcgagagcagcggcatcgtgccccagctgcagaacatcgtgagcaccgtgaacctgggctgcaagctggacctgaagaccatcgccctgagagccagaaacgccgagtacaaccccaagagattcgccgccgtgatcatgagaatcagagagcccagatag

SEQ ID NO: 101887 - DNA, 456 bp, synthetic construct
  misc_feature 1..456: note = Description of Artificial Sequence: Synthetic coding sequence
  source 1..456: mol_type = other DNA
atggaccagaacaacagcctgcccccctacgcccagggcctggccagcccccagggcgccatgacccccggcatccccatcttcagccccatgatgccctacggcaccggcctgaccccccagcccatccagaacaccaacagcctgagcatcctggaggagcagcagagacagcagcagcagcagcagcagcagcagcagcagcagcagcagcagcagcagcagcagcagcagcagcagcagcagcagcagcagcagcagcagcagcagcagcagcagcagcaggccgtggccgccgccgccgtgcagcagagcaccagccagcaggccacccagggcaccagcggccaggccccccagctgttccacagccagaccctgaccaccgcccccctgcccggcaccacccccctgtaccccagccccatgacccccatgacccccatcaccccctag

SEQ ID NO: 101888 - DNA, 306 bp, synthetic construct
  misc_feature 1..306: note = Description of Artificial Sequence: Synthetic coding sequence
  source 1..306: mol_type = other DNA
tgagaggagcagagcagactggccgccagaaagtacgccagagtggtgcagaagctgggcttccccgccaagttcctggacttcaagatccagaacatggtgggcagctgcgacgtgaagttccccatcagctacgagcccgagctgttccccggcctgatctacagaatgatcaagcccagaatcgtgctgctgatcttcgtgagcggcaaggtggtgctgaccggcgccaaggtgagagccgagatctacgaggccttcgagaacatctaccccatcctgaagggcttcagaaagaccacctag

SEQ ID NO: 101889 - DNA, 960 bp, synthetic construct
  misc_feature 1..960: note = Description of Artificial Sequence: Synthetic coding sequence
  source 1..960: mol_type = other DNA
atgacccccggcatccccatcttcagccccatgatgccctacggcaccggcctgaccccccagcccatccagaacaccaacagcctgagcatcctggaggagcagcagagacagcagcagcagcagcagcagcagcagcagcagcagcagcagcagcagcagcagcagcagcagcagcagcagcagcagcagcagcagcagcagcagcagcagcagcagcagcaggccgtggccgccgccgccgtgcagcagagcaccagccagcaggccacccagggcaccagcggccaggccccccagctgttccacagccagaccctgaccaccgcccccctgcccggcaccacccccctgtaccccagccccatgacccccatgacccccatcacccccgccacccccgccagcgagagcagcggcatcgtgccccagctgcagaacatcgtgagcaccgtgaacctgggctgcaagctggacctgaagaccatcgccctgagagccagaaacgccgagtacaaccccaagagattcgccgccgtgatcatgagaatcagagagcccagaaccaccgccctgatcttcagcagcggcaagatggtgtgcaccggcgccaagagcgaggagcagagcagactggccgccagaaagtacgccagagtggtgcagaagctgggcttccccgccaagttcctggacttcaagatccagaacatggtgggcagctgcgacgtgaagttccccatcagactggagggcctggtgctgacccaccagcagttcagcagctacgagcccgagctgttccccggcctgatctacagaatgatcaagcccagaatcgtgctgctgatcttcgtgagcggcaaggtggtgctgaccggcgccaaggtgagagccgagatctacgaggccttcgagaacatctaccccatcctgaagggcttcagaaagaccacctag

SEQ ID NO: 101890 - DNA, 2610 bp, synthetic construct
  misc_feature 1..2610: note = Description of Artificial Sequence: Synthetic coding sequence
  source 1..2610: mol_type = other DNA
atggacttccccagcagcctgagacccgccctgttcctgaccggccccctgggcctgagcgacgtgcccgacctgagcttcatgtgcagctggagagacgccctgaccctgcccgaggcccagccccagaacagcgagaacggcgccctgcacgtgaccaaggacctgctgtgggagcccgccacccccggccccctgcccatgctgccccccctgatcgacccctgggaccccggcctgaccgccagagacctgctgttcagaggcggctgcagatacagaaagagacccagagtggtgctggacgtgaccgagcagatcagcagattcctgctggaccacggcgacgtggccttcgcccccctgggcaagctgatgctggagaacttcaagctggagggcgccggcagcagaaccaagaagaagaccgtggtgagcgtgaagaagctgctgcaggacctgggcggccaccagccctggggctgcccctgggcctacctgagcaacagacagagaagattcagcatcctgggcggccccatcctgggcaccagcgtggccagccacctggccgagctgctgcacgaggagctggtgctgagatgggagcagctgctgctggacgaggcctgcaccggcggcgccctggcctgggtgcccggcagaaccccccagttcggccagctggtgtaccccgccggcggcgcccaggacagactgcacttccaggaggtggtgctgacccccggcgacaacccccagttcctgggcaagcccggcagaatccagctgcagggccccgtgagacaggtggtgacctgcaccgtgcagggcgagagcaaggccctgatctacaccttcctgccccactggctgacctgctacctgacccccggccccttccaccccagcagcgccctgctggccgtgagaagcgactaccactgcgccgtgtggaagttcggcaagcagtggcagcccaccctgctgcaggccatgcaggtggagaagggcgccaccggcatcagcctgagcccccacctgcccggcgagctggccatctgcagcagaagcggcgccgtgtgcctgtggagccccgaggacggcctgagacagatctacagagaccccgagaccctggtgttcagagacagcagcagctggagatgggccgacttcaccgcccaccccagagtgctgaccgtgggcgacagaaccggcgtgaagatgctggacacccagggcccccccggctgcggcctgctgctgttcagactgggcgccgaggccagctgccagaagggcgagagagtgctgctgacccagtacctgggccacagcagccccaagtgcctgccccccaccctgcacctggtgtgcacccagttcagcctgtacctggtggacgagagactgcccctggtgcccatgctgaagtggaaccacggcctgcccagccccctgctgctggccagactgctgcccccccccagacccagctgcgtgcagcccctgctgctgggcggccagggcggccagctgcagctgctgcacctggccggcgagggcgccagcgtgcccagactggccggccccccccagagcctgcccagcagaatcgacagcctgcccgccttccccctgctggagcccaagatccagtggagactgcaggagagactgaaggcccccaccatcggcctggccgccgtggtgccccccctgcccagcgcccccacccccggcctggtgctgttccagctgagcgccgccggcgacgtgttctaccagcagctgagaccccaggtggacagcagcctgagaagagacgccggcccccccggcgacacccagcccgactgccacgcccccaccgccagctggaccagccaggacaccgccggctgcagccagtggctgaaggccctgctgaaggtgcccctggccccccccgtgtggaccgcccccaccttcacccacagacagatgctgggcagcaccgagctgagaagagaggaggaggagggccagagactgggcgtgctgagaaaggccatggccagaggccagctgctgctgcagagagacctgggcagcctgcccgccgccgagcccccccccgcccccgagagcggcctggaggacaagctgagcgagagactgggcgaggcctgggccggcagaggcgccgcctggtgggagagacagcagggcagaaccagcgagcccggcagacagaccagaagacccaagagaagaacccagctgagcagcagcttcagcctgagcggccacgtggaccccagcgaggacaccagcagcccccacagccccgagtggccccccgccgacgccctgcccctgccccccaccaccccccccagccaggagctgacccccgacgcctgcgcccagggcgtgcccagcgagcagagacagatgctgagagactacatggccaagctgcccccccagagagacacccccggctgcgccaccacccccccccacagccaggccagcagcgtgagagccaccagaagccagcagcacacccccgtgctgagcagcagccagcccctgagaaagaagcccagaatgggcttctag

SEQ ID NO: 101891 - DNA, 1353 bp, synthetic construct
  misc_feature 1..1353: note = Description of Artificial Sequence: Synthetic coding sequence
  source 1..1353: mol_type = other DNA
atgagcgacttcagcgaggagctgaagggccccgtgaccgacgacgaggaggtggagaccagcgtgctgagcggcgccggcatgcacttcccctggctgcagacctacgtggagaccgtggccatcggcggcaagagaagaaaggacttcgcccagaccaccagcgcctgcctgagcttcatccaggaggccctgctgaagcaccagtggcagcaggccgccgagtacatgtacagctacttccagaccctggaggacagcgacagctacaagagacaggccgcccccgagatcatctggaagctgggcagcgagatcctgttctaccaccccaagagcaacatggagagcttcaacaccttcgccaacagaatgaagaacatcggcgtgatgaactacctgaagatcagcctgcagcacgccctgtacctgctgcaccacggcatgctgaaggacgccaagagaaacctgagcgaggccgagacctggagacacggcgagaacaccagcagcagagagatcctgatcaacctgatccaggcctacaagggcctgctgcagtactacacctggagcgagaagaagatggagctgagcaagctggacaaggacgactacgcctacaacgccgtggcccaggacgtgttcaaccacagctggaagaccagcgccaacatcagcgccctgatcaagatccccggcgtgtgggaccccttcgtgaagagctacgtggagatgctggagttctacggcgacagagacggcgcccaggaggtgctgaccaactacgcctacgacgagaagttccccagcaaccccaacgcccacatctacctgtacaacttcctgaagagacagaaggcccccagaagcaagctgatcagcgtgctgaagatcctgtaccagatcgtgcccagccacaagctgatgctggagttccacaccctgctgagaaagagcgagaaggaggagcacagaaagctgggcctggaggtgctgttcggcgtgctggacttcgccggctgcaccaagaacatcaccgcctggaagtacctggccaagtacctgaagaacatcctgatgggcaaccacctggcctgggtgcaggaggagtggaacagcagaaagaactggtggcccggcttccacttcagctacttctgggccaagagcgactggaaggaggacaccgccctggcctgcgagaaggccttcgtggccggcctgctgctgggcaagggctgcagatacttcagatacatcctgaagcaggaccaccagatcctgggcaagaagatcaagagaatgaagagaagcgtgaagaagtacagcatcgtgaaccccagactgtag

SEQ ID NO: 101892 - DNA, 1353 bp, synthetic construct; identical to SEQ ID NO: 101891
  misc_feature 1..1353: note = Description of Artificial Sequence: Synthetic coding sequence
  source 1..1353: mol_type = other DNA

SEQ ID NO: 101893 - DNA, 1011 bp, synthetic construct
  misc_feature 1..1011: note = Description of Artificial Sequence: Synthetic coding sequence
  source 1..1011: mol_type = other DNA
atggagagcttcaacaccttcgccaacagaatgaagaacatcggcgtgatgaactacctgaagatcagcctgcagcacgccctgtacctgctgcaccacggcatgctgaaggacgccaagagaaacctgagcgaggccgagacctggagacacggcgagaacaccagcagcagagagatcctgatcaacctgatccaggcctacaagggcctgctgcagtactacacctggagcgagaagaagatggagctgagcaagctggacaaggacgactacgcctacaacgccgtggcccaggacgtgttcaaccacagctggaagaccagcgccaacatcagcgccctgatcaagatccccggcgtgtgggaccccttcgtgaagagctacgtggagatgctggagttctacggcgacagagacggcgcccaggaggtgctgaccaactacgcctacgacgagaagttccccagcaaccccaacgcccacatctacctgtacaacttcctgaagagacagaaggcccccagaagcaagctgatcagcgtgctgaagatcctgtaccagatcgtgcccagccacaagctgatgctggagttccacaccctgctgagaaagagcgagaaggaggagcacagaaagctgggcctggaggtgctgttcggcgtgctggacttcgccggctgcaccaagaacatcaccgcctggaagtacctggccaagtacctgaagaacatcctgatgggcaaccacctggcctgggtgcaggaggagtggaacagcagaaagaactggtggcccggcttccacttcagctacttctgggccaagagcgactggaaggaggacaccgccctggcctgcgagaaggccttcgtggccggcctgctgctgggcaagggctgcagatacttcagatacatcctgaagcaggaccaccagatcctgggcaagaagatcaagagaatgaagagaagcgtgaagaagtacagcatcgtgaaccccagactgtag

SEQ ID NO: 101894 - DNA, 1011 bp, synthetic construct; identical to SEQ ID NO: 101893
  misc_feature 1..1011: note = Description of Artificial Sequence: Synthetic coding sequence
  source 1..1011: mol_type = other DNA

SEQ ID NO: 101895 - DNA, 861 bp, synthetic construct
  misc_feature 1..861: note = Description of Artificial Sequence: Synthetic coding sequence
  source 1..861: mol_type = other DNA
atgagcgacttcagcgaggagctgaagggccccgtgaccgacgacgaggaggtggagaccagcgtgctgagcggcgccggcatgcacttcccctggctgcagacctacgtggagaccgtggccatcggcggcaagagaagaaaggacttcgcccagaccaccagcgcctgcctgagcttcatccaggaggccctgctgaagcaccagtggcagcaggccgccgagtacatgtacagctacttccagaccctggaggacagcgacagctacaagagacaggccgcccccgagatcagcctgcagcacgccctgtacctgctgcaccacggcatgctgaaggacgccaagagaaacctgagcgaggccgagacctggagacacggcgagaacaccagcagcagagagatcctgatcaacctgatccaggcctacaagggcctgctgcagtactacacctggagcgagaagaagatggagctgagcaagctggacaaggacgactacgcctacaacgccgtggcccaggacgtgttcaaccacagctggaagaccagcgccaacatcagcgccctgatcaagatccccggcgtgtgggaccccttcgtgaagagctacgtggagatgctggagttctacggcgacagagacggcgcccaggaggtgctgaccaactacgcctacgacgagaagttccccagcaaccccaacgcccacatctacctgtacaacttcctgaagagacagaaggcccccagaagcaagctgatcagcgtgctgaagatcctgtaccagatcgtgcccagccacaagctgatgctggagttccacaccctgctgagaaagagcgagaaggaggagtag

SEQ ID NO: 101896 - DNA, 849 bp, synthetic construct
  misc_feature 1..849: note = Description of Artificial Sequence: Synthetic coding sequence
  source 1..849: mol_type = other DNA
atgagcgacttcagcgaggagctgaagggccccgtgaccgacgacgaggaggtggagaccagcgtgctgagcggcgccggcatgcacttcccctggctgcagacctacgtggagaccgtggccatcggcggcaagagaagaaaggacttcgcccagaccaccagcgcctgcctgagcttcatccaggaggccctgctgaagcaccagtggcagcaggccgccgagtacatgtacagctacttccagaccctggaggacagcgacagctacaagagacaggccgcccccgagatcagcctgcagcacgccctgtacctgctgcaccacggcatgctgaaggacgccaagagaaacctgagcgaggccgagacctggagacacggcgagaacaccagcagcagagagatcctgatcaacctgatccaggcctacaagggcctgctgcagtactacacctggagcgagaagaagatggagctgagcaagctggacaaggacgactacgcctacaacgccgtggcccaggacgtgttcaaccacagctggaagaccagcgccaacatcagcgccctgatcaagatccccggcgtgtgggaccccttcgtgaagagctacgtggagatgctggagttctacggcgacagagacggcgcccaggaggtgctgaccaactacgcctacgacgagaagttccccagcaaccccaacgcccacatctacctgtacaacttcctgaagagacagaaggcccccagaagcaagctgatcagcgtgctgaagatcctgtaccagatcgtgcccagccacaagctgatgctggagttccacaccctgctgagaaagagctag

SEQ ID NO: 101897 - DNA, 936 bp, synthetic construct
  misc_feature 1..936: note = Description of Artificial Sequence: Synthetic coding sequence
  source 1..936: mol_type = other DNA
atgagcgacttcagcgaggagctgaagggccccgtgaccgacgacgaggaggtggagaccagcgtgctgagcggcgccggcatgcacttcccctggctgcagacctacgtggagaccgtggccatcggcggcaagagaagaaaggacttcgcccagaccaccagcgcctgcctgagcttcatccaggaggccctgctgaagcaccagtggcagcaggccgccgagtacatgtacagctacttccagaccctggaggacagcgacagctacaagagacaggccgcccccgagatcatctggaagctgggcagcgagatcctgttctaccaccccaagagcaacatggagagcttcaacaccttcgccaacagaatgaagaacatcggcgtgatgaactacctgaagatcagcctgcagcacgccctgtacctgctgcaccacggcatgctgaaggacgccaagagaaacctgagcgaggccgagacctggagacacggcgagaacaccagcagcagagagatcctgatcaacctgatccaggcctacaagggcctgctgcagtactacacctggagcgagaagaagatggagctgagcaagctggacaaggacgactacgcctacaacgccgtggcccaggacgtgttcaaccacagctggaagaccagcgccaacatcagcgccctgatcaagatccccggcgtgtgggaccccttcgtgaagagctacgtggagatgctggagttctacggcgacagagacggcgcccaggaggtgctgaccaactacgcctacgacgagaagttccccagcaaccccaacgcccacatctacctgtacaacttcctgaagagacagaaggcccccagaagcaagctgatcagcgtgctgaagcacctgcagaagatcagcatcatgtacagcaccctgagatag

SEQ ID NO: 101898 - DNA, 2328 bp, synthetic construct
  misc_feature 1..2328: note = Description of Artificial Sequence: Synthetic coding sequence
  source 1..2328: mol_type = other DNA
atgctgccccccctgatcgacccctgggaccccggcctgaccgccagagacctgctgttcagaggcggctgcagatacagaaagagacccagagtggtgctggacgtgaccgagcagatcagcagattcctgctggaccacggcgacgtggccttcgcccccctgggcaagctgatgctggagaacttcaagctggagggcgccggcagcagaaccaagaagaagaccgtggtgagcgtgaagaagctgctgcaggacctgggcggccaccagccctggggctgcccctgggcctacctgagcaacagacagagaagattcagcatcctgggcggccccatcctgggcaccagcgtggccagccacctggccgagctgctgcacgaggagctggtgctgagatgggagcagctgctgctggacgaggcctgcaccggcggcgccctggcctgggtgcccggcagaaccccccagttcggccagctggtgtaccccgccggcggcgcccaggacagactgcacttccaggaggtggtgctgacccccggcgacaacccccagttcctgggcaagcccggcagaatccagctgcagggccccgtgagacaggtggtgacctgcaccgtgcagggcgagaccctgctggccgtgagaagcgactaccactgcgccgtgtggaagttcggcaagcagtggcagcccaccctgctgcaggccatgcaggtggagaagggcgccaccggcatcagcctgagcccccacctgcccggcgagctggccatctgcagcagaagcggcgccgtgtgcctgtggagccccgaggacggcctgagacagatctacagagaccccgagaccctggtgttcagagacagcagcagctggagatgggccgacttcaccgcccaccccagagtgctgaccgtgggcgacagaaccggcgtgaagatgctggacacccagggcccccccggctgcggcctgctgctgttcagactgggcgccgaggccagctgccagaagggcgagagagtgctgctgacccagtacctgggccacagcagccccaagtgcctgccccccaccctgcacctggtgtgcacccagttcagcctgtacctggtggacgagagactgcccctggtgcccatgctgaagtggaaccacggcctgcccagccccctgctgctggccagactgctgcccccccccagacccagctgcgtgcagcccctgctgctgggcggccagggcggccagctgcagctgctgcacctggccgagggcgccagcgtgcccagactggccggccccccccagagcctgcccagcagaatcgacagcctgcccgccttccccctgctggagcccaagatccagtggagactgcaggagagactgaaggcccccaccatcggcctggccgccgtggtgccccccctgcccagcgcccccacccccggcctggtgctgttccagctgagcgccgccggcgacgtgttctaccagcagctgagaccccaggtggacagcagcctgagaagagacgccggcccccccggcgacacccagcccgactgccacgcccccaccgccagctggaccagccaggacaccgccggctgcagccagtggctgaaggccctgctgaaggtgcccctggccccccccgtgtggaccgcccccaccttcacccacagacagatgctgggcagcaccgagctgagaagagaggaggaggagggccagagactgggcgtgctgagaaaggccatggccagaggccagctgctgctgcagagagacctgggcagcctgcccgccgccgagcccccccccgcccccgagagcggcctggaggacaagctgagcgagagactgggcgaggcctgggccggcagaggcgccgcctggtgggagagacagcagggcagaaccagcgagcccggcagacagaccagaagacccaagagaagaacccagctgagcagcagcttcagcctgagcggccacgtggaccccagcgaggacaccagcagcccccacagccccgagtggccccccgccgacgccctgcccctgccccccaccaccccccccagccaggagctgacccccgacgcctgcgcccagggcgtgcccagcgagcagagacagatgctgagagactacatggccaagctgcccccccagagagacacccccggctgcgccaccacccccccccacagccaggccagcagcgtgagagccaccagaagccagcagcacacccccgtgctgagcagcagccagcccctgagaaagaagcccagaatgggcttctag

SEQ ID NO: 101899 - DNA, 2610 bp, synthetic construct; identical to SEQ ID NO: 101890
  misc_feature 1..2610: note = Description of Artificial Sequence: Synthetic coding sequence
  source 1..2610: mol_type = other DNA

SEQ ID NO: 101900 - DNA, 1047 bp, synthetic construct
  misc_feature 1..1047: note = Description of Artificial Sequence: Synthetic coding sequence
  source 1..1047: mol_type = other DNA
atggacttccccagcagcctgagacccgccctgttcctgaccggccccctgggcctgagcgacgtgcccgacctgagcttcatgtgcagctggagagacgccctgaccctgcccgaggcccagccccagaacagcgagaacggcgccctgcacgtgaccaaggacctgctgtgggagcccgccacccccggccccctgcccatgctgccccccctgatcgacccctgggaccccggcctgaccgccagagacctgctgttcagaggcggctgcagatacagaaagagacccagagtggtgctggacgtgaccgagcagatcagcagattcctgctggaccacggcgacgtggccttcgcccccctgggcaagctgatgctggagaacttcaagctggagggcgccggcagcagaaccaagaagaagaccgtggtgagcgtgaagaagctgctgcaggacctgggcggccaccagccctggggctgcccctgggcctacctgagcaacagacagagaagattcagcatcctgggcggccccatcctgggcaccagcgtggccagccacctggccgagctgctgcacgaggagctggtgctgagatgggagcagctgctgctggacgaggcctgcaccggcggcgccctggcctgggtgcccggcagaaccccccagttcggccagctggtgtaccccgccggcggcgcccaggacagactgcacttccaggaggtggtgctgacccccggcgacaacccccagttcctgggcaagcccggcagaatccagctgcagggccccgtgagacaggtggtgacctgcaccgtgcagggcgagaccctgctggccgtgagaagcgactaccactgcgccgtgtggaagttcggcaagcagtggcagcccaccctgctgcaggccatgcaggtggagaagggcgccaccggcatcagcctgagcccccacctgcccggcgagctggccatctgcagcagaagcggcgccgtgtgcctgtggagccccgaggacggctacagaagattcctgtag

SEQ ID NO: 101901 - DNA, 2331 bp, synthetic construct
  misc_feature 1..2331: note = Description of Artificial Sequence: Synthetic coding sequence
  source 1..2331: mol_type = other DNA
atgctgccccccctgatcgacccctgggaccccggcctgaccgccagagacctgctgttcagaggcggctgcagatacagaaagagacccagagtggtgctggacgtgaccgagcagatcagcagattcctgctggaccacggcgacgtggccttcgcccccctgggcaagctgatgctggagaacttcaagctggagggcgccggcagcagaaccaagaagaagaccgtggtgagcgtgaagaagctgctgcaggacctgggcggccaccagccctggggctgcccctgggcctacctgagcaacagacagagaagattcagcatcctgggcggccccatcctgggcaccagcgtggccagccacctggccgagctgctgcacgaggagctggtgctgagatgggagcagctgctgctggacgaggcctgcaccggcggcgccctggcctgggtgcccggcagaaccccccagttcggccagctggtgtaccccgccggcggcgcccaggacagactgcacttccaggaggtggtgctgacccccggcgacaacccccagttcctgggcaagcccggcagaatccagctgcagggccccgtgagacaggtggtgacctgcaccgtgcagggcgagaccctgctggccgtgagaagcgactaccactgcgccgtgtggaagttcggcaagcagtggcagcccaccctgctgcaggccatgcaggtggagaagggcgccaccggcatcagcctgagcccccacctgcccggcgagctggccatctgcagcagaagcggcgccgtgtgcctgtggagccccgaggacggcctgagacagatctacagagaccccgagaccctggtgttcagagacagcagcagctggagatgggccgacttcaccgcccaccccagagtgctgaccgtgggcgacagaaccggcgtgaagatgctggacacccagggcccccccggctgcggcctgctgctgttcagactgggcgccgaggccagctgccagaagggcgagagagtgctgctgacccagtacctgggccacagcagccccaagtgcctgccccccaccctgcacctggtgtgcacccagttcagcctgtacctggtggacgagagactgcccctggtgcccatgctgaagtggaaccacggcctgcccagccccctgctgctggccagactgctgcccccccccagacccagctgcgtgcagcccctgctgctgggcggccagggcggccagctgcagctgctgcacctggccggcgagggcgccagcgtgcccagactggccggccccccccagagcctgcccagcagaatcgacagcctgcccgccttccccctgctggagcccaagatccagtggagactgcaggagagactgaaggcccccaccatcggcctggccgccgtggtgccccccctgcccagcgcccccacccccggcctggtgctgttccagctgagcgccgccggcgacgtgttctaccagcagctgagaccccaggtggacagcagcctgagaagagacgccggcccccccggcgacacccagcccgactgccacgcccccaccgccagctggaccagccaggacaccgccggctgcagccagtggctgaaggccctgctgaaggtgcccctggccccccccgtgtggaccgcccccaccttcacccacagacagatgctgggcagcaccgagctgagaagagaggaggaggagggccagagactgggcgtgctgagaaaggccatggccagaggccagctgctgctgcagagagacctgggcagcctgcccgccgccgagcccccccccgcccccgagagcggcctggaggacaagctgagcgagagactgggcgaggcctgggccggcagaggcgccgcctggtgggagagacagcagggcagaaccagcgagcccggcagacagaccagaagacccaagagaagaacccagctgagcagcagcttcagcctgagcggccacgtggaccccagcgaggacaccagcagcccccacagccccgagtggccccccgccgacgccctgcccctgccccccaccaccccccccagccaggagctgacccccgacgcctgcgcccagggcgtgcccagcgagcagagacagatgctgagagactacatggccaagctgcccccccagagagacacccccggctgcgccaccacccccccccacagccaggccagcagcgtgagagccaccagaagccagcagcacacccccgtgctgagcagcagccagcccctgagaaagaagcccagaatgggcttctag

SEQ ID NO: 101902 - DNA, 1179 bp, synthetic construct
  misc_feature 1..1179: note = Description of Artificial Sequence: Synthetic coding sequence
  source 1..1179: mol_type = other DNA
atgctgaagtggaaccacggcctgcccagccccctgctgctggccagactgctgcccccccccagacccagctgcgtgcagcccctgctgctgggcggccagggcggccagctgcagctgctgcacctggccgagggcgccagcgtgcccagactggccggccccccccagagcctgcccagcagaatcgacagcctgcccgccttccccctgctggagcccaagatccagtggagactgcaggagagactgaaggcccccaccatcggcctggccgccgtggtgccccccctgcccagcgcccccacccccggcctggtgctgttccagctgagcgccgccggcgacgtgttctaccagcagctgagaccccaggtggacagcagcctgagaagagacgccggcccccccggcgacacccagcccgactgccacgcccccaccgccagctggaccagccaggacaccgccggctgcagccagtggctgaaggccctgctgaaggtgcccctggccccccccgtgtggaccgcccccaccttcacccacagacagatgctgggcagcaccgagctgagaagagaggaggaggagggccagagactgggcgtgctgagaaaggccatggccagaggccagctgctgctgcagagagacctgggcagcctgcccgccgccgagcccccccccgcccccgagagcggcctggaggacaagctgagcgagagactgggcgaggcctgggccggcagaggcgccgcctggtgggagagacagcagggcagaaccagcgagcccggcagacagaccagaagacccaagagaagaacccagctgagcagcagcttcagcctgagcggccacgtggaccccagcgaggacaccagcagcccccacagccccgagtggccccccgccgacgccctgcccctgccccccaccaccccccccagccaggagctgacccccgacgcctgcgcccagggcgtgcccagcgagcagagacagatgctgagagactacatggccaagctgcccccccagagagacacccccggctgcgccaccacccccccccacagccaggccagcagcgtgagagccaccagaagccagcagcacacccccgtgctgagcagcagccagcccctgagaaagaagcccagaatgggcttctag

SEQ ID NO: 101903 - DNA, 837 bp, synthetic construct
  misc_feature 1..837: note = Description of Artificial Sequence: Synthetic coding sequence
  source 1..837: mol_type = other DNA
atggacaagagcggcatcgacagcctggaccacgtgaccagcgacgccgtggagctggccaacagaagcgacaacagcagcgacagcagcctgttcaagacccagtgcatcccctacagccccaagggcgagaagagaaaccccatcagaaagttcgtgagaacccccgagagcgtgcacgccagcgacagcagcagcgacagcagcttcgagcccatccccctgaccatcaaggccatcttcgagagattcaagaacagaaagaagagatacaagaagaagaagaagagaagataccagcccaccggcagacccagaggcagacccgagggcagaagaaaccccatctacagcctgatcgacaagaagaagcagttcagaagcagaggcagcggcttccccttcctggagagcgagaacgagaagaacgccccctggagaaagatcctgaccttcgagcaggccgtggccagaggcttcttcaactacatcgagaagctgaagtacgagcaccacctgaaggagagcctgaagcagatgaacgtgggcgaggacctggagaacgaggacttcgacagcagaagatacaagttcctggacgacgacggcagcatcagccccatcgaggagagcaccgccgaggacgaggacgccacccacctggaggacaacgagtgcgacatcaagctggccggcgacagcttcatcgtgagcagcgagttccccgtgagactgagcgtgtacctggaggaggaggacatcaccgaggaggccgccctgagcaagaagagagccaccaaggccaagaacaccggccagagaggcctgaagatgtag

SEQ ID NO: 101904 - DNA, 837 bp, synthetic construct; identical to SEQ ID NO: 101903
  misc_feature 1..837: note = Description of Artificial Sequence: Synthetic coding sequence
  source 1..837: mol_type = other DNA

SEQ ID NO: 101905 - DNA, 837 bp, synthetic construct; identical to SEQ ID NO: 101903
  misc_feature 1..837: note = Description of Artificial Sequence: Synthetic coding sequence
  source 1..837: mol_type = other DNA

SEQ ID NO: 101906 - DNA, 27 bp, synthetic construct
  misc_feature 1..27: note = Description of Artificial Sequence: Synthetic coding sequence
  source 1..27: mol_type = other DNA
atggacaagagcggcatcgacagctag

SEQ ID NO: 101907 - DNA, 3030 bp, synthetic construct
  misc_feature 1..3030: note = Description of Artificial Sequence: Synthetic coding sequence
  source 1..3030: mol_type = other DNA
atgagctggttcaacgccagccagctgagcagcttcgccaagcaggccctgagccaggcccagaagagcatcgacagagtgctggacatccaggaggaggagcccagcatctgggccgagaccatcccctacggcgagcccggcatcagcagccccgtgagcggcggctgggacaccagcacctggggcctgaagagcaacaccgagccccagagcccccccatcgccagccccaaggccatcaccaagcccgtgagaagaaccgtggtggacgagagcgagaacttcttcagcgccttcctgagccccaccgtgagcctgaaggtgagcgagagcgtgatcgacgtgaagaccaccatggagagcatcagcaacaccagcacccagagcctgaccgccgagaccaaggacatcgccctggagcccaaggagcagaagcacgaggacagacagagcaacacccccagcccccccgtgagcaccttcagcagcggcaccagcaccaccagcgacatcgaggtgctggaccacgagagcgtgatcagcgagagcagcgccagcagcagacaggagaccaccgacagcaagagcagcctgcacctgatgcagaccagcttccagctgctgagcgccagcgcctgccccgagtacaacagactggacgacttccagaagctgaccgagagctgctgcagcagcgacgccttcgagagaatcgacagcttcagcgtgcagagcctggacagcagaagcgtgagcgagatcaacagcgacgacgagctgagcggcaagggctacgccctggtgcccatcatcgtgaacagcagcacccccaagagcaagaccgtggagagcgccgagggcaagagcgaggaggtgaacgagaccctggtgatccccaccgaggaggccgagatggaggagagcggcagaagcgccacccccgtgaactgcgagcagcccgacatcctggtgagcagcacccccatcaacgagggccagaccgtgctggacaaggtggccgagcagtgcgagcccgccgagagccagcccgaggccctgagcgagaaggaggacgtgtgcaaggtgaccctgaccgtggagttcctgaacgagaagctggagaagagagaggcccagctgctgagcctgagcaaggagaaggccctgctggaggaggccttcgacaacctgaaggacgagatgttcagagtgaaggaggagagcagcagcatcagcagcctgaaggacgagttcacccagagaatcgccgaggccgagaagaaggtgcagctggcctgcaaggagagagacgccgccaagaaggagatcaagaacatcaaggaggagctggccaccagactgaacagcagcgagaccgccgacctgctgaaggagaaggacgagcagatcagaggcctgatggaggagggcgagaagctgagcaagcagcagctgcacaacagcaacatcatcaagaagctgagagccaaggacaaggagaacgagaacatggtggccaagctgaacaagaaggtgaaggagctggaggaggagctgcagcacctgaagcaggtgctggacggcaaggaggaggtggagaagcagcacagagagaacatcaagaagctgaacagcatggtggagagacaggagaaggacctgggcagactgcaggtggacatggacgagctggaggagaagaacagaagcatccaggccgccctggacagcgcctacaaggagctgaccgacctgcacaaggccaacgccgccaaggacagcgaggcccaggaggccgccctgagcagagagatgaaggccaaggaggagctgagcgccgccctggagaaggcccaggaggaggccagacagcagcaggagaccctggccatccaggtgggcgacctgagactggccctgcagagaaccgagcaggccgccgccagaaaggaggactacctgagacacgagatcggcgagctgcagcagagactgcaggaggccgagaacagaaaccaggagctgagccagagcgtgagcagcaccaccagacccctgctgagacagatcgagaacctgcaggccaccctgggcagccagaccagcagctgggagaagctggagaagaacctgagcgacagactgggcgagagccagaccctgctggccgccgccgtggagagagagagagccgccaccgaggagctgctggccaacaagatccagatgagcagcatggagagccagaacagcctgctgagacaggagaacagcagattccaggcccagctggagagcgagaagaacagactgtgcaagctggaggacgagaacaacagataccaggtggagctggagaacctgaaggacgagtacgtgagaaccctggaggagaccagaaaggagaagaccctgctgaacagccagctggagatggagagaatgaaggtggagcaggagagaaagaaggccatcttcacccaggagaccatcaaggagaaggagagaaagcccttcagcgtgagcagcacccccaccatgagcagaagcagcagcatcagcggcgtggacatggccggcctgcagaccagcttcctgagccaggacgagagccacgaccacagcttcggccccatgcccatcagcgccaacggcagcaacctgtacgacgccgtgagaatgggcgccggcagcagcatcatcgagaacctgcagagccagctgaagctgagagagggcgagatcacccacctgcagctggagatcggcaacctggagaagaccagaagcatcatggccgaggagctggtgaagctgaccaaccagaacgacgagctggaggagaaggtgaaggagatccccaagctgagaacccagctgagagacctggaccagagatacaacaccatcctgcagatgtacggcgagaaggccgaggaggccgaggagctgagactggacctggaggacgtgaagaacatgtacaagacccagatcgacgagctgctgagacagagcctgagctag

SEQ ID NO: 101908 - DNA, 3282 bp, synthetic construct
  misc_feature 1..3282: note = Description of Artificial Sequence: Synthetic coding sequence
  source 1..3282: mol_type = other DNA
atgagctggttcaacgccagccagctgagcagcttcgccaagcaggccctgagccaggcccagaagagcatcgacagagtgctggacatccaggaggaggagcccagcatctgggccgagaccatcccctacggcgagcccggcatcagcagccccgtgagcggcggctgggacaccagcacctggggcctgaagagcaacaccgagccccagagcccccccatcgccagccccaaggccatcaccaagcccgtgagaagaaccgtggtggacgagagcgagaacttcttcagcgccttcctgagccccaccgacgtgcagaccatccagaagagccccgtggtgagcaagccccccgccaagagccagagacccgaggaggaggtgaagagcagcctgcacgagagcctgcacatcggccagagcagaacccccgagaccaccgagagccaggtgaaggacagcagcctgtgcgtgagcggcgagaccctggccgccggcaccagcagccccaagaccgagggcaagcacgaggagaccgtgaacaaggagagcgacatgaaggtgcccaccgtgagcctgaaggtgagcgagagcgtgatcgacgtgaagaccaccatggagagcatcagcaacaccagcacccagagcctgaccgccgagaccaaggacatcgccctggagcccaaggagcagaagcacgaggacagacagagcaacacccccagcccccccgtgagcaccttcagcagcggcaccagcaccaccagcgacatcgaggtgctggaccacgagagcgtgatcagcgagagcagcgccagcagcagacaggagaccaccgacagcaagagcagcctgcacctgatgcagaccagcttccagctgctgagcgccagcgcctgccccgagtacaacagactggacgacttccagaagctgaccgagagctgctgcagcagcgacgccttcgagagaatcgacagcttcagcgtgcagagcctggacagcagaagcgtgagcgagatcaacagcgacgacgagctgagcggcaagggctacgccctggtgcccatcatcgtgaacagcagcacccccaagagcaagaccgtggagagcgccgagggcaagagcgaggaggtgaacgagaccctggtgatccccaccgaggaggccgagatggaggagagcggcagaagcgccacccccgtgaactgcgagcagcccgacatcctggtgagcagcacccccatcaacgagggccagaccgtgctggacaaggtggccgagcagtgcgagcccgccgagagccagcccgaggccctgagcgagaaggaggacgtgtgcaagaccgtggagttcctgaacgagaagctggagaagagagaggcccagctgctgagcctgagcaaggagaaggccctgctggaggaggccttcgacaacctgaaggacgagatgttcagagtgaaggaggagagcagcagcatcagcagcctgaaggacgagttcacccagagaatcgccgaggccgagaagaaggtgcagctggcctgcaaggagagagacgccgccaagaaggagatcaagaacatcaaggaggagctggccaccagactgaacagcagcgagaccgccgacctgctgaaggagaaggacgagcagatcagaggcctgatggaggagggcgagaagctgagcaagcagcagctgcacaacagcaacatcatcaagaagctgagagccaaggacaaggagaacgagaacatggtggccaagctgaacaagaaggtgaaggagctggaggaggagctgcagcacctgaagcaggtgctggacggcaaggaggaggtggagaagcagcacagagagaacatcaagaagctgaacagcatggtggagagacaggagaaggacctgggcagactgcaggtggacatggacgagctggaggagaagaacagaagcatccaggccgccctggacagcgcctacaaggagctgaccgacctgcacaaggccaacgccgccaaggacagcgaggcccaggaggccgccctgagcagagagatgaaggccaaggaggagctgagcgccgccctggagaaggcccaggaggaggccagacagcagcaggagaccctggccatccaggtgggcgacctgagactggccctgcagagaaccgagcaggccgccgccagaaaggaggactacctgagacacgagatcggcgagctgcagcagagactgcaggaggccgagaacagaaaccaggagctgagccagagcgtgagcagcaccaccagacccctgctgagacagatcgagaacctgcaggccaccctgggcagccagaccagcagctgggagaagctggagaagaacctgagcgacagactgggcgagagccagaccctgctggccgccgccgtggagagagagagagccgccaccgaggagctgctggccaacaagatccagatgagcagcatggagagccagaacagcctgctgagacaggagaacagcagattccaggcccagctggagagcgagaagaacagactgtgcaagctggaggacgagaacaacagataccaggtggagctggagaacctgaaggacgagtacgtgagaaccctggaggagaccagaaaggagaagaccctgctgaacagccagctggagatggagagaatgaaggtggagcaggagagaaagaaggccatcttcacccaggagaccatcaaggagaaggagagaaagcccttcagcgtgagcagcacccccaccatgagcagaagcagcagcatcagcggcgtggacatggccggcctgcagaccagcttcctgagccaggacgagagccacgaccacagcttcggccccatgcccatcagcgccaacggcagcaacctgtacgacgccgtgagaatgggcgccggcagcagcatcatcgagaacctgcagagccagctgaagctgagagagggcgagatcacccacctgcagctggagatcggcaacctggagaagaccagaagcatcatggccgaggagctggtgaagctgaccaaccagaacgacgagctggaggagaaggtgaaggagatccccaagctgagaacccagctgagagacctggaccagagatacaacaccatcctgcagatgtacggcgagaaggccgaggaggccgaggagctgagactggacctggaggacgtgaagaacatgtacaagacccagatcgacgagctgctgagacagagcctgagctag

SEQ ID NO: 101909 - DNA, 1602 bp, synthetic construct
  misc_feature 1..1602: note = Description of Artificial Sequence: Synthetic coding sequence
  source 1..1602: mol_type = other DNA
atgagctggttcaacgccagccagctgagcagcttcgccaagcaggccctgagccaggcccagaagagcatcgacagagtgctggacatccaggaggaggagcccagcatctgggccgagaccatcccctacggcgagcccggcatcagcagccccgtgagcggcggctgggacaccagcacctggggcctgaagagcaacaccgagccccagagcccccccatcgccagccccaaggccatcaccaagcccgtgagaagaaccgtggtggacgagagcgagaacttcttcagcgccttcctgagccccaccgacgtgcagaccatccagaagagccccgtggtgagcaagccccccgccaagagccagagacccgaggaggaggtgaagagcagcctgcacgagagcctgcacatcggccagagcagaacccccgagaccaccgagagccaggtgaaggacagcagcctgtgcgtgagcggcgagaccctggccgccggcaccagcagccccaagaccgagggcaagcacgaggagaccgtgaacaaggagagcgacatgaaggtgcccaccgtgagcctgaaggtgagcgagagcgtgatcgacgtgaagaccaccatggagagcatcagcaacaccagcacccagagcctgaccgccgagaccaaggacatcgccctggagcccaaggagcagaagcacgaggacagacagagcaacacccccagcccccccgtgagcaccttcagcagcggcaccagcaccaccagcgacatcgaggtgctggaccacgagagcgtgatcagcgagagcagcgccagcagcagacaggagaccaccgacagcaagagcagcctgcacctgatgcagaccagcttccagctgctgagcgccagcgcctgccccgagtacaacagactggacgacttccagaagctgaccgagagctgctgcagcagcgacgccttcgagagaatcgacagcttcagcgtgcagagcctggacagcagaagcgtgagcgagatcaacagcgacgacgagctgagcggcaagggctacgccctggtgcccatcatcgtgaacagcagcacccccaagagcaagaccgtggagagcgccgagggcaagagcgaggaggtgaacgagaccctggtgatccccaccgaggaggccgagatggaggagagcggcagaagcgccacccccgtgaactgcgagcagcccgacatcctggtgagcagcacccccatcaacgagggccagaccgtgctggacaaggtggccgagcagtgcgagcccgccgagagccagcccgaggccctgagcgagaaggaggacgtgtgcaagaccgtggagttcctgaacgagaagctggagaagagagaggcccagctgctgagcctgagcaaggagaaggccctgctggaggaggccttcgacaacctgaaggacgagatgttcagagtgaaggaggagagcagcagcatcagcagcctgaaggacgagttcacccagagaatcgccgaggccgagaagaaggtgcagctggcctgcaaggagagagacgccgccaagaaggaggtgaagagaaagaagagatag

SEQ ID NO: 101910 - DNA, 3291 bp, synthetic construct
  misc_feature 1..3291: note = Description of Artificial Sequence: Synthetic coding sequence
  source 1..3291: mol_type = other DNA
atgagctggttcaacgccagccagctgagcagcttcgccaagcaggccctgagccaggcccagaagagcatcgacagagtgctggacatccaggaggaggagcccagcatctgggccgagaccatcccctacggcgagcccggcatcagcagccccgtgagcggcggctgggacaccagcacctggggcctgaagagcaacaccgagccccagagcccccccatcgccagccccaaggccatcaccaagcccgtgagaagaaccgtggtggacgagagcgagaacttcttcagcgccttcctgagccccaccgacgtgcagaccatccagaagagccccgtggtgagcaagccccccgccaagagccagagacccgaggaggaggtgaagagcagcctgcacgagagcctgcacatcggccagagcagaacccccgagaccaccgagagccaggtgaaggacagcagcctgtgcgtgagcggcgagaccctggccgccggcaccagcagccccaagaccgagggcaagcacgaggagaccgtgaacaaggagagcgacatgaaggtgcccaccgtgagcctgaaggtgagcgagagcgtgatcgacgtgaagaccaccatggagagcatcagcaacaccagcacccagagcctgaccgccgagaccaaggacatcgccctggagcccaaggagcagaagcacgaggacagacagagcaacacccccagcccccccgtgagcaccttcagcagcggcaccagcaccaccagcgacatcgaggtgctggaccacgagagcgtgatcagcgagagcagcgccagcagcagacaggagaccaccgacagcaagagcagcctgcacctgatgcagaccagcttccagctgctgagcgccagcgcctgccccgagtacaacagactggacgacttccagaagctgaccgagagctgctgcagcagcgacgccttcgagagaatcgacagcttcagcgtgcagagcctggacagcagaagcgtgagcgagatcaacagcgacgacgagctgagcggcaagggctacgccctggtgcccatcatcgtgaacagcagcacccccaagagcaagaccgtggagagcgccgagggcaagagcgaggaggtgaacgagaccctggtgatccccaccgaggaggccgagatggaggagagcggcagaagcgccacccccgtgaactgcgagcagcccgacatcctggtgagcagcacccccatcaacgagggccagaccgtgctggacaaggtggccgagcagtgcgagcccgccgagagccagcccgaggccctgagcgagaaggaggacgtgtgcaaggtgaccctgaccgtggagttcctgaacgagaagctggagaagagagaggcccagctgctgagcctgagcaaggagaaggccctgctggaggaggccttcgacaacctgaaggacgagatgttcagagtgaaggaggagagcagcagcatcagcagcctgaaggacgagttcacccagagaatcgccgaggccgagaagaaggtgcagctggcctgcaaggagagagacgccgccaagaaggagatcaagaacatcaaggaggagctggccaccagactgaacagcagcgagaccgccgacctgctgaaggagaaggacgagcagatcagaggcctgatggaggagggcgagaagctgagcaagcagcagctgcacaacagcaacatcatcaagaagctgagagccaaggacaaggagaacgagaacatggtggccaagctgaacaagaaggtgaaggagctggaggaggagctgcagcacctgaagcaggtgctggacggcaaggaggaggtggagaagcagcacagagagaacatcaagaagctgaacagcatggtggagagacaggagaaggacctgggcagactgcaggtggacatggacgagctggaggagaagaacagaagcatccaggccgccctggacagcgcctacaaggagctgaccgacctgcacaaggccaacgccgccaaggacagcgaggcccaggaggccgccctgagcagagagatgaaggccaaggaggagctgagcgccgccctggagaaggcccaggaggaggccagacagcagcaggagaccctggccatccaggtgggcgacctgagactggccctgcagagaaccgagcaggccgccgccagaaaggaggactacctgagacacgagatcggcgagctgcagcagagactgcaggaggccgagaacagaaaccaggagctgagccagagcgtgagcagcaccaccagacccctgctgagacagatcgagaacctgcaggccaccctgggcagccagaccagcagctgggagaagctggagaagaacctgagcgacagactgggcgagagccagaccctgctggccgccgccgtggagagagagagagccgccaccgaggagctgctggccaacaagatccagatgagcagcatggagagccagaacagcctgctgagacaggagaacagcagattccaggcccagctggagagcgagaagaacagactgtgcaagctggaggacgagaacaacagataccaggtggagctggagaacctgaaggacgagtacgtgagaaccctggaggagaccagaaaggagaagaccctgctgaacagccagctggagatggagagaatgaaggtggagcaggagagaaagaaggccatcttcacccaggagaccatcaaggagaaggagagaaagcccttcagcgtgagcagcacccccaccatgagcagaagcagcagcatcagcggcgtggacatggccggcctgcagaccagcttcctgagccaggacgagagccacgaccacagcttcggccccatgcccatcagcgccaacggcagcaacctgtacgacgccgtgagaatgggcgccggcagcagcatcatcgagaacctgcagagccagctgaagctgagagagggcgagatcacccacctgcagctggagatcggcaacctggagaagaccagaagcatcatggccgaggagctggtgaagctgaccaaccagaacgacgagctggaggagaaggtgaaggagatccccaagctgagaacccagctgagagacctggaccagagatacaacaccatcctgcagatgtacggcgagaaggccgaggaggccgaggagctgagactggacctggaggacgtgaagaacatgtacaagacccagatcgacgagctgctgagacagagcctgagctag

SEQ ID NO: 101911 - DNA, 4950 bp, synthetic construct
  misc_feature 1..4950: note = Description of Artificial Sequence: Synthetic coding sequence
  source 1..4950: mol_type = other DNA
atggagagcgtggagaaggactggggctggggcctgtggagaaacctgagatgcctgggccacgcccaccagggcaagtgctgcaccgagggcggcatcagcagcaccaccaagaccagcagcgagaacggcagctgctgcttcgagaaggccgccagaaaggaccacgtgtgcagattcatcggctgcggcagaaacgacagattcaactacgtggtgatgcagctgcagggcagaaacctggccgacctgagaagaagccagagcagaggcaccttcaccatcagcaccaccctgagactgggcagacagatcctggagagcatcgagagcatccacagcgtgggcttcctgcacagagacatcaagcccagcaacttcgccatgggcagattccccagcacctgcagaaagtgctacatgctggacttcggcctggccagacagttcaccaacagctgcggcgacgtgagaccccccagagccgtggccggcttcagaggcaccgtgagatacgccagcatcaacgcccacagaaacagagagatgggcagacacgacgacctgtggagcctgttctacatgctggtggagttcgtggtgggccagctgccctggagaaagatcaaggacaaggagcaggtgggcagcatcaaggagagatacgaccacagactgatgctgaagcacctgccccccgagttcagcatcttcctggaccacatcagcagcctggactacttcaccaagcccgactaccagatgagcatcagagtgaccagaaagagctacaaggtgagcaccagcggcccccaggccttcaacagcctgagctacaccagcggccccggcgcctgcatcagcagcagcagcttcagcagaatgggcagcagcagcttcagaggcggcctgggcgccggctacggcggcgccagcggcggcatcaccaccatcaccgtgaaccagagcctgctgagccccctgaacctggaggtggaccccaacatccaggccgtgagaacccaggaggagaagcagatcaagaccctgaacaacaagttcttcagcttcatcgacaaggtgagattcctggagcagcagaacaagatgctggagaccaagtggagcctggtgcagcagcagaagatggccagaagcaacatggacaacatgttcgagagctacatcaacaacctgaagtggcagctggagaccctgggccaggagaagctgaagctggaggccgagctgggcaacatgcacggcctggtggaggacttcagaaacaagtacgaggtggagatcagcaagtgcaccgagatggagaacgagttcgtgctgatcaaggagtacgtggacgaggcctacatgaacaagatggagctggagagcagcctgaaggagctgaccgccaagatcagcttcctgagacagctgtacgaggaggagatcggcagctgcagccccagaagcagaatccacctgtggtgctgcagctggaccaccgccgccagctggacctggaccgccagcagcctgagaagcagacccgagggcttccccggcggctgccacgccgacaccgagcagagaggcgagctggccatcaaggacgccaacgccaagctgagcgagctggaggccgccctgcagctggccagccaggacatggccagacagctgagagagtaccaggagctgatgaacgtgaagctggccctggacatcaagatcgccacctacagaaagctgctggagggcgaggagagctggctggagagcggcatgcagaacatgagcatccacatgaagaccaccagcagctacgccggcggccagagcctggcctacggcggcctgaccagccccggcctgagctacggcctgggcagcagcttcggcagcggcatgggcagcagcagcttcagccacaccagcagcagcagagccgtggtgatgaagaagatcgagaccagagacggcaagctggtgagcgagagcagcaacgtgctgcccaacctgagaatcaccgccaccctgctgaccagcgtgttcgacaacagcatcaagaccttcggcgtgatcgagagcgaccccttcgactgggagaagaccggcaacgacggcagcctgaccaccaccaccaccagcaccaccccccagctgcacaccagactgacccccgccgccatcggcatcgccaacgccacccccatccccggcgacctgctgagagagaacaccgacgaggtgttccccgacgagcagctgagcgacggcgagaacggcatccccgtgggcgtgagccccgacaagctgcccggcagcctgggccaccccagaccccaggagaaggacgtgtgggaggagatggacgccaacaagaacaagatcaagctgggcatctgcaaggccgccaccgaggaggagaacagccacggccaggccaacggcctgctgaacgcccccagcctgggcagccccatcagagtgagaagcgagatcacccagcccgacagagacatccccctggtgagaaagctgagaagcatccacagcttcgagctggagaagagactgaccctggagcccaagcccgacaccgacaagttcctggagacctgcctggagaagatgcagaaggacaccagcgccggcaaggagagcatcctgcccgccctgctgcacaagccctgcgtgcccgccgtgagcagaaccgaccacatctggcactacgacgaggagtacctgcccgacgccagcaagcccgccagcgccaacacccccgagcaggccgacggcggcggcagcaacggcttcatcgccgtgaacctgagcagctgcaagcaggagatcgacagcaaggagtgggtgatcgtggacaaggagcaggacctgcaggacttcagaaccaacgaggccgtgggccacaagaccaccggcagccccagcgacgaggagcccgaggtgctgcaggtgctggaggccagcccccaggacgagaagctgcagctgggcccctgggccgagaacgaccacctgaagaaggagaccagcggcgtggtgctggccctgagcgccgagggcccccccaccgccgccagcgagcagtacaccgacagactggagctgcagcccggcgccgccagccagttcatcgccgccacccccaccagcctgatggaggcccaggccgagggccccctgaccgccatcaccatccccagacccagcgtggccagcacccagagcaccagcggcagcttccactgcggccagcagcccgagaagaaggacctgcagcccatggagcccaccgtggagctgtacagccccagagagaacttcagcggcctggtggtgaccgagggcgagccccccagcggcggcagcagaaccgacctgggcctgcagatcgaccacatcggccacgacatgctgcccaacatcagagagagcaacaagagccaggacctgggccccaaggagctgcccgaccacaacagactggtggtgagagagttcgagaacctgcccggcgagaccgaggagaagagcatcctgctggagagcgacaacgaggacgagaagctgagcagaggccagcactgcatcgagatcagcagcctgcccggcgacctggtgatcgtggagaaggaccacagcgccaccaccgagcccctggacgtgaccaagacccagaccttcagcgtggtgcccaaccaggacaagaacaacgagatcatgaagctgctgaccgtgggcaccagcgagatcagcagcagagacatcgacccccacgtggagggccagatcggccaggtggccgagatgcagaagaacaagatcagcaaggacgacgacatcatgagcgaggacctgcccggccaccagggcgacctgagcaccttcctgcaccaggagggcaagagagagaagatcacccccagaaacggcgagctgttccactgcgtgagcgagaacgagcacggcgcccccaccagaaaggacatggtgagaagcagcttcgtgaccagacacagcagaatccccgtgctggcccaggagatcgacagcaccctggagagcagcagccccgtgagcgccaaggagaagctgctgcagaagaaggcctaccagcccgacctggtgaagctgctggtggagaagagacagttcaagagcttcctgggcgacctgagcagcgccagcgacaagctgctggaggagaagctggccaccgtgcccgcccccttctgcgaggaggaggtgctgacccccttcagcagactgaccgtggacagccacctgagcagaagcgccgaggacagcttcctgagccccatcatcagccagagcagaaagagcaagatccccagacccgtgagctgggtgaacaccgaccaggtgaacagcagcaccagcagccagttcttccccagacccccccccggcaagccccccaccagacccggcgtggaggccagactgagaagatacaaggtgctgggcagcagcaacagcgacagcgacctgttcagcagactggcccagatcctgcagaacggcagccagaagcccagaagcaccacccagtgcaagagccccggcagcccccacaaccccaagaccccccccaagagccccgtggtgcccagaagaagccccagcgccagccccagaagcagcagcctgcccagaaccagcagcagcagccccagcagagccggcagaccccaccacgaccagagaagcagcagcccccacctgggcagaagcaagagcccccccagccacagcggcagcagcagcagcagaagaagctgccagcaggagcactgcaagcccagcaagaacggcctgaagggcagcggcagcctgcaccaccacagcgccagcaccaagaccccccagggcaagagcaagcccgccagcaagctgagcagatag

SEQ ID NO: 101912 - DNA, 3735 bp, synthetic construct
  misc_feature 1..3735: note = Description of Artificial Sequence: Synthetic coding sequence
  source 1..3735: mol_type = other DNA
atgagcggcggcggcgagcagctggacatcctgagcgtgggcatcctggtgaaggagagatggaaggtgctgagaaagatcggcggcggcggcttcggcgagatctacgacgccctggacatgctgaccagagagaacgtggccctgaaggtggagagcgcccagcagcccaagcaggtgctgaagatggaggtggccgtgctgaagaagctgcagggcaaggaccacgtgtgcagattcatcggctgcggcagaaacgacagattcaactacgtggtgatgcagctgcagggcagaaacctggccgacctgagaagaagccagagcagaggcaccttcaccatcagcaccaccctgagactgggcagacagatcctggagagcatcgagagcatccacagcgtgggcttcctgcacagagacatcaagcccagcaacttcgccatgggcagattccccagcacctgcagaaagtgctacatgctggacttcggcctggccagacagttcaccaacagctgcggcgacgtgagaccccccagagccgtggccggcttcagaggcaccgtgagatacgccagcatcaacgcccacagaaacagagagatgggcagacacgacgacctgtggagcctgttctacatgctggtggagttcgtggtgggccagctgccctggagaaagatcaaggacaaggagcaggtgggcagcatcaaggagagatacgaccacagactgatgctgaagcacctgccccccgagttcagcatcttcctggaccacatcagcagcctggactacttcaccaagcccgactaccagctgctgaccagcgtgttcgacaacagcatcaagaccttcggcgtgatcgagagcgaccccttcgactgggagaagaccggcaacgacggcagcctgaccaccaccaccaccagcaccaccccccagctgcacaccagactgacccccgccgccatcggcatcgccaacgccacccccatccccggcgacctgctgagagagaacaccgacgaggtgttccccgacgagcagctgagcgacggcgagaacggcatccccgtgggcgtgagccccgacaagctgcccggcagcctgggccaccccagaccccaggagaaggacgtgtgggaggagatggacgccaacaagaacaagatcaagctgggcatctgcaaggccgccaccgaggaggagaacagccacggccaggccaacggcctgctgaacgcccccagcctgggcagccccatcagagtgagaagcgagatcacccagcccgacagagacatccccctggtgagaaagctgagaagcatccacagcttcgagctggagaagagactgaccctggagcccaagcccgacaccgacaagttcctggagacctgcctggagaagatgcagaaggacaccagcgccggcaaggagagcatcctgcccgccctgctgcacaagccctgcgtgcccgccgtgagcagaaccgaccacatctggcactacgacgaggagtacctgcccgacgccagcaagcccgccagcgccaacacccccgagcaggccgacggcggcggcagcaacggcttcatcgccgtgaacctgagcagctgcaagcaggagatcgacagcaaggagtgggtgatcgtggacaaggagcaggacctgcaggacttcagaaccaacgaggccgtgggccacaagaccaccggcagccccagcgacgaggagcccgaggtgctgcaggtgctggaggccagcccccaggacgagaagctgcagctgggcccctgggccgagaacgaccacctgaagaaggagaccagcggcgtggtgctggccctgagcgccgagggcccccccaccgccgccagcgagcagtacaccgacagactggagctgcagcccggcgccgccagccagttcatcgccgccacccccaccagcctgatggaggcccaggccgagggccccctgaccgccatcaccatccccagacccagcgtggccagcacccagagcaccagcggcagcttccactgcggccagcagcccgagaagaaggacctgcagcccatggagcccaccgtggagctgtacagccccagagagaacttcagcggcctggtggtgaccgagggcgagccccccagcggcggcagcagaaccgacctgggcctgcagatcgaccacatcggccacgacatgctgcccaacatcagagagagcaacaagagccaggacctgggccccaaggagctgcccgaccacaacagactggtggtgagagagttcgagaacctgcccggcgagaccgaggagaagagcatcctgctggagagcgacaacgaggacgagaagctgagcagaggccagcactgcatcgagatcagcagcctgcccggcgacctggtgatcgtggagaaggaccacagcgccaccaccgagcccctggacgtgaccaagacccagaccttcagcgtggtgcccaaccaggacaagaacaacgagatcatgaagctgctgaccgtgggcaccagcgagatcagcagcagagacatcgacccccacgtggagggccagatcggccaggtggccgagatgcagaagaacaagatcagcaaggacgacgacatcatgagcgaggacctgcccggccaccagggcgacctgagcaccttcctgcaccaggagggcaagagagagaagatcacccccagaaacggcgagctgttccactgcgtgagcgagaacgagcacggcgcccccaccagaaaggacatggtgagaagcagcttcgtgaccagacacagcagaatccccgtgctggcccaggagatcgacagcaccctggagagcagcagccccgtgagcgccaaggagaagctgctgcagaagaaggcctaccagcccgacctggtgaagctgctggtggagaagagacagttcaagagcttcctgggcgacctgagcagcgccagcgacaagctgctggaggagaagctggccaccgtgcccgcccccttctgcgaggaggaggtgctgacccccttcagcagactgaccgtggacagccacctgagcagaagcgccgaggacagcttcctgagccccatcatcagccagagcagaaagagcaagatccccagacccgtgagctgggtgaacaccgaccaggtgaacagcagcaccagcagccagttcttccccagacccccccccggcaagccccccaccagacccggcgtggaggccagactgagaagatacaaggtgctgggcagcagcaacagcgacagcgacctgttcagcagactggcccagatcctgcagaacggcagccagaagcccagaagcaccacccagtgcaagagccccggcagcccccacaaccccaagaccccccccaagagccccgtggtgcccagaagaagccccagcgccagccccagaagcagcagcctgcccagaaccagcagcagcagccccagcagagccggcagaccccaccacgaccagagaagcagcagcccccacctgggcagaagcaagagcccccccagccacagcggcagcagcagcagcagaagaagctgccagcaggagcactgcaagcccagcaagaacggcctgaagggcagcggcagcctgcaccaccacagcgccagcaccaagaccccccagggcaagagcaagcccgccagcaagctgagcagatag

SEQ ID NO: 101913 - DNA, 3525 bp, synthetic construct
  misc_feature 1..3525: note = Description of Artificial Sequence: Synthetic coding sequence
  source 1..3525: mol_type = other DNA
gagcccggcaaggaccacgtgtgcagattcatcggctgcggcagaaacgacagattcaactacgtggtgatgcagctgcagggcagaaacctggccgacctgagaagaagccagagcagaggcaccttcaccatcagcaccaccctgagactgggcagacagatcctggagagcatcgagagcatccacagcgtgggcttcctgcacagagacatcaagcccagcaacttcgccatgggcagattccccagcacctgcagaaagtgctacatgctggacttcggcctggccagacagttcaccaacagctgcggcgacgtgagaccccccagagccgtggccggcttcagaggcaccgtgagatacgccagcatcaacgcccacagaaacagagagatgggcagacacgacgacctgtggagcctgttctacatgctggtggagttcgtggtgggccagctgccctggagaaagatcaaggacaaggagcaggtgggcagcatcaaggagagatacgaccacagactgatgctgaagcacctgccccccgagttcagcatcttcctggaccacatcagcagcctggactacttcaccaagcccgactaccagctgctgaccagcgtgttcgacaacagcatcaagaccttcggcgtgatcgagagcgaccccttcgactgggagaagaccggcaacgacggcagcctgaccaccaccaccaccagcaccaccccccagctgcacaccagactgacccccgccgccatcggcatcgccaacgccacccccatccccggcgacctgctgagagagaacaccgacgaggtgttccccgacgagcagctgagcgacggcgagaacggcatccccgtgggcgtgagccccgacaagctgcccggcagcctgggccaccccagaccccaggagaaggacgtgtgggaggagatggacgccaacaagaacaagatcaagctgggcatctgcaaggccgccaccgaggaggagaacagccacggccaggccaacggcctgctgaacgcccccagcctgggcagccccatcagagtgagaagcgagatcacccagcccgacagagacatccccctggtgagaaagctgagaagcatccacagcttcgagctggagaagagactgaccctggagcccaagcccgacaccgacaagttcctggagacctgcctggagaagatgcagaaggacaccagcgccggcaaggagagcatcctgcccgccctgctgcacaagccctgcgtgcccgccgtgagcagaaccgaccacatctggcactacgacgaggagtacctgcccgacgccagcaagcccgccagcgccaacacccccgagcaggccgacggcggcggcagcaacggcttcatcgccgtgaacctgagcagctgcaagcaggagatcgacagcaaggagtgggtgatcgtggacaaggagcaggacctgcaggacttcagaaccaacgaggccgtgggccacaagaccaccggcagccccagcgacgaggagcccgaggtgctgcaggtgctggaggccagcccccaggacgagaagctgcagctgggcccctgggccgagaacgaccacctgaagaaggagaccagcggcgtggtgctggccctgagcgccgagggcccccccaccgccgccagcgagcagtacaccgacagactggagctgcagcccggcgccgccagccagttcatcgccgccacccccaccagcctgatggaggcccaggccgagggccccctgaccgccatcaccatccccagacccagcgtggccagcacccagagcaccagcggcagcttccactgcggccagcagcccgagaagaaggacctgcagcccatggagcccaccgtggagctgtacagccccagagagaacttcagcggcctggtggtgaccgagggcgagccccccagcggcggcagcagaaccgacctgggcctgcagatcgaccacatcggccacgacatgctgcccaacatcagagagagcaacaagagccaggacctgggccccaaggagctgcccgaccacaacagactggtggtgagagagttcgagaacctgcccggcgagaccgaggagaagagcatcctgctggagagcgacaacgaggacgagaagctgagcagaggccagcactgcatcgagatcagcagcctgcccggcgacctggtgatcgtggagaaggaccacagcgccaccaccgagcccctggacgtgaccaagacccagaccttcagcgtggtgcccaaccaggacaagaacaacgagatcatgaagctgctgaccgtgggcaccagcgagatcagcagcagagacatcgacccccacgtggagggccagatcggccaggtggccgagatgcagaagaacaagatcagcaaggacgacgacatcatgagcgaggacctgcccggccaccagggcgacctgagcaccttcctgcaccaggagggcaagagagagaagatcacccccagaaacggcgagctgttccactgcgtgagcgagaacgagcacggcgcccccaccagaaaggacatggtgagaagcagcttcgtgaccagacacagcagaatccccgtgctggcccaggagatcgacagcaccctggagagcagcagccccgtgagcgccaaggagaagctgctgcagaagaaggcctaccagcccgacctggtgaagctgctggtggagaagagacagttcaagagcttcctgggcgacctgagcagcgccagcgacaagctgctggaggagaagctggccaccgtgcccgcccccttctgcgaggaggaggtgctgacccccttcagcagactgaccgtggacagccacctgagcagaagcgccgaggacagcttcctgagccccatcatcagccagagcagaaagagcaagatccccagacccgtgagctgggtgaacaccgaccaggtgaacagcagcaccagcagccagttcttccccagacccccccccggcaagccccccaccagacccggcgtggaggccagactgagaagatacaaggtgctgggcagcagcaacagcgacagcgacctgttcagcagactggcccagatcctgcagaacggcagccagaagcccagaagcaccacccagtgcaagagccccggcagcccccacaaccccaagaccccccccaagagccccgtggtgcccagaagaagccccagcgccagccccagaagcagcagcctgcccagaaccagcagcagcagccccagcagagccggcagaccccaccacgaccagagaagcagcagcccccacctgggcagaagcaagagcccccccagccacagcggcagcagcagcagcagaagaagctgccagcaggagcactgcaagcccagcaagaacggcctgaagggcagcggcagcctgcaccaccacagcgccagcaccaagaccccccagggcaagagcaagcccgccagcaagctgagcagatag

SEQ ID NO: 101914 - DNA, 2244 bp, synthetic construct
  misc_feature 1..2244: note = Description of Artificial Sequence: Synthetic coding sequence
  source 1..2244: mol_type = other DNA
atgaccagcttccaggaggtgcccctgcagaccagcaacttcgcccacgtgatcttccagaacgtggccaagagctacctgcccaacgcccacctggagtgccactacaccctgaccccctacatccacccccaccccaaggactgggtgggcatcttcaaggtgggctggagcaccgccagagactactacaccttcctgtggagccccatgcccgagcactacgtggagggcagcaccgtgaactgcgtgctggccttccagggctactacctgcccaacgacgacggcgagttctaccagttctgctacgtgacccacaagggcgagatcagaggcgccagcacccccttccagttcagagccagcagccccgtggaggagctgctgaccatggaggacgagggcaacagcgacatgctggtggtgaccaccaaggccggcctgctggagctgaagatcgagaagaccatgaaggagaaggaggagctgctgaagctgatcgccgtgctggagaaggagaccgcccagctgagagagcaggtgggcagaatggagagagagctgaaccacgagaaggagagatgcgaccagctgcaggccgagcagaagggcctgaccgaggtgacccagagcctgaagatggagaacgaggagttcaagaagagattcagcgacgccaccagcaaggcccaccagctggaggaggacatcgtgagcgtgacccacaaggccatcgagaaggagaccgagctggacagcctgaaggacaagctgaagaaggcccagcacgagagagagcagctggagtgccagctgaagaccgagaaggacgagaaggagctgtacaaggtgcacctgaagaacaccgagatcgagaacaccaagctgatgagcgaggtgcagaccctgaagaacctggacggcaacaaggagagcgtgatcacccacttcaaggaggagatcggcagactgcagctgtgcctggccgagaaggagaacctgcagagaaccttcctgctgaccaccagcagcaaggaggacacctgcttcctgaaggagcagctgagaaaggccgaggagcaggtgcaggccaccagacaggaggtggtgttcctggccaaggagctgagcgacgccgtgaacgtgagagacagaaccatggccgacctgcacaccgccagactggagaacgagaaggtgaagaagcagctggccgacgccgtggccgagctgaagctgaacgccatgaagaaggaccaggacaagaccgacaccctggagcacgagctgagaagagaggtggaggacctgaagctgagactgcagatggccgccgaccactacaaggagaagttcaaggagtgccagagactgcagaagcagatcaacaagctgagcgaccagagcgccaacaacaacaacgtgttcaccaagaagaccggcaaccagcagaaggtgaacgacgccagcgtgaacaccgaccccgccaccagcgccagcaccgtggacgtgaagcccagccccagcgccgccgaggccgacttcgacatcgtgaccaagggccaggtgtgcgagatgaccaaggagatcgccgacaagaccgagaagtacaacaagtgcaagcagctgctgcaggacgagaaggccaagtgcaacaagtacgccgacgagctggccaagatggagctgaagtggaaggagcaggtgaagatcgccgagaacgtgaagctggagctggccgaggtgcaggacaactacaaggagctgaagagaagcctggagaaccccgccgagagaaagatggaggacggcgccgacggcgccttctaccccgacgagatccagagaccccccgtgagagtgcccagctggggcctggaggacaacgtggtgtgcagccagcccgccagaaacttcagcagacccgacggcctggaggacagcgaggacagcaaggaggacgagaacgtgcccaccgcccccgacccccccagccagcacctgagaggccacggcaccggcttctgcttcgacagcagcttcgacgtgcacaagaagtgccccctgtgcgagctgatgttcccccccaactacgaccagagcaagttcgaggagcacgtggagagccactggaaggtgtgccccatgtgcagcgagcagttcccccccgactacgaccagcaggtgttcgagagacacgtgcagacccacttcgaccagaacgtgctgaacttcgactag

SEQ ID NO: 101915 - DNA, 2370 bp, synthetic construct
  misc_feature 1..2370: note = Description of Artificial Sequence: Synthetic coding sequence
  source 1..2370: mol_type = other DNA
atgaccagcttccaggaggtgcccctgcagaccagcaacttcgcccacgtgatcttccagaacgtggccaagagctacctgcccaacgcccacctggagtgccactacaccctgaccccctacatccacccccaccccaaggactgggtgggcatcttcaaggtgggctggagcaccgccagagactactacaccttcctgtggagccccatgcccgagcactacgtggagggcagcaccgtgaactgcgtgctggccttccagggctactacctgcccaacgacgacggcgagttctaccagttctgctacgtgacccacaagggcgagatcagaggcgccagcacccccttccagttcagagccagcagccccgtggaggagctgctgaccatggaggacgagggcaacagcgacatgctggtggtgaccaccaaggccggcctgctggagctgaagatcgagaagaccatgaaggagaaggaggagctgctgaagctgatcgccgtgctggagaaggagaccgcccagctgagagagcaggtgggcagaatggagagagagctgaaccacgagaaggagagatgcgaccagctgcaggccgagcagaagggcctgaccgaggtgacccagagcctgaagatggagaacgaggagttcaagaagagattcagcgacgccaccagcaaggcccaccagctggaggaggacatcgtgagcgtgacccacaaggccatcgagaaggagaccgagctggacagcctgaaggacaagctgaagaaggcccagcacgagagagagcagctggagtgccagctgaagaccgagaaggacgagaaggagctgtacaaggtgcacctgaagaacaccgagatcgagaacaccaagctgatgagcgaggtgcagaccctgaagaacctggacggcaacaaggagagcgtgatcacccacttcaaggaggagatcggcagactgcagctgtgcctggccgagaaggagaacctgcagagaaccttcctgctgaccaccagcagcaaggaggacacctgcttcctgaaggagcagctgagaaaggccgaggagcaggtgcaggccaccagacaggaggtggtgttcctggccaaggagctgagcgacgccgtgaacgtgagagacagaaccatggccgacctgcacaccgccagactggagaacgagaaggtgaagaagcagctggccgacgccgtggccgagctgaagctgaacgccatgaagaaggaccaggacaagaccgacaccctggagcacgagctgagaagagaggtggaggacctgaagctgagactgcagatggccgccgaccactacaaggagaagttcaaggagtgccagagactgcagaagcagatcaacaagctgagcgaccagagcgccaacaacaacaacgtgttcaccaagaagaccggcaaccagcagaaggtgaacgacgccagcgtgaacaccgaccccgccaccagcgccagcaccgtggacgtgaagcccagccccagcgccgccgaggccgacttcgacatcgtgaccaagggccaggtgtgcgagatgaccaaggagatcgccgacaagaccgagaagtacaacaagtgcaagcagctgctgcaggacgagaaggccaagtgcaacaagtacgccgacgagctggccaagatggagctgaagtggaaggagcaggtgaagatcgccgagaacgtgaagctggagctggccgaggtgcaggacaactacaaggagctgaagagaagcctggagaaccccgccgagagaaagatggagggccagaacagccagagcccccagtgcttcaagacctgcagcgagcagaacggctacgtgctgaccctgagcaacgcccagcccgtgctgcagtacggcaacccctacgccagccaggagaccagagacggcgccgacggcgccttctaccccgacgagatccagagaccccccgtgagagtgcccagctggggcctggaggacaacgtggtgtgcagccagcccgccagaaacttcagcagacccgacggcctggaggacagcgaggacagcaaggaggacgagaacgtgcccaccgcccccgacccccccagccagcacctgagaggccacggcaccggcttctgcttcgacagcagcttcgacgtgcacaagaagtgccccctgtgcgagctgatgttcccccccaactacgaccagagcaagttcgaggagcacgtggagagccactggaaggtgtgccccatgtgcagcgagcagttcccccccgactacgaccagcaggtgttcgagagacacgtgcagacccacttcgaccagaacgtgctgaacttcgactag

SEQ ID NO: 101916 - DNA, 417 bp, synthetic construct
  misc_feature 1..417: note = Description of Artificial Sequence: Synthetic coding sequence
  source 1..417: mol_type = other DNA
atgaccagcttccaggaggtgcccctgcagaccagcaacttcgcccacgtgatcttccagaacgtggccaagagctacctgcccaacgcccacctggagtgccactacaccctgaccccctacatccacccccaccccaaggactgggtgggcatcttcaaggtgggctggagcaccgccagagactactacaccttcctgtggagccccatgcccgagcactacgtggagggcagcaccgtgaactgcgtgctggccttccagggctactacctgcccaacgacgacggcgagttctaccagttctgctacgtgacccacaagggcgagatcagaggcgccagcacccccttccagttcagagccagcagccccgtggaggagctgctgaccatggaggacgagggcaacagctag

SEQ ID NO: 101917 - DNA, 297 bp, synthetic construct
  misc_feature 1..297: note = Description of Artificial Sequence: Synthetic coding sequence
  source 1..297: mol_type = other DNA
atgaccagcttccaggaggtgcccctgcagaccagcaacttcgcccacgtgatcttccagaacgtggccaagagctacctgcccaacgcccacctggagtgccactacaccctgaccccctacatccacccccaccccaaggactgggtgggcatcttcaaggtgggctggagcaccgccagagactactacaccttcctgtggagccccatgcccgagcactacgtggagggcagcaccgtgaactgcgtgctggccttccagggctactacctgcccaacgacgacggcgagtag

SEQ ID NO: 101918 - DNA, 1773 bp, synthetic construct
  misc_feature 1..1773: note = Description of Artificial Sequence: Synthetic coding sequence
  source 1..1773: mol_type = other DNA
atgaaggagaaggaggagctgctgaagctgatcgccgtgctggagaaggagaccgcccagctgagagagcaggtgggcagaatggagagagagctgaaccacgagaaggagagatgcgaccagctgcaggccgagcagaagggcctgaccgaggtgacccagagcctgaagatggagaacgaggagttcaagaagagattcagcgacgccaccagcaaggcccaccagctggaggaggacatcgtgagcgtgacccacaaggccatcgagaaggagaccgagctggacagcctgaaggacaagctgaagaaggcccagcacgagagagagcagctggagtgccagctgaagaccgagaaggacgagaaggagctgtacaaggtgcacctgaagaacaccgagatcgagaacaccaagctgatgagcgaggtgcagaccctgaagaacctggacggcaacaaggagagcgtgatcacccacttcaaggaggagatcggcagactgcagctgtgcctggccgagaaggagaacctgcagagaaccttcctgctgaccaccagcagcaaggaggacacctgcttcctgaaggagcagctgagaaaggccgaggagcaggtgcaggccaccagacaggaggtggtgttcctggccaaggagctgagcgacgccgtgaacgtgagagacagaaccatggccgacctgcacaccgccagactggagaacgagaaggtgaagaagcagctggccgacgccgtggccgagctgaagctgaacgccatgaagaaggaccaggacaagaccgacaccctggagcacgagctgagaagagaggtggaggacctgaagctgagactgcagatggccgccgaccactacaaggagaagttcaaggagtgccagagactgcagaagcagatcaacaagctgagcgaccagagcgccaacaacaacaacgtgttcaccaagaagaccggcaaccagcagaaggtgaacgacgccagcgtgaacaccgaccccgccaccagcgccagcaccgtggacgtgaagcccagccccagcgccgccgaggccgacttcgacatcgtgaccaagggccaggtgtgcgagatgaccaaggagatcgccgacaagaccgagaagtacaacaagtgcaagcagctgctgcaggacgagaaggccaagtgcaacaagtacgccgacgagctggccaagatggagctgaagtggaaggagcaggtgaagatcgccgagaacgtgaagctggagctggccgaggtgcaggacaactacaaggagctgaagagaagcctggagaaccccgccgagagaaagatggaggacggcgccgacggcgccttctaccccgacgagatccagagaccccccgtgagagtgcccagctggggcctggaggacaacgtggtgtgcagccagcccgccagaaacttcagcagacccgacggcctggaggacagcgaggacagcaaggaggacgagaacgtgcccaccgcccccgacccccccagccagcacctgagaggccacggcaccggcttctgcttcgacagcagcttcgacgtgcacaagaagtgccccctgtgcgagctgatgttcccccccaactacgaccagagcaagttcgaggagcacgtggagagccactggaaggtgtgccccatgtgcagcgagcagttcccccccgactacgaccagcaggtgttcgagagacacgtgcagacccacttcgaccagaacgtgctgaacttcgactag

SEQ ID NO: 101919 - DNA, 2244 bp, synthetic construct; identical to SEQ ID NO: 101914
  misc_feature 1..2244: note = Description of Artificial Sequence: Synthetic coding sequence
  source 1..2244: mol_type = other DNA

SEQ ID NO: 101920 - DNA, 3480 bp, synthetic construct
  misc_feature 1..3480: note = Description of Artificial Sequence: Synthetic coding sequence
  source 1..3480: mol_type = other DNA
atggagcccatcaccttcaccgccagaaagcacctgctgagcaacgaggtgagcgtggacttcggcctgcagctggtgggcagcctgcccgtgcacagcctgaccaccatgcccatgctgccctgggtggtggccgaggtgagaagactgagcagacagagcaccagaaaggagcccgtgaccaagcaggtgagactgtgcgtgagccccagcggcctgagatgcgagcccgagcccggcagaagccagcagtgggaccccctgatctacagcagcatcttcgagtgcaagccccagagagtgcacaagctgatccacaacagccacgaccccagctacttcgcctgcctgatcaaggaggacgccgtgcacagacagagcatctgctacgtgttcaaggccgacgaccagaccaaggtgcccgagatcatcagcagcatcagacaggccggcaagatcgccagacaggaggagctgcactgccccagcgagttcgacgacaccttcagcaagaagttcgaggtgctgttctgcggcagagtgaccgtggcccacaagaaggccccccccgccctgatcgacgagtgcatcgagaagttcaaccacgtgagcggcagcagaggcagcgagagccccagacccaaccccccccacgccgcccccaccggcagccaggagcccgtgagaagacccatgagaaagagcttcagccagcccggcctgagaagcctggccttcagaaaggagctgcaggacggcggcctgagaagcagcggcttcttcagcagcttcgaggagagcgacatcgagaaccacctgatcagcggccacaacatcgtgcagcccaccgacatcgaggagaacagaaccatgctgttcaccatcggccagagcgaggtgtacctgatcagccccgacaccaagaagatcgccctggagaagaacttcaaggagatcagcttctgcagccagggcatcagacacgtggaccacttcggcttcatctgcagagagagcagcggcggcggcggcttccacttcgtgtgctacgtgttccagtgcaccaacgaggccctggtggacgagatcatgatgaccctgaagcaggccttcaccgtggccgccgtgcagcagaccgccaaggcccccgcccagctgtgcgagggctgccccctgcagagcctgcacaagctgtgcgagagaatcgagggcatgaacagcagcaagaccaagctggagctgcagaagcacctgaccaccctgaccaaccaggagcaggccaccatcttcgaggaggtgcagaagctgagacccagaaacgagcagagagagaacgagctgatcatcagcttcctgagatgcctgtacgaggagaagcagaaggagcacatccacatcggcgagatgaagcagaccagccagatggccgccgagaacatcggcagcgagctgccccccagcgccaccagattcagactggacatgctgaagaacaaggccaagagaagcctgaccgagagcctggagagcatcctgagcagaggcaacaaggccagaggcctgcaggagcacagcatcagcgtggacctggacagcagcctgagcagcaccctgagcaacaccagcaaggagcccagcgtgtgcgagaaggaggccctgcccatcagcgagagcagcttcaagctgctgggcagcagcgaggacctgagcagcgacagcgagagccacctgcccgaggagcccgcccccctgagcccccagcaggccttcagaagaagagccaacaccctgagccacttccccatcgagtgccaggagcccccccagcccgccagaggcagccccggcgtgagccagagaaagctgatgagataccacagcgtgagcaccgagaccccccacgagagaaacgtggaccccagccccgtgggcgagagcaagcacagacccggccagagcagcgcccccgcccccccccccagactgaaccccagcgccagcagccccaacttcttcaagtacctgaagcacaacagcagcggcgagcagagcggcaacgccgtgcccaagagcatcagctacagaaacgccctgagaaagaagctgcacagcagcagcagcgtgcccaacttcctgaagttcctggcccccgtggacgagaacaacaccagcgacttcatgaacaccaagagagacttcgagagcaaggccaaccacctgggcgacagcggcggcacccccgtgaagaccagaagacacagctggagacagcagatcttcctgagagtggccaccccccagaaggcctgcgacagcagcagcagatacgaggactacagcgagctgggcgagctgccccccagaagccccctggagcccgtgtgcgaggacggccccttcggccccccccccgaggagaagaagagaaccagcagagagctgagagagctgtggcagaaggccatcctgcagcagatcctgctgctgagaatggagaaggagaaccagaagctgcaggccagcgagaacgacctgctgaacaagagactgaagctggactacgaggagatcaccccctgcctgaaggaggtgaccaccgtgtgggagaagatgctgagcacccccggcagaagcaagatcaagttcgacatggagaagatgcacagcgccgtgggccagggcgtgcccagacaccacagaggcgagatctggaagttcctggccgagcagttccacctgaagcaccagttccccagcaagcagcagcccaaggacgtgccctacaaggagctgctgaagcagctgaccagccagcagcacgccatcctgatcgacctgggcagaaccttccccacccacccctacttcagcgcccagctgggcgccggccagctgagcctgtacaacatcctgaaggcctacagcctgctggaccaggaggtgggctactgccagggcctgagcttcgtggccggcatcctgctgctgcacatgagcgaggaggaggccttcaagatgctgaagttcctgatgttcgacatgggcctgagaaagcagtacagacccgacatgatcatcctgcagatggagaagaccatcaaccaggtgttcgagatggacatcgccaagcagctgcaggcctacgaggtggagtaccacgtgctgcaggaggagctgatcgacagcagccccctgagcgacaaccagagaatggacaagctggagaagaccaacagcagcctgagaaagcagaacctggacctgctggagcagctgcaggtggccaacggcagaatccagagcctggaggccaccatcgagaagctgctgagcagcgagagcaagctgaagcaggccatgctgaccctggagctggagagaagcgccctgctgcagaccgtggaggagctgagaagaagaagcgccgagcccagcgacagagagcccgagtgcacccagcccgagcccaccggcgactag

SEQ ID NO: 101921 - DNA, 3507 bp, synthetic construct
  misc_feature 1..3507: note = Description of Artificial Sequence: Synthetic coding sequence
  source 1..3507: mol_type = other DNA
atggagcccatcaccttcaccgccagaaagcacctgctgagcaacgaggtgagcgtggacttcggcctgcagctggtgggcagcctgcccgtgcacagcctgaccaccatgcccatgctgccctgggtggtggccgaggtgagaagactgagcagacagagcaccagaaaggagcccgtgaccaagcaggtgagactgtgcgtgagccccagcggcctgagatgcgagcccgagcccggcagaagccagcagtgggaccccctgatctacagcagcatcttcgagtgcaagccccagagagtgcacaagctgatccacaacagccacgaccccagctacttcgcctgcctgatcaaggaggacgccgtgcacagacagagcatctgctacgtgttcaaggccgacgaccagaccaaggtgcccgagatcatcagcagcatcagacaggccggcaagatcgccagacaggaggagctgcactgccccagcgagttcgacgacaccttcagcaagaagttcgaggtgctgttctgcggcagagtgaccgtggcccacaagaaggccccccccgccctgatcgacgagtgcatcgagaagttcaaccacgtgagcggcagcagaggcagcgagagccccagacccaaccccccccacgccgcccccaccggcagccaggagcccgtgagaagacccatgagaaagagcttcagccagcccggcctgagaagcctggccttcagaaaggagctgcaggacggcggcctgagaagcagcggcttcttcagcagcttcgaggagagcgacatcgagaaccacctgatcagcggccacaacatcgtgcagcccaccgacatcgaggagaacagaaccatgctgttcaccatcggccagagcgaggtgtacctgatcagccccgacaccaagaagatcgccctggagaagaacttcaaggagatcagcttctgcagccagggcatcagacacgtggaccacttcggcttcatctgcagagagagcagcggcggcggcggcttccacttcgtgtgctacgtgttccagtgcaccaacgaggccctggtggacgagatcatgatgaccctgaagcaggccttcaccgtggccgccgtgcagcagaccgccaaggcccccgcccagctgtgcgagggctgccccctgcagagcctgcacaagctgtgcgagagaatcgagggcatgaacagcagcaagaccaagctggagctgcagaagcacctgaccaccctgaccaaccaggagcaggccaccatcttcgaggaggtgcagaagctgagacccagaaacgagcagagagagaacgagctgatcatcagcttcctgagatgcctgtacgaggagaagcagaaggagcacatccacatcggcgagatgaagcagaccagccagatggccgccgagaacatcggcagcgagctgccccccagcgccaccagattcagactggacatgctgaagaacaaggccaagagaagcctgaccgagagcctggagagcatcctgagcagaggcaacaaggccagaggcctgcaggagcacagcatcagcgtggacctggacagcagcctgagcagcaccctgagcaacaccagcaaggagcccagcgtgtgcgagaaggaggccctgcccatcagcgagagcagcttcaagctgctgggcagcagcgaggacctgagcagcgacagcgagagccacctgcccgaggagcccgcccccctgagcccccagcaggccttcagaagaagagccaacaccctgagccacttccccatcgagtgccaggagcccccccagcccgccagaggcagccccggcgtgagccagagaaagctgatgagataccacagcgtgagcaccgagaccccccacgagagaaaggacttcgagagcaaggccaaccacctgggcgacagcggcggcacccccgtgaagaccagaagacacagctggagacagcagatcttcctgagagtggccaccccccagaaggcctgcgacagcagcagcagatacgaggactacagcgagctgggcgagctgccccccagaagccccctggagcccgtgtgcgaggacggccccttcggccccccccccgaggagaagaagagaaccagcagagagctgagagagctgtggcagaaggccatcctgcagcagatcctgctgctgagaatggagaaggagaaccagaagctgcaggccagcgagaacgacctgctgaacaagagactgaagctggactacgaggagatcaccccctgcctgaaggaggtgaccaccgtgtgggagaagatgctgagcacccccggcagaagcaagatcaagttcgacatggagaagatgcacagcgccgtgggccagggcgtgcccagacaccacagaggcgagatctggaagttcctggccgagcagttccacctgaagcaccagttccccagcaagcagcagcccaaggacgtgccctacaaggagctgctgaagcagctgaccagccagcagcacgccatcctgatcgacctgggcagaaccttccccacccacccctacttcagcgcccagctgggcgccggccagctgagcctgtacaacatcctgaaggcctacagcctgctggaccaggaggtgggctactgccagggcctgagcttcgtggccggcatcctgctgctgcacatgagcgaggaggaggccttcaagatgctgaagttcctgatgttcgacatgggcctgagaaagcagtacagacccgacatgatcatcctgcagatccagatgtaccagctgagcagactgctgcacgactaccacagagacctgtacaaccacctggaggagcacgagatcggccccagcctgtacgccgccccctggttcctgaccatgttcgccagccagttccccctgggcttcgtggccagagtgttcgacatgatcttcctgcagggcaccgaggtgatcttcaaggtggccctgagcctgctgggcagccacaagcccctgatcctgcagcacgagaacctggagaccatcgtggacttcatcaagagcaccctgcccaacctgggcctggtgcagatggagaagaccatcaaccaggtgttcgagatggacatcgccaagcagctgcaggcctacgaggtggagtaccacgtgctgcaggaggagctgatcgacagcagccccctgagcgacaaccagagaatggacaagctggagaagaccaacagcagcctgagaaagcagaacctggacctgctggagcagctgcaggtggccaacggcagaatccagagcctggaggccaccatcgagaagctgctgagcagcgagagcaagctgaagcaggccatgctgaccctggagctggagagaagcgccctgctgcagaccgtggaggagctgagaagaagaagcgccgagcccagcgacagagagcccgagtgcacccagcccgagcccaccggcgactag

SEQ ID NO: 101922 - DNA, 1299 bp, synthetic construct
  misc_feature 1..1299: note = Description of Artificial Sequence: Synthetic coding sequence
  source 1..1299: mol_type = other DNA
atggagaaggagaaccagaagctgcaggccagcgagaacgacctgctgaacaagagactgaagctggactacgaggagatcaccccctgcctgaaggaggtgaccaccgtgtgggagaagatgctgagcacccccggcagaagcaagatcaagttcgacatggagaagatgcacagcgccgtgggccagggcgtgcccagacaccacagaggcgagatctggaagttcctggccgagcagttccacctgaagcaccagttccccagcaagcagcagcccaaggacgtgccctacaaggagctgctgaagcagctgaccagccagcagcacgccatcctgatcgacctgggcagaaccttccccacccacccctacttcagcgcccagctgggcgccggccagctgagcctgtacaacatcctgaaggcctacagcctgctggaccaggaggtgggctactgccagggcctgagcttcgtggccggcatcctgctgctgcacatgagcgaggaggaggccttcaagatgctgaagttcctgatgttcgacatgggcctgagaaagcagtacagacccgacatgatcatcctgcagatccagatgtaccagctgagcagactgctgcacgactaccacagagacctgtacaaccacctggaggagcacgagatcggccccagcctgtacgccgccccctggttcctgaccatgttcgccagccagttccccctgggcttcgtggccagagtgttcgacatgatcttcctgcagggcaccgaggtgatcttcaaggtggccctgagcctgctgggcagccacaagcccctgatcctgcagcacgagaacctggagaccatcgtggacttcatcaagagcaccctgcccaacctgggcctggtgcagatggagaagaccatcaaccaggtgttcgagatggacatcgccaagcagctgcaggcctacgaggtggagtaccacgtgctgcaggaggagctgatcgacagcagccccctgagcgacaaccagagaatggacaagctggagaagaccaacagcagcctgagaaagcagaacctggacctgctggagcagctgcaggtggccaacggcagaatccagagcctggaggccaccatcgagaagctgctgagcagcgagagcaagctgaagcaggccatgctgaccctggagctggagagaagcgccctgctgcagaccgtggaggagctgagaagaagaagcgccgagcccagcgacagagagcccgagtgcacccagcccgagcccaccggcgactag

SEQ ID NO: 101923 - DNA, 933 bp, synthetic construct
  misc_feature 1..933: note = Description of Artificial Sequence: Synthetic coding sequence
  source 1..933: mol_type = other DNA
atggcccaggccctgggcgaggacctggtgcagccccccgagctgcaggacgacagcagcagcctgggcagcgacagcgagctgagcggccccggcccctacagacaggccgacagatacggcttcatcggcggcagcagcgccgagcccggccccggccacccccccgccgacctgatcagacagagagagatgaagtgggtggagatgaccagccactgggagaagaccatgagcagaagatacaagaaggtgaagatgcagtgcagaaagggcatccccagcgccctgagagccagatgctggcccctgctgtgcggcgcccacgtgtgccagaagaacagccccggcacctaccaggagctggccgaggcccccggcgacccccagtggatggagaccatcggcagagacctgcacagacagttccccctgcacgagatgttcgtgagcccccagggccacggcagaggcagctgcagatgcagcagacccaccccctgcatcgacagaagcagagccaccgccagacccagaggcccctggctgctgtgctgcagctgcacctgcccccagagaagacccagcggcgcctggtgcagaagcgtgagaagcaccagcctgggcaccaccggccccacctggtgccagagcaccgtgccctgcggcgccgacaccggcgcccccggcgccggccactgcagagccgccagaggcctgccctggccccccggcgacaccggcagccccagcagccacccccccagagccgccgccggcggcggcctgcacgtgaccggcgcccagagaggcgccgtgagagccggccccgccgccggcgaccagggccccgccggccccgccgccagattcagagccggcacccccgcccccgccaccggcccccccagaagaggccccagccacctgtag

SEQ ID NO: 101924 - DNA, 1662 bp, synthetic construct
  misc_feature 1..1662: note = Description of Artificial Sequence: Synthetic coding sequence
  source 1..1662: mol_type = other DNA
atggacagccccggctacaactgcttcgtggacaaggacaagatggacgccgccatccaggacctgggccccaaggagctgagctgcaccgagctgcaggagctgaagcagctggccagacagggctactgggcccagagccacgccctgagaggcaaggtgtaccagagactgatcagagacatcccctgcagaaccgtgacccccgacgccagcgtgtacagcgacatcgtgggcaagatcgtgggcaagcacagcagcagctgcctgcccctgcccgagttcgtggacaacacccaggtgcccagctactgcctgaacgccagaggcgagggcgccgtgagaaagatcctgctgtgcctggccaaccagttccccgacatcagcttctgccccgccctgcccgccgtggtggccctgctgctgcactacagcatcgacgaggccgagtgcttcgagaaggcctgcagaatcctggcctgcaacgaccccggcagaagactgatcgaccagagcttcctggccttcgagagcagctgcatgaccttcggcgacctggtgaacaagtactgccaggccgcccacaagctgatggtggccgtgagcgaggacgtgctgcaggtgtacgccgactggcagagatggctgttcggcgagctgcccctgtgctacttcgccagagtgttcgacgtgttcctggtggagggctacaaggtgctgtacagagtggccctggccatcctgaagttcttccacaaggtgagagccggccagcccctggagagcgacagcgtgaagcaggacatcagaaccttcgtgagagacatcgccaagaccgtgagccccgagaagctgctggagaaggccttcgccatcagactgttcagcagaaaggagatccagctgctgcagatggccaacgagaaggccctgaagcagaagggcatcaccgtgaagcagaagagacagttcgtgcacctggccgtgcacgccgagaacttcagaagcgagatcgtgagcgtgagagagatgagagacatctggagctgggtgcccgagagattcgccctgtgccagcccctgctgctgttcagcagcctgcagcacggctacagcctggccagattctacttccagtgcgagggccacgagcccaccctgctgctgatcaagaccacccagaaggaggtgtgcggcgcctacctgagcaccgactggagcgagagaaacaagttcggcggcaagctgggcttcttcggcaccggcgagtgcttcgtgttcagactgcagcccgaggtgcagagatacgagtgggtggtgatcaagcaccccgagctgaccaagcccccccccctgatggccgccgagcccaccgcccccctgagccacagcgccagcagcgaccccgccgacagactgagccccttcctggccgccagacacttcaacctgcccagcaagaccgagagcatgttcatggccggcggcagcgactgcctgatcgtgggcggcggcggcggccaggccctgtacatcgacggcgacctgaacagaggcagaaccagccactgcgacaccttcaacaaccagcccctgtgcagcgagaacttcctgatcgccgccgtggaggcctggggcttccaggaccccgacacccagtag

SEQ ID NO: 101925 - DNA, 759 bp, synthetic construct
  misc_feature 1..759: note = Description of Artificial Sequence: Synthetic coding sequence
  source 1..759: mol_type = other DNA
atgggcgtgctgctgacccagagaaccctgctgagcctggtgctggccctgctgttccccagcatggccagcatggccgccatcggcagctgcagcaaggagtacagagtgctgctgggccagctgcagaagcagaccgacctgatgcaggacaccagcagactgctggacccctacatcagaatccagggcctggacgtgcccaagctgagagagcactgcagagagagacccggcgccttccccagcgaggagaccctgagaggcctgggcagaagaggcttcctgcagaccctgaacgccaccctgggctgcgtgctgcacagactggccgacctggagcagagactgcccaaggcccaggacctggagagaagcggcctgaacatcgaggacctggagaagctgcagatggccagacccaacatcctgggcctgagaaacaacatctactgcatggcccagctgctggacaacagcgacaccgccgagcccaccaaggccggcagaggcgccagccagccccccacccccacccccgccagcgacgccttccagagaaagctggagggctgcagattcctgcacggctaccacagattcatgcacagcgtgggcagagtgttcagcaagtggggcgagagccccaacagaagcagaagacacagcccccaccaggccctgagaaagggcgtgagaagaaccagacccagcagaaagggcaagagactgatgaccagaggccagctgcccagatag

SEQ ID NO: 101926 - DNA, 1263 bp, synthetic construct
  misc_feature 1..1263: note = Description of Artificial Sequence: Synthetic coding sequence
  source 1..1263: mol_type = other DNA
atgctgaacaactgggacaagtggatggccaagaagcacaagaagatcagactgagatgccagaagggcatcccccccagcctgagaggcagagcctggcagtacctgagcggcggcaaggtgaagctgcagcagaaccccggcaagttcgacgagctggacatgagccccggcgaccccaagtggctggacgtgatcgagagagacctgcacagacagttccccttccacgagatgttcgtgagcagaggcggccacggccagcaggacctgttcagagtgctgaaggcctacaccctgtacagacccgaggagggctactgccaggcccaggcccccatcgccgccgtgctgctgatgcacatgcccgccgagcaggccttctggtgcctggtgcagatctgcgagaagtacctgcccggctactacagcgagaagctggaggccatccagctggacggcgagatcctgttcagcctgctgcagaaggtgagccccgtggcccacaagcacctgagcagacagaagatcgaccccctgctgtacatgaccgagtggttcatgtgcgccttcagcagaaccctgccctggagcagcgtgctgagagtgtgggacatgttcttctgcgagggcgtgaagatcatcttcagagtgggcctggtgctgctgaagcacgccctgggcagccccgagaaggtgaaggcctgccagggccagtacgagaccatcgagagactgagaagcctgagccccaagatcatgcaggaggccttcctggtgcaggaggtggtggagctgcccgtgaccgagagacagatcgagagagagcacctgatccagctgagaagatggcaggagaccagaggcgagctgcagtgcagaagcccccccagactgcacggcgccaaggccatcctggacgccgagcccggccccagacccgccctgcagcccagccccagcatcagactgcccctggacgcccccctgcccggcagcaaggccaagcccaagccccccaagcaggcccagaaggagcagagaaagcagatgaagggcagaggccagctggagaagccccccgcccccaaccaggccatggtggtggccgccgccggcgacgcctgccccccccagcacgtgccccccaaggacagcgcccccaaggacagcgccccccaggacctggccccccaggtgagcgcccaccacagaagccaggagagcctgaccagccaggagagcgaggacacctacctgtag

SEQ ID NO: 101927 - DNA, 1548 bp, synthetic construct
  misc_feature 1..1548: note = Description of Artificial Sequence: Synthetic coding sequence
  source 1..1548: mol_type = other DNA
atggccaagagcaacggcgagaacggccccagagcccccgccgccggcgagagcctgagcggcaccagagagagcctggcccagggccccgacgccgccaccaccgacgagctgagcagcctgggcagcgacagcgaggccaacggcttcgccgagagaagaatcgacaagttcggcttcatcgtgggcagccagggcgccgagggcgccccctgccccctgctgcacagactggaggaggtgcccctggaggtgctgagacagagagagagcaagtggctggacatgctgaacaactgggacaagtggatggccaagaagcacaagaagatcagactgagatgccagaagggcatcccccccagcctgagaggcagagcctggcagtacctgagcggcggcaaggtgaagctgcagcagaaccccggcaagttcgacgagctggacatgagccccggcgaccccaagtggctggacgtgatcgagagagacctgcacagacagttccccttccacgagatgttcgtgagcagaggcggccacggccagcaggacctgttcagagtgctgaaggcctacaccctgtacagacccgaggagggctactgccaggcccaggcccccatcgccgccgtgctgctgatgcacatgcccgccgagcaggccttctggtgcctggtgcagatctgcgagaagtacctgcccggctactacagcgagaagctggaggccatccagctggacggcgagatcctgttcagcctgctgcagaaggtgagccccgtggcccacaagcacctgagcagacagaagatcgaccccctgctgtacatgaccgagtggttcatgtgcgccttcagcagaaccctgccctggagcagcgtgctgagagtgtgggacatgttcttctgcgagggcgtgaagatcatcttcagagtgggcctggtgctgctgaagcacgccctgggcagccccgagaaggtgaaggcctgccagggccagtacgagaccatcgagagactgagaagcctgagccccaagatcatgcaggaggccttcctggtgcaggaggtggtggagctgcccgtgaccgagagacagatcgagagagagcacctgatccagctgagaagatggcaggagaccagaggcgagctgcagtgcagaagcccccccagactgcacggcgccaaggccatcctggacgccgagcccggccccagacccgccctgcagcccagccccagcatcagactgcccctggacgcccccctgcccggcagcaaggccaagcccaagccccccaagcaggcccagaaggagcagagaaagcagatgaagggcagaggccagctggagaagccccccgcccccaaccaggccatggtggtggccgccgccggcgacgcctgccccccccagcacgtgccccccaaggacagcgcccccaaggacagcgccccccaggacctggccccccaggtgagcgcccaccacagaagccaggagagcctgaccagccaggagagcgaggacacctacctgtag

SEQ ID NO: 101928 - DNA, 2427 bp, synthetic construct
  misc_feature 1..2427: note = Description of Artificial Sequence: Synthetic coding sequence
  source 1..2427: mol_type = other DNA
atggagaccggcaccgcccccctggtggccccccccagaagacacggcgcccccgccgcccccagccccccccccagaggcagcagagccggccccgtggtggtggtggcccccggcccccccgtgaccaccgccaccagcgcccccgtgaccctggtggcccccggcgaggccagacccgcctgggtgcccggcagcgccgagaccagcgcccccgcccccgcccccgcccccgcccccgcccccgccgtgaccggcagcaccgtggtggtgctgaccctggaggccagccccgaggcccccaagccccagctgcccagcggccccgagagccccgagcccgccgccgtggccggcgtggagaccagcagagccctggccgccggcgccgacagccccaagaccgaggaggccagacccagccccgcccccggccccggcacccccaccggcacccccaccagaacccccagcagaaccgcccccggcgccctgaccgccaagccccccctggcccccaagcccggcaccaccgtggccagcggcgtgaccgccagaagcgccagcggccaggtgaccggcggccacggcgccgccgccgccaccagcgccagcgccggccaggcccccgaggaccccagcggccccggcaccggccccagcggcacctgcgaggcccccgtggccgtggtgaccgtgacccccgcccccgagcccgccgagaacagccaggacctgggcagcaccagcagcctgggccccggcatcagcggccccagaggccaggcccccgacaccctgagctacctggacagcgtgagcctgatgagcggcaccctggagagcctggccgacgacgtgagcagcatgggcagcgacagcgagatcaacggcctggccctgagaaagaccgacaagtacggcttcctgggcggcagccagtacagcggcagcctggagagcagcatccccgtggacgtggccagacagagagagctgaagtggctggacatgttcagcaactgggacaagtggctgagcagaagattccagaaggtgaagctgagatgcagaaagggcatccccagcagcctgagagccaaggcctggcagtacctgagcaacagcaaggagctgctggagcagaaccccggcaagttcgaggagctggagagagcccccggcgaccccaagtggctggacgtgatcgagaaggacctgcacagacagttccccttccacgagatgttcgccgccagaggcggccacggccagcaggacctgtacagaatcctgaaggcctacaccatctacagacccgacgagggctactgccaggcccaggcccccgtggccgccgtgctgctgatgcacatgcccgccgagcaggccttctggtgcctggtgcagatctgcgacaagtacctgcccggctactacagcgccggcctggaggccatccagctggacggcgagatcttcttcgccctgctgagaagagccagccccctggcccacagacacctgagaagacagagaatcgaccccgtgctgtacatgaccgagtggttcatgtgcatcttcgccagaaccctgccctgggccagcgtgctgagagtgtgggacatgttcttctgcgagggcgtgaagatcatcttcagagtggccctggtgctgctgagacacaccctgggcagcgtggagaagctgagaagctgccagggcatgtacgagaccatggagcagctgagaaacctgccccagcagtgcatgcaggaggacttcctggtgcacgaggtgaccaacctgcccgtgaccgaggccctgatcgagagagagaacgccgcccagctgaagaagtggagagagaccagaggcgagctgcagtacagacccagcagaagactgcacggcagcagagccatccacgaggagagaagaagacagcagccccccctgggccccagcagcagcctgctgagcctgcccggcctgaagagcagaggcagcagagccgccggcggcgcccccagcccccccccccccgtgagaagagccagcgccggccccgcccccggccccgtggtgaccgccgagggcctgcaccccagcctgcccagccccaccggcaacagcacccccctgggcagcagcaaggagaccagaaagcaggagaaggagagacagaagcaggagaaggagagacagaagcaggagaaggagagagagaaggagagacagaagcaggagaaggagagagagaagcaggagaaggagagagagaagcaggagaaggagagacagaagcaggagaagaaggcccagggcagaaagctgagcctgagaagaaaggccgacggcccccccggcccccacgacggcggcgacagacccagcgccgaggccagacaggacgcctacttctag

SEQ ID NO: 101929 - DNA, 1341 bp, synthetic construct
  misc_feature 1..1341: note = Description of Artificial Sequence: Synthetic coding sequence
  source 1..1341: mol_type = other DNA
atggcccaggccctgggcgaggacctggtgcagccccccgagctgcaggacgacagcagcagcctgggcagcgacagcgagctgagcggccccggcccctacagacaggccgacagatacggcttcatcggcggcagcagcgccgagcccggccccggccacccccccgccgacctgatcagacagagagagatgaagtgggtggagatgaccagccactgggagaagaccatgagcagaagatacaagaaggtgaagatgcagtgcagaaagggcatccccagcgccctgagagccagatgctggcccctgctgtgcggcgcccacgtgtgccagaagaacagccccggcacctaccaggagctggccgaggcccccggcgacccccagtggatggagaccatcggcagagacctgcacagacagttccccctgcacgagatgttcgtgagcccccagggccacggccagcagggcctgctgcaggtgctgaaggcctacaccctgtacagacccgagcagggctactgccaggcccagggccccgtggccgccgtgctgctgatgcacctgccccccgaggaggccttctggtgcctggtgcagatctgcgaggtgtacctgcccggctactacggcccccacatggaggccgtgagactggacgccgaggtgttcatggccctgctgagaagactgctgccccacgtgcacaagcacctgcagcaggtgggcgtgggccccctgctgtacctgcccgagtggttcctgtgcctgttcgccagaagcctgcccttccccaccgtgctgagagtgtgggacgccttcctgagcgagggcgccagagtgctgttcagagtgggcctgaccctggtgagactggccctgggcaccgccgagcagagaggcgcctgccccggcctgctggagaccctgggcgccctgagagccatcccccccgcccagctgcaggaggaggccttcatgagccaggtgcacagcgtggtgctgagcgagagagacctgcagagagagatcaaggcccagctggcccagctgcccgacagcgcccccggccccccccccagaccccaggtgagactggccggcgcccaggccatcttcgaggcccagcagctggccggcgtgagaagaggcgccaagcccgaggtgcccagaatcgtggtgcagccccccgaggagcccagaccccccagaagaaagccccagaccagaggcaagaccttccacggcctgctgaccagagccagaggcccccccatcgagggcccccccagaccccagagaggcagcaccagcttcctggacaccagattctag

SEQ ID NO: 101930 - DNA, 1341 bp, synthetic construct; identical to SEQ ID NO: 101929
  misc_feature 1..1341: note = Description of Artificial Sequence: Synthetic coding sequence
  source 1..1341: mol_type = other DNA

SEQ ID NO: 101931 - DNA, 2049 bp, synthetic construct
  misc_feature 1..2049: note = Description of Artificial Sequence: Synthetic coding sequence
  source 1..2049: mol_type = other DNA
atgtgccccggcctgtacccctacagcagcctgctggagtacggcagaagcatgatcatctacgagcaggagggcgtgtacatccacagcagctgcggcaagaccaacgaccaggacggcctgatcagcggcatcctgagagtgctggagaaggacgccgaggtgatcgtggactggagacccctggacgacgccctggacagcagcagcatcctgtacgccagaaaggacagcagcagcgtggtggagtggacccaggcccccaaggagagaggccacagaggcagcgagcacctgaacagctacgaggccgagtgggacatggtgaacaccgtgagcttcaagagaaagccccacaccaacggcgacgcccccagccacagaaacggcaagagcaagtggagcttcctgttcagcctgaccgacctgaagagcatcaagcagaacaaggagggcatgggctggagctacctggtgttctgcctgaaggacgacgtggtgctgcccgccctgcacttccaccagggcgacagcaagctgctgatcgagagcctggagaagtacgtggtgctgtgcgagagcccccaggacaagagaaccctgctggtgaactgccagaacaagagcctgagccagagcttcgagaacctgctggacgagcccgcctacggcctgatccagaagatcaagaaggacccctacaccgccaccatgatcggcttcagcaaggtgaccaactacatcttcgacagcctgagaggcagcgaccccagcacccaccagagaccccccagcgagatggccgacttcctgagcgacgccatccccggcctgaagatcaaccagcaggaggagcccggcttcgaggtgatcaccagaatcgacctgggcgagagacccgtggtgcagagaagagagcccgtgagcctggaggagtggaccaagaacatcgacagcgagggcagaatcctgaacgtggacaacatgaagcagatgatcttcagaggcggcctgagccacgccctgagaaagcaggcctggaagttcctgctgggctacttcccctgggacagcaccaaggaggagagaacccagctgcagaagcagaagaccgacgagtacttcagaatgaagctgcagtggaagagcatcagccaggagcaggagaagagaaacagcagactgagagactacagaagcctgatcgagaaggacgtgaacagaaccgacagaaccaacaagttctacgagggccaggacaaccccggcctgatcctgctgcacgacatcctgatgacctactgcatgtacgacttcgacctgggctacgtgcagggcatgagcgacctgctgagccccctgctgtacgtgatggagaacgaggtggacgccttctggtgcttcgccagctacatggaccagatgcaccagaacttcgaggagcagatgcagggcatgaagacccagctgatccagctgagcaccctgctgagactgctggacagcggcttctgcagctacctggagagccaggacagcggctacctgtacttctgcttcagatggctgctgatcagattcaagagagagttcagcttcctggacatcctgagactgtgggaggtgatgtggaccgagctgccctgcaccaacttccacctgctgctgtgctgcgccatcctggagagcgagaagcagcagatcatggagaagcactacggcttcaacgagatcctgaagcacatcaacgagctgagcatgaagatcgacgtggaggacatcctgtgcaaggccgaggccatcagcctgcagatggtgaagtgcaaggagctgccccaggccgtgtgcgagatcctgggcctgcagggcagcgaggtgaccacccccgacagcgacgtgggcgaggacgagaacgtggtgatgaccccctgccccaccagcgccttccagagcaacgccctgcccaccctgagcgccagcggcgccagaaacgacagccccacccagatccccgtgagcagcgacgtgtgcagactgacccccgcctag

SEQ ID NO: 101932 - DNA, 1338 bp, synthetic construct
  misc_feature 1..1338: note = Description of Artificial Sequence: Synthetic coding sequence
  source 1..1338: mol_type = other DNA
atgatcggcttcagcaaggtgaccaactacatcttcgacagcctgagaggcagcgaccccagcacccaccagagaccccccagcgagatggccgacttcctgagcgacgccatccccggcctgaagatcaaccagcaggaggagcccggcttcgaggtgatcaccagaatcgacctgggcgagagacccgtggtgcagagaagagagcccgtgagcctggaggagtggaccaagaacatcgacagcgagggcagaatcctgaacgtggacaacatgaagcagatgatcttcagaggcggcctgagccacgccctgagaaagcaggcctggaagttcctgctgggctacttcccctgggacagcaccaaggaggagagaacccagctgcagaagcagaagaccgacgagtacttcagaatgaagctgcagtggaagagcatcagccaggagcaggagaagagaaacagcagactgagagactacagaagcctgatcgagaaggacgtgaacagaaccgacagaaccaacaagttctacgagggccaggacaaccccggcctgatcctgctgcacgacatcctgatgacctactgcatgtacgacttcgacctgggctacgtgcagggcatgagcgacctgctgagccccctgctgtacgtgatggagaacgaggtggacgccttctggtgcttcgccagctacatggaccagatgcaccagaacttcgaggagcagatgcagggcatgaagacccagctgatccagctgagcaccctgctgagactgctggacagcggcttctgcagctacctggagagccaggacagcggctacctgtacttctgcttcagatggctgctgatcagattcaagagagagttcagcttcctggacatcctgagactgtgggaggtgatgtggaccgagctgccctgcaccaacttccacctgctgctgtgctgcgccatcctggagagcgagaagcagcagatcatggagaagcactacggcttcaacgagatcctgaagcacatcaacgagctgagcatgaagatcgacgtggaggacatcctgtgcaaggccgaggccatcagcctgcagatggtgaagtgcaaggagctgccccaggccgtgtgcgagatcctgggcctgcagggcagcgaggtgaccacccccgacagcgacgtgggcgaggacgagaacgtggtgatgaccccctgccccaccagcgccttccagagcaacgccctgcccaccctgagcgccagcggcgccagaaacgacagccccacccagatccccgtgagcagcgacgtgtgcagactgacccccgcctag

SEQ ID NO: 101933 - DNA, 2025 bp, synthetic construct
  misc_feature 1..2025: note = Description of Artificial Sequence: Synthetic coding sequence
  source 1..2025: mol_type = other DNA
atggccgccgccggcgtggtgagcggcaagatcatctacgagcaggagggcgtgtacatccacagcagctgcggcaagaccaacgaccaggacggcctgatcagcggcatcctgagagtgctggagaaggacgccgaggtgatcgtggactggagacccctggacgacgccctggacagcagcagcatcctgtacgccagaaaggacagcagcagcgtggtggagtggacccaggcccccaaggagagaggccacagaggcagcgagcacctgaacagctacgaggccgagtgggacatggtgaacaccgtgagcttcaagagaaagccccacaccaacggcgacgcccccagccacagaaacggcaagagcaagtggagcttcctgttcagcctgaccgacctgaagagcatcaagcagaacaaggagggcatgggctggagctacctggtgttctgcctgaaggacgacgtggtgctgcccgccctgcacttccaccagggcgacagcaagctgctgatcgagagcctggagaagtacgtggtgctgtgcgagagcccccaggacaagagaaccctgctggtgaactgccagaacaagagcctgagccagagcttcgagaacctgctggacgagcccgcctacggcctgatccagaagatcaagaaggacccctacaccgccaccatgatcggcttcagcaaggtgaccaactacatcttcgacagcctgagaggcagcgaccccagcacccaccagagaccccccagcgagatggccgacttcctgagcgacgccatccccggcctgaagatcaaccagcaggaggagcccggcttcgaggtgatcaccagaatcgacctgggcgagagacccgtggtgcagagaagagagcccgtgagcctggaggagtggaccaagaacatcgacagcgagggcagaatcctgaacgtggacaacatgaagcagatgatcttcagaggcggcctgagccacgccctgagaaagcaggcctggaagttcctgctgggctacttcccctgggacagcaccaaggaggagagaacccagctgcagaagcagaagaccgacgagtacttcagaatgaagctgcagtggaagagcatcagccaggagcaggagaagagaaacagcagactgagagactacagaagcctgatcgagaaggacgtgaacagaaccgacagaaccaacaagttctacgagggccaggacaaccccggcctgatcctgctgcacgacatcctgatgacctactgcatgtacgacttcgacctgggctacgtgcagggcatgagcgacctgctgagccccctgctgtacgtgatggagaacgaggtggacgccttctggtgcttcgccagctacatggaccagatgcaccagaacttcgaggagcagatgcagggcatgaagacccagctgatccagctgagcaccctgctgagactgctggacagcggcttctgcagctacctggagagccaggacagcggctacctgtacttctgcttcagatggctgctgatcagattcaagagagagttcagcttcctggacatcctgagactgtgggaggtgatgtggaccgagctgccctgcaccaacttccacctgctgctgtgctgcgccatcctggagagcgagaagcagcagatcatggagaagcactacggcttcaacgagatcctgaagcacatcaacgagctgagcatgaagatcgacgtggaggacatcctgtgcaaggccgaggccatcagcctgcagatggtgaagtgcaaggagctgccccaggccgtgtgcgagatcctgggcctgcagggcagcgaggtgaccacccccgacagcgacgtgggcgaggacgagaacgtggtgatgaccccctgccccaccagcgccttccagagcaacgccctgcccaccctgagcgccagcggcgccagaaacgacagccccacccagatccccgtgagcagcgacgtgtgcagactgacccccgcctag

SEQ ID NO: 101934 - DNA, 2076 bp, synthetic construct
  misc_feature 1..2076: note = Description of Artificial Sequence: Synthetic coding sequence
  source 1..2076: mol_type = other DNA
atggccgccgccggcgtggtgagcggcaagatcatctacgagcaggagggcgtgtacatccacagcagctgcggcaagaccaacgaccaggacggcctgatcagcggcatcctgagagtgctggagaaggacgccgaggtgatcgtggactggagacccctggacgacgccctggacagcagcagcatcctgtacgccagaaaggacagcagcagcgtggtggagtggacccaggcccccaaggagagaggccacagaggcagcgagcacctgaacagctacgaggccgagtgggacatggtgaacaccgtgagcttcaagagaaagccccacaccaacggcgacgcccccagccacagaaacggcaagagcaagtggagcttcctgttcagcctgaccgacctgaagagcatcaagcagaacaaggagggcatgggctggagctacctggtgttctgcctgaaggacgacgtggtgctgcccgccctgcacttccaccagggcgacagcaagctgctgatcgagagcctggagaagtacgtggtgctgtgcgagagcccccaggacaagagaaccctgctggtgaactgccagaacaagagcctgagccagagcttcgagaacctgctggacgagcccgcctacggcctgatccaggccggcctgctggacagaagaaagctgctgtgggccatccaccactggaagaagatcaagaaggacccctacaccgccaccatgatcggcttcagcaaggtgaccaactacatcttcgacagcctgagaggcagcgaccccagcacccaccagagaccccccagcgagatggccgacttcctgagcgacgccatccccggcctgaagatcaaccagcaggaggagcccggcttcgaggtgatcaccagaatcgacctgggcgagagacccgtggtgcagagaagagagcccgtgagcctggaggagtggaccaagaacatcgacagcgagggcagaatcctgaacgtggacaacatgaagcagatgatcttcagaggcggcctgagccacgccctgagaaagcaggcctggaagttcctgctgggctacttcccctgggacagcaccaaggaggagagaacccagctgcagaagcagaagaccgacgagtacttcagaatgaagctgcagtggaagagcatcagccaggagcaggagaagagaaacagcagactgagagactacagaagcctgatcgagaaggacgtgaacagaaccgacagaaccaacaagttctacgagggccaggacaaccccggcctgatcctgctgcacgacatcctgatgacctactgcatgtacgacttcgacctgggctacgtgcagggcatgagcgacctgctgagccccctgctgtacgtgatggagaacgaggtggacgccttctggtgcttcgccagctacatggaccagatgcaccagaacttcgaggagcagatgcagggcatgaagacccagctgatccagctgagcaccctgctgagactgctggacagcggcttctgcagctacctggagagccaggacagcggctacctgtacttctgcttcagatggctgctgatcagattcaagagagagttcagcttcctggacatcctgagactgtgggaggtgatgtggaccgagctgccctgcaccaacttccacctgctgctgtgctgcgccatcctggagagcgagaagcagcagatcatggagaagcactacggcttcaacgagatcctgaagcacatcaacgagctgagcatgaagatcgacgtggaggacatcctgtgcaaggccgaggccatcagcctgcagatggtgaagtgcaaggagctgccccaggccgtgtgcgagatcctgggcctgcagggcagcgaggtgaccacccccgacagcgacgtgggcgaggacgagaacgtggtgatgaccccctgccccaccagcgccttccagagcaacgccctgcccaccctgagcgccagcggcgccagaaacgacagccccacccagatccccgtgagcagcgacgtgtgcagactgacccccgcctag

SEQ ID NO: 101935 - DNA, 2133 bp, synthetic construct
  misc_feature 1..2133: note = Description of Artificial Sequence: Synthetic coding sequence
  source 1..2133: mol_type = other DNA
atgcacaacatcagaggcaacaagcaggcccagggcaccggccacgagccccccggcgaggacagcccccagagcggcgagccccagagagaggagcagcccctggccagcgacgccagcacccccggcagagagcccgaggacagccccaagcccgcccccaagcccagcctgaccatcagcttcgcccagaaggccaagagacagaacaacaccttccccttcttcagcgagggcatcaccagaaacagaaccgcccaggagaaggtggccgccctggagcagcaggtgctgatgctgaccaaggagctgaagagccagaaggagctggtgaagatcctgcacaaggccctggaggccgcccagcaggagaagagagccagcagcgcctacctggccgccgccgaggacaaggacagactggagctggtgagacacaaggtgagacagatcgccgagctgggcagaagagtggaggccctggagcaggagagagagagcctggcccacaccgccagcctgagagagcagcaggtgcaggagctgcagcagcacgtgcagctgctgatggacaagaaccacgccaagcagcaggtgatctgcaagctgagcgagaaggtgacccaggacttcacccacccccccgaccagagccccctgagacccgacgccgccaacagagacttcctgagccagcagggcaagatcgagcacctgaaggacgacatggaggcctacagaacccagaactgcttcctgaacagcgagatccaccaggtgaccaagatctggagaaaggtggccgagaaggagaaggccctgctgaccaagtgcgcctacctgcaggccagaaactgccaggtggagagcaagtacctggccggcctgagaagactgcaggaggccctgggcgacgaggccagcgagtgcagcgagctgctgagacagctggtgcaggaggccctgcagtgggaggccggcgaggccagcagcgacagcatcgagctgagccccatcagcaagtacgacgagtacggcttcctgaccgtgcccgactacgaggtggaggacctgaagctgctggccaagatccaggccctggagagcagaagccaccacctgctgggcctggaggccgtggacagacccctgagagagagatgggccgccctgggcgacctggtgcccagcgccgagctgaagcagctgctgagagccggcgtgcccagagagcacagacccagagtgtggagatggctggtgcacctgagagtgcagcacctgcacacccccggctgctaccaggagctgctgagcagaggccaggccagagagcaccccgccgccagacagatcgagctggacctgaacagaaccttccccaacaacaagcacttcacctgccccaccagcagcttccccgacaagctgagaagagtgctgctggccttcagctggcagaaccccaccatcggctactgccagggcctgaacagactggccgccatcgccctgctggtgctggaggaggaggagagcgccttctggtgcctggtggccatcgtggagaccatcatgcccgccgactactactgcaacaccctgaccgccagccaggtggaccagagagtgctgcaggacctgctgagcgagaagctgcccagactgatggcccacctgggccagcaccacgtggacctgagcctggtgaccttcaactggttcctggtggtgttcgccgacagcctgatcagcaacatcctgctgagagtgtgggacgccttcctgtacgagggcaccaaggtggtgttcagatacgccctggccatcttcaagtacaacgagaaggagatcctgagactgcagaacggcctggagatctaccagtacctgagattcttcaccaagaccatcagcaacagcagaaagctgatgaacatcgccttcaacgacatgaaccccttcagaatgaagcagctgagacagctgagaatggtgcacagagagagactggaggccgagctgagagagctggagcagctgaaggccgagtacctggagagaagagccagcagaagaagagccgtgagcgagggctgcgccagcgaggacgaggtggagggcgaggcctag

SEQ ID NO: 101936 - DNA, 1407 bp, synthetic construct
  misc_feature 1..1407: note = Description of Artificial Sequence: Synthetic coding sequence
  source 1..1407: mol_type = other DNA
atggaggcctacagaacccagaactgcttcctgaacagcgagatccaccaggtgaccaagatctggagaaaggtggccgagaaggagaaggccctgctgaccaagtgcgcctacctgcaggccagaaactgccaggtggagagcaagtacctggccggcctgagaagactgcaggaggccctgggcgacgaggccagcgagtgcagcgagctgctgagacagctggtgcaggaggccctgcagtgggaggccggcgaggccagcagcgacagcatcgagctgagccccatcagcaagtacgacgagtacggcttcctgaccgtgcccgactacgaggtggaggacctgaagctgctggccaagatccaggccctggagagcagaagccaccacctgctgggcctggaggccgtggacagacccctgagagagagatgggccgccctgggcgacctggtgcccagcgccgagctgaagcagctgctgagagccggcgtgcccagagagcacagacccagagtgtggagatggctggtgcacctgagagtgcagcacctgcacacccccggctgctaccaggagctgctgagcagaggccaggccagagagcaccccgccgccagacagatcgagctggacctgaacagaaccttccccaacaacaagcacttcacctgccccaccagcagcttccccgacaagctgagaagagtgctgctggccttcagctggcagaaccccaccatcggctactgccagggcctgaacagactggccgccatcgccctgctggtgctggaggaggaggagagcgccttctggtgcctggtggccatcgtggagaccatcatgcccgccgactactactgcaacaccctgaccgccagccaggtggaccagagagtgctgcaggacctgctgagcgagaagctgcccagactgatggcccacctgggccagcaccacgtggacctgagcctggtgaccttcaactggttcctggtggtgttcgccgacagcctgatcagcaacatcctgctgagagtgtgggacgccttcctgtacgagggcaccaaggtggtgttcagatacgccctggccatcttcaagtacaacgagaaggagatcctgagactgcagaacggcctggagatctaccagtacctgagattcttcaccaagaccatcagcaacagcagaaagctgatgaacatcgccttcaacgacatgaaccccttcagaatgaagcagctgagacagctgagaatggtgcacagagagagactggaggccgagctgagagagctggagcagctgaaggccgagtacctggagagaagagccagcagaagaagagccgtgagcgagggctgcgccagcgaggacgaggtggagggcgaggcctag

SEQ ID NO: 101937 - DNA, 2583 bp, synthetic construct
  misc_feature 1..2583: note = Description of Artificial Sequence: Synthetic coding sequence
  source 1..2583: mol_type = other DNA
atggagggcgccggcgagaacgcccccgagagcagcagcagcgcccccggcagcgaggagagcgccagagacccccaggtgcccccccccgaggaggagagcggcgactgcgccagaagcctggaggccgtgcccaagaagctgtgcggctacctgagcaagttcggcggcaagggccccatcagaggctggaagagcagatggttcttctacgacgagagaaagtgccagctgtactacagcagaaccgcccaggacgccaaccccctggacagcatcgacctgagcagcgccgtgttcgactgcaaggccgacgccgaggagggcatcttcgagatcaagacccccagcagagtgatcaccctgaaggccgccaccaagcaggccatgctgtactggctgcagcagctgcagatgaagagatgggagttccacaacagcccccccgccccccccgccacccccgacgccgccctggccggcaacggccccgtgctgcacctggagctgggccaggaggaggccgagctggaggagttcctgtgccccgtgaagaccccccccggcctggtgggcgtggccgccgccctgcagcccttccccgccctgcagaacatcagcctgaagcacctgggcaccgagatccagaacaccatgcacaacatcagaggcaacaagcaggcccagggcaccggccacgagccccccggcgaggacagcccccagagcggcgagccccagagagaggagcagcccctggccagcgacgccagcacccccggcagagagcccgaggacagccccaagcccgcccccaagcccagcctgaccatcagcttcgcccagaaggccaagagacagaacaacaccttccccttcttcagcgagggcatcaccagaaacagaaccgcccaggagaaggtggccgccctggagcagcaggtgctgatgctgaccaaggagctgaagagccagaaggagctggtgaagatcctgcacaaggccctggaggccgcccagcaggagaagagagccagcagcgcctacctggccgccgccgaggacaaggacagactggagctggtgagacacaaggtgagacagatcgccgagctgggcagaagagtggaggccctggagcaggagagagagagcctggcccacaccgccagcctgagagagcagcaggtgcaggagctgcagcagcacgtgcagctgctgatggacaagaaccacgccaagcagcaggtgatctgcaagctgagcgagaaggtgacccaggacttcacccacccccccgaccagagccccctgagacccgacgccgccaacagagacttcctgagccagcagggcaagatcgagcacctgaaggacgacatggaggcctacagaacccagaactgcttcctgaacagcgagatccaccaggtgaccaagatctggagaaaggtggccgagaaggagaaggccctgctgaccaagtgcgcctacctgcaggccagaaactgccaggtggagagcaagtacctggccggcctgagaagactgcaggaggccctgggcgacgaggccagcgagtgcagcgagctgctgagacagctggtgcaggaggccctgcagtgggaggccggcgaggccagcagcgacagcatcgagctgagccccatcagcaagtacgacgagtacggcttcctgaccgtgcccgactacgaggtggaggacctgaagctgctggccaagatccaggccctggagagcagaagccaccacctgctgggcctggaggccgtggacagacccctgagagagagatgggccgccctgggcgacctggtgcccagcgccgagctgaagcagctgctgagagccggcgtgcccagagagcacagacccagagtgtggagatggctggtgcacctgagagtgcagcacctgcacacccccggctgctaccaggagctgctgagcagaggccaggccagagagcaccccgccgccagacagatcgagctggacctgaacagaaccttccccaacaacaagcacttcacctgccccaccagcagcttccccgacaagctgagaagagtgctgctggccttcagctggcagaaccccaccatcggctactgccagggcctgaacagactggccgccatcgccctgctggtgctggaggaggaggagagcgccttctggtgcctggtggccatcgtggagaccatcatgcccgccgactactactgcaacaccctgaccgccagccaggtggaccagagagtgctgcaggacctgctgagcgagaagctgcccagactgatggcccacctgggccagcaccacgtggacctgagcctggtgaccttcaactggttcctggtggtgttcgccgacagcctgatcagcaacatcctgctgagagtgtgggacgccttcctgtacgagggcaccaaggtggtgttcagatacgccctggccatcttcaagtacaacgagaaggagatcctgagactgcagaacggcctggagatctaccagtacctgagattcttcaccaagaccatcagcaacagcagatag

SEQ ID NO: 101938 - DNA, 2754 bp, synthetic construct
  misc_feature 1..2754: note = Description of Artificial Sequence: Synthetic coding sequence
  source 1..2754: mol_type = other DNA
atggagggcgccggcgagaacgcccccgagagcagcagcagcgcccccggcagcgaggagagcgccagagacccccaggtgcccccccccgaggaggagagcggcgactgcgccagaagcctggaggccgtgcccaagaagctgtgcggctacctgagcaagttcggcggcaagggccccatcagaggctggaagagcagatggttcttctacgacgagagaaagtgccagctgtactacagcagaaccgcccaggacgccaaccccctggacagcatcgacctgagcagcgccgtgttcgactgcaaggccgacgccgaggagggcatcttcgagatcaagacccccagcagagtgatcaccctgaaggccgccaccaagcaggccatgctgtactggctgcagcagctgcagatgaagagatgggagttccacaacagcccccccgccccccccgccacccccgacgccgccctggccggcaacggccccgtgctgcacctggagctgggccaggaggaggccgagctggaggagttcctgtgccccgtgaagaccccccccggcctggtgggcgtggccgccgccctgcagcccttccccgccctgcagaacatcagcctgaagcacctgggcaccgagatccagaacaccatgcacaacatcagaggcaacaagcaggcccagggcaccggccacgagccccccggcgaggacagcccccagagcggcgagccccagagagaggagcagcccctggccagcgacgccagcacccccggcagagagcccgaggacagccccaagcccgcccccaagcccagcctgaccatcagcttcgcccagaaggccaagagacagaacaacaccttccccttcttcagcgagggcatcaccagaaacagaaccgcccaggagaaggtggccgccctggagcagcaggtgctgatgctgaccaaggagctgaagagccagaaggagctggtgaagatcctgcacaaggccctggaggccgcccagcaggagaagagagccagcagcgcctacctggccgccgccgaggacaaggacagactggagctggtgagacacaaggtgagacagatcgccgagctgggcagaagagtggaggccctggagcaggagagagagagcctggcccacaccgccagcctgagagagcagcaggtgcaggagctgcagcagcacgtgcagctgctgatggacaagaaccacgccaagcagcaggtgatctgcaagctgagcgagaaggtgacccaggacttcacccacccccccgaccagagccccctgagacccgacgccgccaacagagacttcctgagccagcagggcaagatcgagcacctgaaggacgacatggaggcctacagaacccagaactgcttcctgaacagcgagatccaccaggtgaccaagatctggagaaaggtggccgagaaggagaaggccctgctgaccaagtgcgcctacctgcaggccagaaactgccaggtggagagcaagtacctggccggcctgagaagactgcaggaggccctgggcgacgaggccagcgagtgcagcgagctgctgagacagctggtgcaggaggccctgcagtgggaggccggcgaggccagcagcgacagcatcgagctgagccccatcagcaagtacgacgagtacggcttcctgaccgtgcccgactacgaggtggaggacctgaagctgctggccaagatccaggccctggagagcagaagccaccacctgctgggcctggaggccgtggacagacccctgagagagagatgggccgccctgggcgacctggtgcccagcgccgagctgaagcagctgctgagagccggcgtgcccagagagcacagacccagagtgtggagatggctggtgcacctgagagtgcagcacctgcacacccccggctgctaccaggagctgctgagcagaggccaggccagagagcaccccgccgccagacagatcgagctggacctgaacagaaccttccccaacaacaagcacttcacctgccccaccagcagcttccccgacaagctgagaagagtgctgctggccttcagctggcagaaccccaccatcggctactgccagggcctgaacagactggccgccatcgccctgctggtgctggaggaggaggagagcgccttctggtgcctggtggccatcgtggagaccatcatgcccgccgactactactgcaacaccctgaccgccagccaggtggaccagagagtgctgcaggacctgctgagcgagaagctgcccagactgatggcccacctgggccagcaccacgtggacctgagcctggtgaccttcaactggttcctggtggtgttcgccgacagcctgatcagcaacatcctgctgagagtgtgggacgccttcctgtacgagggcaccaagtacaacgagaaggagatcctgagactgcagaacggcctggagatctaccagtacctgagattcttcaccaagaccatcagcaacagcagaaagctgatgaacatcgccttcaacgacatgaaccccttcagaatgaagcagctgagacagctgagaatggtgcacagagagagactggaggccgagctgagagagctggagcagctgaaggccgagtacctggagagaagagccagcagaagaagagccgtgagcgagggctgcgccagcgaggacgaggtggagggcgaggcctag

SEQ ID NO: 101939 - DNA, 1287 bp, synthetic construct
  misc_feature 1..1287: note = Description of Artificial Sequence: Synthetic coding sequence
  source 1..1287: mol_type = other DNA
atgcccagcggctgctacgtgcccagaagcgagcccagactgctgcccgcccccccccccgccggcgccagagtgggcgccctgagaagcgcccagggcgacggccccaccagcggccactgggacggcggcgccgagaaggccgacttcaacgccaagagaaagaagaaggtggccgagatccaccaggccctgaacagcgaccccaccgacgtggccgccctgagaagaatggccatcagcgagggcggcctgctgaccgacgagatcagaagaaaggtgtggcccaagctgctgaacgtgaacgccaacgaccccccccccatcagcggcaagaacctgagacagatgagcaaggactaccagcaggtgctgctggacgtgagaagaagcctgagaagattcccccccggcatgcccgaggagcagagagagggcctgcaggaggagctgatcgacatcatcctgctgatcctggagagaaacccccagctgcactactaccagggctaccacgacatcgtggtgaccttcctgctggtggtgggcgagagactggccaccagcctggtggagaagctgagcacccaccacctgagagacttcatggaccccaccatggacaacaccaagcacatcctgaactacctgatgcccatcatcgaccaggtgaaccccgagctgcacgacttcatgcagagcgccgaggtgggcaccatcttcgccctgagctggctgatcacctggttcggccacgtgctgagcgacttcagacacgtggtgagactgtacgacttcttcctggcctgccaccccctgatgcccatctacttcgccgccgtgatcgtgctgtacagagagcaggaggtgctggactgcgactgcgacatggccagcgtgcaccacctgctgagccagatcccccaggacctgccctacgagaccctgatcagcagagccggcgacctgttcgtgcagttcccccccagcgagctggccagagaggccgccgcccagcagcaggccgagagaaccgccgccagcaccttcaaggacttcgagctggccagcgcccagcagagacccgacatggtgctgagacagagattcagaggcctgctgagacccgaggacagaaccaaggacgtgctgaccaagcccagaaccaacagattcgtgaagctggccgtgatgggcctgaccgtggccctgggcgccgccgccctggccgtggtgaagagcgccctggagtgggcccccaagttccagctgcagctgttcccctag

SEQ ID NO: 101940 - DNA, 1212 bp, synthetic construct
  misc_feature 1..1212: note = Description of Artificial Sequence: Synthetic coding sequence
  source 1..1212: mol_type = other DNA
atggccctgagaagcgcccagggcgacggccccaccagcggccactgggacggcggcgccgagaaggccgacttcaacgccaagagaaagaagaaggtggccgagatccaccaggccctgaacagcgaccccaccgacgtggccgccctgagaagaatggccatcagcgagggcggcctgctgaccgacgagatcagaagaaaggtgtggcccaagctgctgaacgtgaacgccaacgaccccccccccatcagcggcaagaacctgagacagatgagcaaggactaccagcaggtgctgctggacgtgagaagaagcctgagaagattcccccccggcatgcccgaggagcagagagagggcctgcaggaggagctgatcgacatcatcctgctgatcctggagagaaacccccagctgcactactaccagggctaccacgacatcgtggtgaccttcctgctggtggtgggcgagagactggccaccagcctggtggagaagctgagcacccaccacctgagagacttcatggaccccaccatggacaacaccaagcacatcctgaactacctgatgcccatcatcgaccaggtgaaccccgagctgcacgacttcatgcagagcgccgaggtgggcaccatcttcgccctgagctggctgatcacctggttcggccacgtgctgagcgacttcagacacgtggtgagactgtacgacttcttcctggcctgccaccccctgatgcccatctacttcgccgccgtgatcgtgctgtacagagagcaggaggtgctggactgcgactgcgacatggccagcgtgcaccacctgctgagccagatcccccaggacctgccctacgagaccctgatcagcagagccggcgacctgttcgtgcagttcccccccagcgagctggccagagaggccgccgcccagcagcaggccgagagaaccgccgccagcaccttcaaggacttcgagctggccagcgcccagcagagacccgacatggtgctgagacagagattcagaggcctgctgagacccgaggacagaaccaaggacgtgctgaccaagcccagaaccaacagattcgtgaagctggccgtgatgggcctgaccgtggccctgggcgccgccgccctggccgtggtgaagagcgccctggagtgggcccccaagttccagctgcagctgttcccctag

SEQ ID NO: 101941 - DNA, 1212 bp, synthetic construct; identical to SEQ ID NO: 101940
  misc_feature 1..1212: note = Description of Artificial Sequence: Synthetic coding sequence
  source 1..1212: mol_type = other DNA

SEQ ID NO: 101942 - DNA, 1662 bp, synthetic construct; identical to SEQ ID NO: 101924
  misc_feature 1..1662: note = Description of Artificial Sequence: Synthetic coding sequence
  source 1..1662: mol_type = other DNA

SEQ ID NO: 101943 - DNA, 1680 bp, synthetic construct
  misc_feature 1..1680: note = Description of Artificial Sequence: Synthetic coding sequence
  source 1..1680: mol_type = other DNA
atggacagccccggctacaactgcttcgtggacaaggacaagatggacgccgccatccaggacctgggccccaaggagctgagctgcaccgagctgcaggagctgaagcagctggccagacagggctactgggcccagagccacgccctgagaggcaaggtgtaccagagactgatcagagacatcccctgcagaaccgtgacccccgacgccagcgtgtacagcgacatcgtgggcaagatcgtgggcaagcacagcagcagctgcctgcccctgcccgagttcgtggacaacacccaggtgcccagctactgcctgaacgccagaggcgagggcgccgtgagaaagatcctgctgtgcctggccaaccagttccccgacatcagcttctgccccgccctgcccgccgtggtggccctgctgctgcactacagcatcgacgaggccgagtgcttcgagaaggcctgcagaatcctggcctgcaacgaccccggcagaagactgatcgaccagagcttcctggccttcgagagcagctgcatgaccttcggcgacctggtgaacaagtactgccaggccgcccacaagctgatggtggccgtgagcgaggacgtgctgcaggtgtacgccgactggcagagatggctgttcggcgagctgcccctgtgctacttcgccagagtgttcgacgtgttcctggtggagggctacaaggtgctgtacagagtggccctggccatcctgaagttcttccacaaggtgagagccggccagcccctggagagcgacagcgtgaagcaggacatcagaaccttcgtgagagacatcgccaagaccgtgagccccgagaagctgctggagaaggccttcgccatcagactgttcagcagaaaggagatccagctgctgcagatggccaacgagaaggccctgaagcagaagggcatcaccgtgaagcagaagagcgtgagcctgagcaagagacagttcgtgcacctggccgtgcacgccgagaacttcagaagcgagatcgtgagcgtgagagagatgagagacatctggagctgggtgcccgagagattcgccctgtgccagcccctgctgctgttcagcagcctgcagcacggctacagcctggccagattctacttccagtgcgagggccacgagcccaccctgctgctgatcaagaccacccagaaggaggtgtgcggcgcctacctgagcaccgactggagcgagagaaacaagttcggcggcaagctgggcttcttcggcaccggcgagtgcttcgtgttcagactgcagcccgaggtgcagagatacgagtgggtggtgatcaagcaccccgagctgaccaagcccccccccctgatggccgccgagcccaccgcccccctgagccacagcgccagcagcgaccccgccgacagactgagccccttcctggccgccagacacttcaacctgcccagcaagaccgagagcatgttcatggccggcggcagcgactgcctgatcgtgggcggcggcggcggccaggccctgtacatcgacggcgacctgaacagaggcagaaccagccactgcgacaccttcaacaaccagcccctgtgcagcgagaacttcctgatcgccgccgtggaggcctggggcttccaggaccccgacacccagtag

SEQ ID NO: 101944 - DNA, 2067 bp, synthetic construct
  misc_feature 1..2067: note = Description of Artificial Sequence: Synthetic coding sequence
  source 1..2067: mol_type = other DNA
atggccaccgccagcggcgccagcgacctgagcggcagcggcgcccccccccccggcgtgggcgcccaggccgccgccgccgccgaggaggaggagagagaggtggtgagagtgagagtgaagaagtgcgagagcttcctgccccccgagttcagaagcttcgccgtggacccccagatcaccagcctggacgtgctgcagcacatcctgatcagagccttcgacctgagcggcaagaagaacttcggcatcagctacctgggcagagacagactgggccaggaggtgtacctgagcctgctgagcgactgggacctgagcaccgccttcgccaccgccagcaagccctacctgcagctgagagtggacatcagacccagcgaggacagccccctgctggaggactgggacatcatcagccccaaggacgtgatcggcagcgacgtgctgctggccgagaagagaagcagcctgaccaccgccgccctgcccttcacccagagcatcctgacccaggtgggcagaaccctgagcaaggtgcagcaggtgctgagctggagctacggcgaggacgtgaagcccttcaagccccccctgagcgacgccgagttccacacctacctgaaccacgagggccagctgagcagacccgaggagctgagactgagaatctaccacggcggcgtggagcccagcctgagaaaggtggtgtggagatacctgctgaacgtgtaccccgacggcctgaccggcagagagagaatggactacatgaagagaaagagcagagagtacgagcagctgaagagcgagtgggcccagagagccaaccccgaggacctggagttcatcagaagcaccgtgctgaaggacgtgctgagaaccgacagagcccacccctactacgccggccccgaggacggcccccacctgagagccctgcacgacctgctgaccacctacgccgtgacccacccccaggtgagctactgccagggcatgagcgacctggccagccccatcctggccgtgatggaccacgagggccacgccttcgtgtgcttctgcggcatcatgaagagactggccgccaacttccaccccgacggcagagccatggccaccaagttcgcccacctgaagctgctgctgagacacgccgaccccgacttctaccagtacctgcaggaggccggcgccgacgacctgttcttctgctacagatggctgctgctggagctgaagagagagttcgccttcgacgacgccctgagaatgctggaggtgacctggagcagcctgccccccgacccccccgagcacgaggtggagctggtgggcccccccagccaggtggccgacgccggcttcggcggccacagaggctggcccgtgagacagagacacatgctgagacccgccggcggcggcggcagcaccttcgaggacgccgtggaccacctggccaccgccagccagggccccggcggcggcggcagactgctgagacaggccagcctggacggcctgcagcagctgagagacaacatgggcagcagaagagaccccctggtgcagctgccccaccccgccgccctgatcagcagcaagagcctgagcgagcccctgctgaacagccccgaccccctgctgagcagcttcagccaccccgacagccccagcagcagcagcccccccagcacccaggaggccagccccaccggcgacatggccgtgggcagccccctgatgcaggaggtgggcagccccaaggaccccggcaagagcctgccccccgtgccccccatgggcctgccccccccccaggagttcggcagaggcaaccccttcatgctgttcctgtgcctggccatcctgctggagcacagagaccacatcatgagaaacggcctggactacaacgagctggccatgcacttcgacagactggtgagaaagcaccacctgggcagagtgctgagaagagccagagccctgttcgccgactacctgcagagcgaggtgtgggacagcgaggagggcgccgaggccaccgccgccagctag

SEQ ID NO: 101945 - DNA, 693 bp, synthetic construct
  misc_feature 1..693: note = Description of Artificial Sequence: Synthetic coding sequence
  source 1..693: mol_type = other DNA
atggccaccgccagcggcgccagcgacctgagcggcagcggcgcccccccccccggcgtgggcgcccaggccgccgccgccgccgaggaggaggagagagaggtggtgagagtgagagtgaagcacggcgacggcgcccccggcggcctgccccacgtgttcagcccccagaagtgcgagagcttcctgccccccgagttcagaagcttcgccgtggacccccagatcaccagcctggacgtgctgcagcacatcctgatcagagccttcgacctgagcggcaagaagaacttcggcatcagctacctgggcagagacagactgggccaggaggtgtacctgagcctgctgagcgactgggacctgagcaccgccttcgccaccgccagcaagccctacctgcagctgagagtggacatcagacccagcgaggacagccccctgctggaggactgggacatcatcagccccaaggacgtgatcggcagcgacgtgctgctggccgagaagagaagcagcctgaccaccgccgccctgcccttcacccagagcatcctgacccaggtgggcagaaccctgagcaaggtgcagcaggtgctgagctggagctacggcgaggacgtgaagcccttcaagccccccctgagcgacgccgagttccacacctacctgaaccacgagggccagctgtag

SEQ ID NO: 101946 - DNA, 303 bp, synthetic construct
  misc_feature 1..303: note = Description of Artificial Sequence: Synthetic coding sequence
  source 1..303: mol_type = other DNA
atggccaccgccagcggcgccagcgacctgagcggcagcggcgcccccccccccggcgtgggcgcccaggccgccgccgccgccgaggaggaggagagagaggtggtgagagtgagagtgaagaagtgcgagagcttcctgccccccgagttcagaagcttcgccgtggacccccagatcaccagcctggacgtgctgcagcacatcctgatcagagccttcgacctgagcggccccatcgccagaagactgggccacaaccagccccagagatgccactggctgagaagagtggccggctag

SEQ ID NO: 101947 - DNA, 1305 bp, synthetic construct
  misc_feature 1..1305: note = Description of Artificial Sequence: Synthetic coding sequence
  source 1..1305: mol_type = other DNA
atggactacatgaagagaaagagcagagagtacgagcagctgaagagcgagtgggcccagagagccaaccccgaggacctggagttcatcagaagcaccgtgctgaaggacgtgctgagaaccgacagagcccacccctactacgccggccccgaggacggcccccacctgagagccctgcacgacctgctgaccacctacgccgtgacccacccccaggtgagctactgccagggcatgagcgacctggccagccccatcctggccgtgatggaccacgagggccacgccttcgtgtgcttctgcggcatcatgaagagactggccgccaacttccaccccgacggcagagccatggccaccaagttcgcccacctgaagctgctgctgagacacgccgaccccgacttctaccagtacctgcaggaggccggcgccgacgacctgttcttctgctacagatggctgctgctggagctgaagagagagttcgccttcgacgacgccctgagaatgctggaggtgacctggagcagcctgccccccgacccccccgagcacgaggtggagctggtgggcccccccagccaggtggccgacgccggcttcggcggccacagaggctggcccgtgagacagagacacatgctgagacccgccggcggcggcggcagcaccttcgaggacgccgtggaccacctggccaccgccagccagggccccggcggcggcggcagactgctgagacaggccagcctggacggcctgcagcagctgagagacaacatgggcagcagaagagaccccctggtgcagctgccccaccccgccgccctgatcagcagcaagagcctgagcgagcccctgctgaacagccccgaccccctgctgagcagcttcagccaccccgacagccccagcagcagcagcccccccagcacccaggaggccagccccaccggcgacatggccgtgggcagccccctgatgcaggaggtgggcagccccaaggaccccggcaagagcctgccccccgtgccccccatgggcctgccccccccccaggagttcggcagaggcaaccccttcatgctgttcctgtgcctggccatcctgctggagcacagagaccacatcatgagaaacggcctggactacaacgagctggccatgcacttcgacagactggtgagaaagcaccacctgggcagagtgctgagaagagccagagccctgttcgccgactacctgcagagcgaggtgtgggacagcgaggagggcgccgaggccaccgccgccagctag

SEQ ID NO: 101948 - DNA, 876 bp, synthetic construct
  misc_feature 1..876: note = Description of Artificial Sequence: Synthetic coding sequence
  source 1..876: mol_type = other DNA
atggacgtggtggaggtggccggcagctggtgggcccaggagagagaggacatcatcatgaagtacgagaagggccacagagccggcctgcccgaggacaagggccccaagcccttcagaagctacaacaacaacgtggaccacctgggcatcgtgcacgagaccgagctgccccccctgaccgccagagaggccaagcagatcagaagagagatcagcagaaagagcaagtgggtggacatgctgggcgactgggagaagtacaagagcagcagaaagctgatcgacagagcctacaagggcatgcccatgaacatcagaggccccatgtggagcgtgctgctgaacatcgaggagatgaagctgaagaaccccggcagataccagatcatgaaggagaagggcaagagaagcagcgagcacatccagagaatcgacagagacgtgagcggcaccctgagaaagcacatcttcttcagagacagatacggcaccaagcagagagagctgctgcacatcctgctggcctacgaggagtacaaccccgaggtgggctactgcagagacctgagccacatcgccgccctgttcctgctgtacctgcccgaggaggacgccttctgggccctggtgcagctgctggccagcgagagacacagcctgcagggcttccacagccccaacggcggcaccgtgcagggcctgcaggaccagcaggagcacgtggtggccaccagccagcccaagaccatgggccaccagagcgccagcagaagaagacccggcgtggccagaggccacgtgttcgccaccggcagcctgatccccggccccggcatgagaaccctgtgcagcagcatcctgggccccctgtag

SEQ ID NO: 101949 - DNA, 1650 bp, synthetic construct
  misc_feature 1..1650: note = Description of Artificial Sequence: Synthetic coding sequence
  source 1..1650: mol_type = other DNA
atggacgtggtggaggtggccggcagctggtgggcccaggagagagaggacatcatcatgaagtacgagaagggccacagagccggcctgcccgaggacaagggccccaagcccttcagaagctacaacaacaacgtggaccacctgggcatcgtgcacgagaccgagctgccccccctgaccgccagagaggccaagcagatcagaagagagatcagcagaaagagcaagtgggtggacatgctgggcgactgggagaagtacaagagcagcagaaagctgatcgacagagcctacaagggcatgcccatgaacatcagaggccccatgtggagcgtgctgctgaacatcgaggagatgaagctgaagaaccccggcagataccagatcatgaaggagaagggcaagagaagcagcgagcacatccagagaatcgacagagacgtgagcggcaccctgagaaagcacatcttcttcagagacagatacggcaccaagcagagagagctgctgcacatcctgctggcctacgaggagtacaaccccgaggtgggctactgcagagacctgagccacatcgccgccctgttcctgctgtacctgcccgaggaggacgccttctgggccctggtgcagctgctggccagcgagagacacagcctgcagggcttccacagccccaacggcggcaccgtgcagggcctgcaggaccagcaggagcacgtggtggccaccagccagcccaagaccatgggccaccaggacaagaaggacctgtgcggccagtgcagccccctgggctgcctgatcagaatcctgatcgacggcatcagcctgggcctgaccctgagactgtgggacgtgtacctggtggagggcgagcaggccctgatgcccatcaccagaatcgccttcaaggtgcagcagaagagactgaccaagaccagcagatgcggcccctgggccagattctgcaacagattcgtggacacctgggccagagacgaggacaccgtgctgaagcacctgagagccagcatgaagaagctgaccagaaagcagggcgacctgcccccccccgccaagcccgagcagggcagcagcgccagcagacccgtgcccgccagcagaggcggcaagaccctgtgcaagggcgacagacaggccccccccggcccccccgccagattccccagacccatctggagcgccagcccccccagagcccccagaagcagcaccccctgccccggcggcgccgtgagagaggacacctaccccgtgggcacccagggcgtgcccagccccgccctggcccagggcggcccccagggcagctggagattcctgcagtggaacagcatgcccagactgcccaccgacctggacgtggagggcccctggttcagacactacgacttcagacagagctgctgggtgagagccatcagccaggaggaccagctggccccctgctggcaggccgagcaccccgccgagagagtgagaagcgccttcgccgcccccagcaccgacagcgaccagggcacccccttcagagccagagacgagcagccctgcgcccccaccagcggcccctgcctgtgcggcctgcacctggagagcagccagttcccccccggcttctag

SEQ ID NO: 101950 - DNA, 900 bp, synthetic construct
  misc_feature 1..900: note = Description of Artificial Sequence: Synthetic coding sequence
  source 1..900: mol_type = other DNA
atgggccaccaggacaagaaggacctgtgcggccagtgcagccccctgggctgcctgatcagaatcctgatcgacggcatcagcctgggcctgaccctgagactgtgggacgtgtacctggtggagggcgagcaggccctgatgcccatcaccagaatcgccttcaaggtgcagcagaagagactgaccaagaccagcagatgcggcccctgggccagattctgcaacagattcgtggacacctgggccagagacgaggacaccgtgctgaagcacctgagagccagcatgaagaagctgaccagaaagcagggcgacctgcccccccccgccaagcccgagcagggcagcagcgccagcagacccgtgcccgccagcagaggcggcaagaccctgtgcaagggcgacagacaggccccccccggcccccccgccagattccccagacccatctggagcgccagcccccccagagcccccagaagcagcaccccctgccccggcggcgccgtgagagaggacacctaccccgtgggcacccagggcgtgcccagccccgccctggcccagggcggcccccagggcagctggagattcctgcagtggaacagcatgcccagactgcccaccgacctggacgtggagggcccctggttcagacactacgacttcagacagagctgctgggtgagagccatcagccaggaggaccagctggccccctgctggcaggccgagcaccccgccgagagagtgagaagcgccttcgccgcccccagcaccgacagcgaccagggcacccccttcagagccagagacgagcagccctgcgcccccaccagcggcccctgcctgtgcggcctgcacctggagagcagccagttcccccccggcttctag

SEQ ID NO: 101951 - DNA, 1584 bp, synthetic construct
  misc_feature 1..1584: note = Description of Artificial Sequence: Synthetic coding sequence
  source 1..1584: mol_type = other DNA
atggacgtggtggaggtggccggcagctggtgggcccaggagagagaggacatcatcatgaagtacgagaagggccacagagccggcctgcccgaggacaagggccccaagcccttcagaagctacaacaacaacgtggaccacctgggcatcgtgcacgagaccgagctgccccccctgaccgccagagaggccaagcagatcagaagagagatcagcagaaagagcaagtgggtggacatgctgggcgactgggagaagtacaagagcagcagaaagctgatcgacagagcctacaagggcatgcccatgaacatcagaggccccatgtggagcgtgctgctgaacatcgaggagatgaagctgaagaaccccggcagataccagatcatgaaggagaagggcaagagaagcagcgagcacatccagagaatcgacagagacgtgagcggcaccctgagaaagcacatcttcttcagagacagatacggcaccaagcagagagagctgctgcacatcctgctggcctacgaggagtacaaccccgaggtgggctactgcagagacctgagccacatcgccgccctgttcctgctgtacctgcccgaggaggacgccttctgggccctggtgcagctgctggccagcgagagacacagcctgcagggcttccacagccccaacggcggcaccgtgcagggcctgcaggaccagcaggagcacgtggtggccaccagccagcccaagaccatgggccaccagatcagcctgggcctgaccctgagactgtgggacgtgtacctggtggagggcgagcaggccctgatgcccatcaccagaatcgccttcaaggtgcagcagaagagactgaccaagaccagcagatgcggcccctgggccagattctgcaacagattcgtggacacctgggccagagacgaggacaccgtgctgaagcacctgagagccagcatgaagaagctgaccagaaagcagggcgacctgcccccccccgccaagcccgagcagggcagcagcgccagcagacccgtgcccgccagcagaggcggcaagaccctgtgcaagggcgacagacaggccccccccggcccccccgccagattccccagacccatctggagcgccagcccccccagagcccccagaagcagcaccccctgccccggcggcgccgtgagagaggacacctaccccgtgggcacccagggcgtgcccagccccgccctggcccagggcggcccccagggcagctggagattcctgcagtggaacagcatgcccagactgcccaccgacctggacgtggagggcccctggttcagacactacgacttcagacagagctgctgggtgagagccatcagccaggaggaccagctggccccctgctggcaggccgagcaccccgccgagagagtgagaagcgccttcgccgcccccagcaccgacagcgaccagggcacccccttcagagccagagacgagcagccctgcgcccccaccagcggcccctgcctgtgcggcctgcacctggagagcagccagttcccccccggcttctag

SEQ ID NO: 101952 - DNA, 1650 bp, synthetic construct; identical to SEQ ID NO: 101949
  misc_feature 1..1650: note = Description of Artificial Sequence: Synthetic coding sequence
  source 1..1650: mol_type = other DNA

SEQ ID NO: 101953 - DNA, 1584 bp, synthetic construct
  misc_feature 1..1584: note = Description of Artificial Sequence: Synthetic coding sequence
  source 1..1584: mol_type = other DNA
atggacgtggtggaggtggccggcagctggtgggcccaggagagagaggacatcatcatgaagtacgagaagggccacagagccggcctgcccgaggacaagggccccaagcccttcagaagctacaacaacaacgtggaccacctgggcatcgtgcacgagaccgagctgccccccctgaccgccagagaggccaagcagatcagaagagagatcagcagaaagagcaagtgggtggacatgctgggcgactgggagaagtacaagagcagcagaaagctgatcgacagagcctacaagggcatgcccatgaacatcagaggccccatgtggagcgtgctgctgaacatcgaggagatgaagctgaagaaccccggcagataccagatcatgaaggagaagggcaagagaagcagcgagcacatccagagaatcgacagagacatcagcggcaccctgagaaagcacatgttcttcagagacagatacggcaccaagcagagagagctgctgcacatcctgctggcctacgaggagtacaaccccgaggtgggctactgcagagacctgagccacatcgccgccctgttcctgctgtacttccccgaggaggacgccttctgggccctggtgcagctgctggccagcgagagacacagcctgcagggcttccacagccccaacggcggcaccgtgcagggcctgcaggaccagcaggagcacgtggtggccaccagccagagcaagaccatgggccaccagatcagcctgggcctgaccctgagactgtgggacgtgtacctggtggagggcgagcaggccctgatgcccatcaccagaatcgccttcaaggtgcagcagaagagactgaccaagaccagcagatgcggcccctgggccagattctgcaacagattcgtggacacctgggccagagacgaggacaccgtgctgaagcacctgagagccagcatgaagaagctgaccagaaagcagggcgacctgcccccccccgccaagcccgagcagggcagcagcgccagcagacccgtgcccgccagcagaggcggcaagaccctgtgcaagggcgacagacaggccccccccggcccccccgccagattccccagacccatctggagcgccagcccccccagagcccccagaagcagcaccccctgccccggcggcgccgtgagagaggacacctaccccgtgggcacccagggcgtgcccagccccgccctggcccagggcggcccccagggcagctggagattcctgcagtggaacagcatgcccagactgcccaccgacctggacgtggagggcccctggttcagacactacgacttcagacagagctgctgggtgagagccatcagccaggaggaccagctggccccctgctggcaggccgagcaccccgccgagagagtgagaagcgccttcgccgcccccagcaccgacagcgaccagggcacccccttcagagccagagacgagcagcagtacgcccccaccagcggcccctgcctgtgcggcctgcacctggagagcagccagttcccccccggcttctag

SEQ ID NO: 101954 - DNA, 1650 bp, synthetic construct
  misc_feature 1..1650: note = Description of Artificial Sequence: Synthetic coding sequence
  source 1..1650: mol_type = other DNA
atggacgtggtggaggtggccggcagctggtgggcccaggagagagaggacatcatcatgaagtacgagaagggccacagagccggcctgcccgaggacaagggccccaagcccttcagaagctacaacaacaacgtggaccacctgggcatcgtgcacgagaccgagctgccccccctgaccgccagagaggccaagcagatcagaagagagatcagcagaaagagcaagtgggtggacatgctgggcgactgggagaagtacaagagcagcagaaagctgatcgacagagcctacaagggcatgcccatgaacatcagaggccccatgtggagcgtgctgctgaacatcgaggagatgaagctgaagaaccccggcagataccagatcatgaaggagaagggcaagagaagcagcgagcacatccagagaatcgacagagacatcagcggcaccctgagaaagcacatgttcttcagagacagatacggcaccaagcagagagagctgctgcacatcctgctggcctacgaggagtacaaccccgaggtgggctactgcagagacctgagccacatcgccgccctgttcctgctgtacttccccgaggaggacgccttctgggccctggtgcagctgctggccagcgagagacacagcctgcagggcttccacagccccaacggcggcaccgtgcagggcctgcaggaccagcaggagcacgtggtggccaccagccagagcaagaccatgggccaccaggacaagaaggacctgtgcggccagtgcagccccctgggctgcctgatcagaatcctgatcgacggcatcagcctgggcctgaccctgagactgtgggacgtgtacctggtggagggcgagcaggccctgatgcccatcaccagaatcgccttcaaggtgcagcagaagagactgaccaagaccagcagatgcggcccctgggccagattctgcaacagattcgtggacacctgggccagagacgaggacaccgtgctgaagcacctgagagccagcatgaagaagctgaccagaaagcagggcgacctgcccccccccgccaagcccgagcagggcagcagcgccagcagacccgtgcccgccagcagaggcggcaagaccctgtgcaagggcgacagacaggccccccccggcccccccgccagattccccagacccatctggagcgccagcccccccagagcccccagaagcagcaccccctgccccggcggcgccgtgagagaggacacctaccccgtgggcacccagggcgtgcccagccccgccctggcccagggcggcccccagggcagctggagattcctgcagtggaacagcatgcccagactgcccaccgacctggacgtggagggcccctggttcagacactacgacttcagacagagctgctgggtgagagccatcagccaggaggaccagctggccccctgctggcaggccgagcaccccgccgagagagtgagaagcgccttcgccgcccccagcaccgacagcgaccagggcacccccttcagagccagagacgagcagcagtacgcccccaccagcggcccctgcctgtgcggcctgcacctggagagcagccagttcccccccggcttctag

SEQ ID NO: 101955 - DNA, 1650 bp, synthetic construct; identical to SEQ ID NO: 101954
  misc_feature 1..1650: note = Description of Artificial Sequence: Synthetic coding sequence
  source 1..1650: mol_type = other DNA

SEQ ID NO: 101956 - DNA, 1650 bp, synthetic construct
  misc_feature 1..1650: note = Description of Artificial Sequence: Synthetic coding sequence
  source 1..1650: mol_type = other DNA
atggacgtggtggaggtggccggcagctggtgggcccaggagagagaggacatcatcatgaagtacgagaagggccacagagccggcctgcccgaggacaagggccccaagcccttcagaagctacaacaacaacgtggaccacctgggcatcgtgcacgagaccgagctgccccccctgaccgccagagaggccaagcagatcagaagagagatcagcagaaagagcaagtgggtggacatgctgggcgactgggagaagtacaagagcagcagaaagctgatcgacagagcctacaagggcatgcccatgaacatcagaggccccatgtggagcgtgctgctgaacatcgaggagatgaagctgaagaaccccggcagataccagatcatgaaggagaagggcaagagaagcagcgagcacatccagagaatcgacagagacatcagcggcaccctgagaaagcacatgttcttcagagacagatacggcaccaagcagagagagctgctgcacatcctgctggcctacgaggagtacaaccccgaggtgggctactgcagagacctgagccacatcgccgccctgttcctgctgtacctgcccgaggaggacgccttctgggccctggtgcagctgctggccagcgagagacacagcctgcagggcttccacagccccaacggcggcaccgtgcagggcctgcaggaccagcaggagcacgtggtggccaccagccagagcaagaccatgggccaccaggacaagaaggacctgtgcggccagtgcagccccctgggctgcctgatcagaatcctgatcgacggcatcagcctgggcctgaccctgagactgtgggacgtgtacctggtggagggcgagcaggccctgatgcccatcaccagaatcgccttcaaggtgcagcagaagagactgaccaagaccagcagatgcggcccctgggccagattctgcaacagattcgtggacacctgggccagagacgaggacaccgtgctgaagcacctgagagccagcatgaagaagctgaccagaaagcagggcgacctgcccccccccgccaagcccgagcagggcagcagcgccagcagacccgtgcccgccagcagaggcggcaagaccctgtgcaagggcgacagacaggccccccccggcccccccgcctggttccccagacccatctggagcgccagcccccccagagcccccagaagcagcaccccctgccccggcggcgccgtgagagaggacacctaccccgtgggcacccagggcgtgcccagccccgccctggcccagggcggcccccagggcagctggagattcctgcagtggaacagcatgcccagactgcccaccgacctggacgtggagggcccctggttcagacactacgacttcagacagagctgctgggtgagagccatcagccaggaggaccagctggccccctgctggcaggccgagcaccccgccgagagagtgagaagcgccttcgccgcccccagcaccgacagcgaccagggcacccccttcagagccagagacgagcagcagtgcgcccccaccagcggcccctgcctgtgcggcctgcacctggagagcagccagttcccccccggcttctag

SEQ ID NO: 101957 - DNA, 1584 bp, synthetic construct
  misc_feature 1..1584: note = Description of Artificial Sequence: Synthetic coding sequence
  source 1..1584: mol_type = other DNA
atggacgtggtggaggtggccggcagctggtgggcccaggagagagaggacatcatcatgaagtacgagaagggccacagagccggcctgcccgaggacaagggccccaagcccttcagaagctacaacaacaacgtggaccacctgggcatcgtgcacgagaccgagctgccccccctgaccgccagagaggccaagcagatcagaagagagatcagcagaaagagcaagtgggtggacatgctgggcgactgggagaagtacaagagcagcagaaagctgatcgacagagcctacaagggcatgcccatgaacatcagaggccccatgtggagcgtgctgctgaacatcgaggagatgaagctgaagaaccccggcagataccagatcatgaaggagaagggcaagagaagcagcgagcacatccagagaatcgacagagacatcagcggcaccctgagaaagcacatgttcttcagagacagatacggcaccaagcagagagagctgctgcacatcctgctggcctacgaggagtacaaccccgaggtgggctactgcagagacctgagccacatcgccgccctgttcctgctgtacctgcccgaggaggacgccttctgggccctggtgcagctgctggccagcgagagacacagcctgcagggcttccacagccccaacggcggcaccgtgcagggcctgcaggaccagcaggagcacgtggtggccaccagccagagcaagaccatgggccaccagatcagcctgggcctgaccctgagactgtgggacgtgtacctggtggagggcgagcaggccctgatgcccatcaccagaatcgccttcaaggtgcagcagaagagactgaccaagaccagcagatgcggcccctgggccagattctgcaacagattcgtggacacctgggccagagacgaggacaccgtgctgaagcacctgagagccagcatgaagaagctgaccagaaagcagggcgacctgcccccccccgccaagcccgagcagggcagcagcgccagcagacccgtgcccgccagcagaggcggcaagaccctgtgcaagggcgacagacaggccccccccggcccccccgcctggttccccagacccatctggagcgccagcccccccagagcccccagaagcagcaccccctgccccggcggcgccgtgagagaggacacctaccccgtgggcacccagggcgtgcccagccccgccctggcccagggcggcccccagggcagctggagattcctgcagtggaacagcatgcccagactgcccaccgacctggacgtggagggcccctggttcagacactacgacttcagacagagctgctgggtgagagccatcagccaggaggaccagctggccccctgctggcaggccgagcaccccgccgagagagtgagaagcgccttcgccgcccccagcaccgacagcgaccagggcacccccttcagagccagagacgagcagcagtgcgcccccaccagcggcccctgcctgtgcggcctgcacctggagagcagccagttcccccccggcttctag

SEQ ID NO: 101958 - DNA, 1650 bp, synthetic construct; identical to SEQ ID NO: 101956
  misc_feature 1..1650: note = Description of Artificial Sequence: Synthetic coding sequence
  source 1..1650: mol_type = other DNA

SEQ ID NO: 101959 - DNA, 1650 bp, synthetic construct
  misc_feature 1..1650: note = Description of Artificial Sequence: Synthetic coding sequence
  source 1..1650: mol_type = other DNA
atggacgtggtggaggtggccggcagctggtgggcccaggagagagaggacatcatcatgaagtacgagaagggccacagagccggcctgcccgaggacaagggccccaagcccttcagaagctacaacaacaacgtggaccacctgggcatcgtgcacgagaccgagctgccccccctgaccgccagagaggccaagcagatcagaagagagatcagcagaaagagcaagtgggtggacatgctgggcgactgggagaagtacaagagcagcagaaagctgatcgacagagcctacaagggcatgcccatgaacatcagaggccccatgtggagcgtgctgctgaacaccgaggagatgaagctgaagaaccccggcagataccagatcatgaaggagaagggcaagagaagcagcgagcacatccagagaatcgacagagacgtgagcggcaccctgagaaagcacatcttcttcagagacagatacggcaccaagcagagagagctgctgcacatcctgctggcctacgaggagtacaaccccgaggtgggctactgcagagacctgagccacatcgccgccctgttcctgctgtacctgcccgaggaggacgccttctgggccctggtgcagctgctggccagcgagagacacagcctgcagggcttccacagccccaacggcggcaccgtgcagggcctgcaggaccagcaggagcacgtggtggccaccagccagcccaagaccatgggccaccaggacaagaaggacctgtgcggccagtgcagccccctgggctgcctgatcagaatcctgatcgacggcatcagcctgggcctgaccctgagactgtgggacgtgtacctggtggagggcgagcaggccctgatgcccatcaccagaatcgccttcaaggtgcagcagaagagactgaccaagaccagcagatgcggcccctgggccagattctgcaacagattcgtggacacctgggccagagacgaggacaccgtgctgaagcacctgagagccagcatgaagaagctgaccagaaagcagggcgacctgcccccccccgccaagcccgagcagggcagcagcgccagcagacccgtgcccgccagcagaggcggcaagaccctgtgcaagggcgacagacaggccccccccggcccccccgccagattccccagacccatctggagcgccagcccccccagagcccccagaagcagcaccccctgccccggcggcgccgtgagagaggacacctaccccgtgggcacccagggcgtgcccagccccgccctggcccagggcggcccccagggcagctggagattcctgcagtggaacagcatgcccagactgcccaccgacctggacgtggagggcccctggttcagacactacgacttcagacagagctgctgggtgagagccatcagccaggaggaccagctggccccctgctggcaggccgagcaccccgccgagagagtgagaagcgccttcgccgcccccagcaccgacagcgaccagggcacccccttcagagccagagacgagcagccctgcgcccccaccagcggcccctgcctgtgcggcctgcacctggagagcagccagttcccccccggcttctag

SEQ ID NO: 101960 - DNA, 876 bp, synthetic construct
  misc_feature 1..876: note = Description of Artificial Sequence: Synthetic coding sequence
  source 1..876: mol_type = other DNA
atggacgtggtggaggtggccggcagctggtgggcccaggagagagaggacatcatcatgaagtacgagaagggccacagagccggcctgcccgaggacaagggccccaagcccttcagaagctacaacaacaacgtggaccacctgggcatcgtgcacgagaccgagctgccccccctgaccgccagagaggccaagcagatcagaagagagatcagcagaaagagcaagtgggtggacatgctgggcgactgggagaagtacaagagcagcagaaagctgatcgacagagcctacaagggcatgcccatgaacatcagaggccccatgtggagcgtgctgctgaacaccgaggagatgaagctgaagaaccccggcagataccagatcatgaaggagaagggcaagagaagcagcgagcacatccagagaatcgacagagacgtgagcggcaccctgagaaagcacatcttcttcagagacagatacggcaccaagcagagagagctgctgcacatcctgctggcctacgaggagtacaaccccgaggtgggctactgcagagacctgagccacatcgccgccctgttcctgctgtacctgcccgaggaggacgccttctgggccctggtgcagctgctggccagcgagagacacagcctgcagggcttccacagccccaacggcggcaccgtgcagggcctgcaggaccagcaggagcacgtggtggccaccagccagcccaagaccatgggccaccagagcgccagcagaagaagacccggcgtggccagaggccacgtgttcgccaccggcagcctgatccccggccccggcatgagaaccctgtgcagcagcatcctgggccccctgtag

SEQ ID NO: 101961 - DNA, 900 bp, synthetic construct; identical to SEQ ID NO: 101950
  misc_feature 1..900: note = Description of Artificial Sequence: Synthetic coding sequence
  source 1..900: mol_type = other DNA

SEQ ID NO: 101962 - DNA, 1410 bp, synthetic construct
  misc_feature 1..1410: note = Description of Artificial Sequence: Synthetic coding sequence
  source 1..1410: mol_type = other DNA
atgctgggcgactgggagaagtacaagagcagcagaaagctgatcgacagagcctacaagggcatgcccatgaacatcagaggccccatgtggagcgtgctgctgaacaccgaggagatgaagctgaagaaccccggcagataccagatcatgaaggagaagggcaagagaagcagcgagcacatccagagaatcgacagagacgtgagcggcaccctgagaaagcacatcttcttcagagacagatacggcaccaagcagagagagctgctgcacatcctgctggcctacgaggagtacaaccccgaggtgggctactgcagagacctgagccacatcgccgccctgttcctgctgtacctgcccgaggaggacgccttctgggccctggtgcagctgctggccagcgagagacacagcctgcagggcttccacagccccaacggcggcaccgtgcagggcctgcaggaccagcaggagcacgtggtggccaccagccagcccaagaccatgggccaccaggacaagaaggacctgtgcggccagtgcagccccctgggctgcctgatcagaatcctgatcgacggcatcagcctgggcctgaccctgagactgtgggacgtgtacctggtggagggcgagcaggccctgatgcccatcaccagaatcgccttcaaggtgcagcagaagagactgaccaagaccagcagatgcggcccctgggccagattctgcaacagattcgtggacacctgggccagagacgaggacaccgtgctgaagcacctgagagccagcatgaagaagctgaccagaaagcagggcgacctgcccccccccgccaagcccgagcagggcagcagcgccagcagacccgtgcccgccagcagaggcggcaagaccctgtgcaagggcgacagacaggccccccccggcccccccgccagattccccagacccatctggagcgccagcccccccagagcccccagaagcagcaccccctgccccggcggcgccgtgagagaggacacctaccccgtgggcacccagggcgtgcccagccccgccctggcccagggcggcccccagggcagctggagattcctgcagtggaacagcatgcccagactgcccaccgacctggacgtggagggcccctggttcagacactacgacttcagacagagctgctgggtgagagccatcagccaggaggaccagctggccccctgctggcaggccgagcaccccgccgagagagtgagaagcgccttcgccgcccccagcaccgacagcgaccagggcacccccttcagagccagagacgagcagccctgcgcccccaccagcggcccctgcctgtgcggcctgcacctggagagcagccagttcccccccggcttctag

SEQ ID NO: 101963 - DNA, 1650 bp, synthetic construct
  misc_feature 1..1650: note = Description of Artificial Sequence: Synthetic coding sequence
  source 1..1650: mol_type = other DNA
atggacgtggtggaggtggccggcagctggtgggcccaggagagagaggacatcatcatgaagtacgagaagggccacagagccggcctgcccgaggacaagggccccaagcccttcagaagctacaacaacaacgtggaccacctgggcatcgtgcacgagaccgagctgccccccctgaccgccagagaggccaagcagatcagaagagagatcagcagaaagagcaagtgggtggacatgctgggcgactgggagaagtacaagagcagcagaaagctgatcgacagagcctacaagggcatgcccatgaacatcagaggccccatgtggagcgtgctgctgaacatcgaggagatgaagctgaagaaccccggcagataccagatcatgaaggagaagggcaagagaagcagcgagcacatccagagaatcgacagagacatcagcggcaccctgagaaagcacatgttcttcagagacagatacggcaccaagcagagagagctgctgcacatcctgctggcctacgaggagtacaaccccgaggtgggctactgcagagacctgagccacatcgccgccctgttcctgctgtacctgcccgaggaggacgccttctgggccctggtgcagctgctggccagcgagagacacagcctgcagggcttccacagccccaacggcggcaccgtgcagggcctgcaggaccagcaggagcacgtggtggccaccagccagcccaagaccatgggccaccaggacaagaaggacctgtgcggccagtgcagccccctgggctgcctgatcagaatcctgatcgacggcatcagcctgggcctgaccctgagactgtgggacgtgtacctggtggagggcgagcaggccctgatgcccatcaccagaatcgccttcaaggtgcagcagaagagactgaccaagaccagcagatgcggcccctgggccagattctgcaacagattcgtggacacctgggccagagacgaggacaccgtgctgaagcacctgagagccagcatgaagaagctgaccagaaagcagggcgacctgcccccccccgccaagcccgagcagggcagcagcgccagcagacccgtgcccgccagcagaggcggcaagaccctgtgcaagggcgacagacaggccccccccggcccccccgccagattccccagacccatctggagcgccagcccccccagagcccccagaagcagcaccccctgccccggcggcgccgtgagagaggacacctaccccgtgggcacccagggcgtgcccagccccgccctggcccagggcggcccccagggcagctggagattcctgcagtggaacagcatgcccagactgcccaccgacctggacgtggagggcccctggttcagacactacgacttcagacagagctgctgggtgagagccatcagccaggaggaccagctggccccctgctggcaggccgagcaccccgccgagagagtgagaagcgccttcgccgcccccagcaccgacagcgaccagggcacccccttcagagccagagacgagcagcagtgcgcccccaccagcggcccctgcctgtgcggcctgcacctggagagcagccagttcccccccggcttctag

SEQ ID NO: 101964 - DNA, 1650 bp, synthetic construct; identical to SEQ ID NO: 101963
  misc_feature 1..1650: note = Description of Artificial Sequence: Synthetic coding sequence
  source 1..1650: mol_type = other DNA

SEQ ID NO: 101965 - DNA, 1584 bp, synthetic construct
  misc_feature 1..1584: note = Description of Artificial Sequence: Synthetic coding sequence
  source 1..1584: mol_type = other DNA
atggacgtggtggaggtggccggcagctggtgggcccaggagagagaggacatcatcatgaagtacgagaagggccacagagccggcctgcccgaggacaagggccccaagcccttcagaagctacaacaacaacgtggaccacctgggcatcgtgcacgagaccgagctgccccccctgaccgccagagaggccaagcagatcagaagagagatcagcagaaagagcaagtgggtggacatgctgggcgactgggagaagtacaagagcagcagaaagctgatcgacagagcctacaagggcatgcccatgaacatcagaggccccatgtggagcgtgctgctgaacatcgaggagatgaagctgaagaaccccggcagataccagatcatgaaggagaagggcaagagaagcagcgagcacatccagagaatcgacagagacatcagcggcaccctgagaaagcacatgttcttcagagacagatacggcaccaagcagagagagctgctgcacatcctgctggcctacgaggagtacaaccccgaggtgggctactgcagagacctgagccacatcgccgccctgttcctgctgtacctgcccgaggaggacgccttctgggccctggtgcagctgctggccagcgagagacacagcctgcagggcttccacagccccaacggcggcaccgtgcagggcctgcaggaccagcaggagcacgtggtggccaccagccagcccaagaccatgggccaccagatcagcctgggcctgaccctgagactgtgggacgtgtacctggtggagggcgagcaggccctgatgcccatcaccagaatcgccttcaaggtgcagcagaagagactgaccaagaccagcagatgcggcccctgggccagattctgcaacagattcgtggacacctgggccagagacgaggacaccgtgctgaagcacctgagagccagcatgaagaagctgaccagaaagcagggcgacctgcccccccccgccaagcccgagcagggcagcagcgccagcagacccgtgcccgccagcagaggcggcaagaccctgtgcaagggcgacagacaggccccccccggcccccccgccagattccccagacccatctggagcgccagcccccccagagcccccagaagcagcaccccctgccccggcggcgccgtgagagaggacacctaccccgtgggcacccagggcgtgcccagccccgccctggcccagggcggcccccagggcagctggagattcctgcagtggaacagcatgcccagactgcccaccgacctggacgtggagggcccctggttcagacactacgacttcagacagagctgctgggtgagagccatcagccaggaggaccagctggccccctgctggcaggccgagcaccccgccgagagagtgagaagcgccttcgccgcccccagcaccgacagcgaccagggcacccccttcagagccagagacgagcagcagtgcgcccccaccagcggcccctgcctgtgcggcctgcacctggagagcagccagttcccccccggcttctag

SEQ ID NO: 101966 - DNA, 1584 bp, synthetic construct; identical to SEQ ID NO: 101965
  misc_feature 1..1584: note = Description of Artificial Sequence: Synthetic coding sequence
  source 1..1584: mol_type = other DNA

SEQ ID NO: 101967 - DNA, 1410 bp, synthetic construct
  misc_feature 1..1410: note = Description of Artificial Sequence: Synthetic coding sequence
  source 1..1410: mol_type = other DNA
atgctgggcgactgggagaagtacaagagcagcagaaagctgatcgacagagcctacaagggcatgcccatgaacatcagaggccccatgtggagcgtgctgctgaacatcgaggagatgaagctgaagaaccccggcagataccagatcatgaaggagaagggcaagagaagcagcgagcacatccagagaatcgacagagacatcagcggcaccctgagaaagcacatgttcttcagagacagatacggcaccaagcagagagagctgctgcacatcctgctggcctacgaggagtacaaccccgaggtgggctactgcagagacctgagccacatcgccgccctgttcctgctgtacctgcccgaggaggacgccttctgggccctggtgcagctgctggccagcgagagacacagcctgcagggcttccacagccccaacggcggcaccgtgcagggcctgcaggaccagcaggagcacgtggtggccaccagccagcccaagaccatgggccaccaggacaagaaggacctgtgcggccagtgcagccccctgggctgcctgatcagaatcctgatcgacggcatcagcctgggcctgaccctgagactgtgggacgtgtacctggtggagggcgagcaggccctgatgcccatcaccagaatcgccttcaaggtgcagcagaagagactgaccaagaccagcagatgcggcccctgggccagattctgcaacagattcgtggacacctgggccagagacgaggacaccgtgctgaagcacctgagagccagcatgaagaagctgaccagaaagcagggcgacctgcccccccccgccaagcccgagcagggcagcagcgccagcagacccgtgcccgccagcagaggcggcaagaccctgtgcaagggcgacagacaggccccccccggcccccccgccagattccccagacccatctggagcgccagcccccccagagcccccagaagcagcaccccctgccccggcggcgccgtgagagaggacacctaccccgtgggcacccagggcgtgcccagccccgccctggcccagggcggcccccagggcagctggagattcctgcagtggaacagcatgcccagactgcccaccgacctggacgtggagggcccctggttcagacactacgacttcagacagagctgctgggtgagagccatcagccaggaggaccagctggccccctgctggcaggccgagcaccccgccgagagagtgagaagcgccttcgccgcccccagcaccgacagcgaccagggcacccccttcagagccagagacgagcagcagtgcgcccccaccagcggcccctgcctgtgcggcctgcacctggagagcagccagttcccccccggcttctag

SEQ ID NO: 101968 - DNA, 1410 bp, synthetic construct
  misc_feature 1..1410: note = Description of Artificial Sequence: Synthetic coding sequence
  source 1..1410: mol_type = other DNA
atgctgggcgactgggagaagtacaagagcagcagaaagctgatcgacagagcctacaagggcatgcccatgaacatcagaggccccatgtggagcgtgctgctgaacatcgaggagatgaagctgaagaaccccggcagataccagatcatgaaggagaagggcaagagaagcagcgagcacatccagagaatcgacagagacatcagcggcaccctgagaaagcacatgttcttcagagacagatacggcaccaagcagagagagctgctgcacatcctgctggcctacgaggagtacaaccccgaggtgggctactgcagagacctgagccacatcgccgccctgttcctgctgtacctgcccgaggaggacgccttctgggccctggtgcagctgctggccagcgagagacacagcctgcagggcttccacagccccaacggcggcaccgtgcagggcctgcaggaccagcaggagcacgtggtggccaccagccagcccaagaccatgggccaccaggacaagaaggacctgtgcggccagtgcagccccctgggctgcctgatcagaatcctgatcgacggcatcagcctgggcctgaccctgagactgtgggacgtgtacctggtggagggcgagcaggccctgatgcccatcaccagaatcgccttcaaggtgcagcagaagagactgaccaagaccagcagatgcggcccctgggccagattctgcaacagattcgtggacacctgggccagagacgaggacaccgtgctgaagcacctgagagccagcatgaagaagctgaccagaaagcagggcgacctgcccccccccgccaagcccgagcagggcagcagcgccagcagacccgtgcccgccagcagaggcggcaagaccctgtgcaagggcgacagacaggccccccccggcccccccgcctggttccccagacccatctggagcgccagcccccccagagcccccagaagcagcaccccctgccccggcggcgccgtgagagaggacacctaccccgtgggcacccagggcgtgcccagccccgccctggcccagggcggcccccagggcagctggagattcctgcagtggaacagcatgcccagactgcccaccgacctggacgtggagggcccctggttcagacactacgacttcagacagagctgctgggtgagagccatcagccaggaggaccagctggccccctgctggcaggccgagcaccccgccgagagagtgagaagcgccttcgccgcccccagcaccgacagcgaccagggcacccccttcagagccagagacgagcagcagtgcgcccccaccagcggcccctgcctgtgcggcctgcacctggagagcagccagttcccccccggcttctag

SEQ ID NO: 101969 - DNA, 1650 bp, synthetic construct
  misc_feature 1..1650: note = Description of Artificial Sequence: Synthetic coding sequence
  source 1..1650: mol_type = other DNA
atggacgtggtggaggtggccggcagctggtgggcccaggagagagaggacatcatcatgaagtacgagaagggccaccaggccggcctgcccgaggacaagggccccaagcccttcagaagctacaacaacaacgtggaccacctgggcatcgtgcacgagaccgagctgccccccctgaccgccagagaggccaagcagatcagaagagagatcagcagaaagagcaagtgggtggacatgctgggcgactgggagaagtacaagagcagcagaaagctgatcgacagagcctacaagggcatgcccatgaacatcagaggccccatgtggagcgtgctgctgaacatcgaggagatgaagctgaagaaccccggcagataccagatcatgaaggagaagggcaagagaagcagcgagcacatccagagaatcgacagagacatcagcggcaccctgagaaagcacatgttcttcagagacagatacggcaccaagcagagagagctgctgcacatcctgctggcctacgaggagtacaaccccgaggtgggctactgcagagacctgagccacatcgccgccctgttcctgctgtacctgcccgaggaggacgccttctgggccctggtgcagctgctggccagcgagagacacagcctgcagggcttccacagccccaacggcggcaccgtgcagggcctgcaggaccagcaggagcacgtggtggccaccagccagcccaagaccatgggccaccaggacaagaaggacctgtgcggccagtgcagccccctgggctgcctgatcagaatcctgatcgacggcatcagcctgggcctgaccctgagactgtgggacgtgtacctggtggagggcgagcaggccctgatgcccatcaccagaatcgccttcaaggtgcagcagaagagactgaccaagaccagcagatgcggcccctgggccagattctgcaacagattcgtggacacctgggccagagacgaggacaccgtgctgaagcacctgagagccagcatgaagaagctgaccagaaagcagggcgacctgcccccccccgccaagcccgagcagggcagcagcgccagcagacccgtgcccgccagcagaggcggcaagaccctgtgcaagggcgacagacaggccccccccggcccccccgccagattccccagacccatctggagcgccagcccccccagagcccccagaagcagcaccccctgccccggcggcgccgtgagagaggacacctaccccgtgggcacccagggcgtgcccagccccgccctggcccagggcggcccccagggcagctggagattcctgcagtggaacagcatgcccagactgcccaccgacctggacgtggagggcccctggttcagacactacgacttcagacagagctgctgggtgagagccatcagccaggaggaccagctggccccctgctggcaggccgagcaccccgccgagagagtgagaagcgccttcgccgcccccagcaccgacagcgaccagggcacccccttcagagccagagacgagcagcagtgcgcccccaccagcggcccctgcctgtgcggcctgcacctggagagcagccagttcccccccggcttctag

SEQ ID NO: 101970 - DNA, 1410 bp, synthetic construct; identical to SEQ ID NO: 101968
  misc_feature 1..1410: note = Description of Artificial Sequence: Synthetic coding sequence
  source 1..1410: mol_type = other DNA

SEQ ID NO: 101971 - DNA, 3708 bp, synthetic construct
  misc_feature 1..3708: note = Description of Artificial Sequence: Synthetic coding sequence
  source 1..3708: mol_type = other DNA
atggagccccccagctgcatccaggacgagcccttcccccaccccctggagcccgagcccggcgtgagcgcccagcccggccccggcaagcccagcgacaagagattcagactgtggtacgtgggcggcagctgcctggaccacagaaccaccctgcccatgctgccctggctgatggccgagatcagaagaagaagccagaagcccgaggccggcggctgcggcgcccccgccgccagagaggtgatcctggtgctgagcgcccccttcctgagatgcgtgcccgcccccggcgccggcgccagcggcggcaccagccccagcgccacccagcccaaccccgccgtgttcatcttcgagcacaaggcccagcacatcagcagattcatccacaacagccacgacctgacctacttcgcctacctgatcaaggcccagcccgacgaccccgagagccagatggcctgccacgtgttcagagccaccgaccccagccaggtgcccgacgtgatcagcagcatcagacagctgagcaaggccgccatgaaggaggacgccaagcccagcaaggacaacgaggacgccttctacaacagccagaagttcgaggtgctgtactgcggcaaggtgaccgtgacccacaagaaggcccccagcagcctgatcgacgactgcatggagaagttcagcctgcacgagcagcagagactgaagatccagggcgagcagagaggccccgaccccggcgaggacctggccgacctggaggtggtggtgcccggcagccccggcgactgcctgcccgaggaggccgacggcaccgacacccacctgggcctgcccgccggcgccagccagcccgccctgaccagcagcagagtgtgcttccccgagagaatcctggaggacagcggcttcgacgagcagcaggagttcagaagcagatgcagcagcgtgaccggcgtgcagagaagagtgcacgagggcagccagaagagccagcccagaagaagacacgccagcgcccccagccacgtgcagcccagcgacagcgagaagaacagaaccatgctgttccaggtgggcagattcgagatcaacctgatcagccccgacaccaagagcgtggtgctggagaagaacttcaaggacatcagcagctgcagccagggcatcaagcacgtggaccacttcggcttcatctgcagagagagccccgagcccggcctgagccagtacatctgctacgtgttccagtgcgccagcgagagcctggtggacgaggtgatgctgaccctgaagcaggccttcagcaccgccgccgccctgcagagcgccaagacccagatcaagctgtgcgaggcctgccccatgcacagcctgcacaagctgtgcgagagaatcgagggcctgtacccccccagagccaagctggtgatccagagacacctgagcagcctgaccgacaacgagcaggccgacatcttcgagagagtgcagaagatgaagcccgtgagcgaccaggaggagaacgagctggtgatcctgcacctgagacagctgtgcgaggccaagcagaagacccacgtgcacatcggcgagggccccagcaccatcagcaacagcaccatccccgagaacgccaccagcagcggcagattcaagctggacatcctgaagaacaaggccaagagaagcctgaccagcagcctggagaacatcttcagcagaggcgccaacagaatgagaggcagactgggcagcgtggacagcttcgagagaagcaacagcctggccagcgagaaggactacagccccggcgacagcccccccggcaccccccccgccagcccccccagcagcgcctggcagaccttccccgaggaggacagcgacagcccccagttcagaagaagagcccacaccttcagccacccccccagcagcaccaagagaaagctgaacctgcaggacggcagagcccagggcgtgagaagccccctgctgagacagagcagcagcgagcagtgcagcgacggcgagggcagaaagagaaccagcagcacctgcagcaacgagagcctgagcgtgggcggcaccagcgtgacccccagaagaatcagctggagacagagaatcttcctgagagtggccagccccatgaacaagagccccagcgccatgcagcagcaggacggcctggacagaaacgagctgctgcccctgagccccctgagccccaccatggaggaggagcccctggtggtgttcctgagcggcgaggacgaccccgagaagatcgaggagagaaagaagagcaaggagctgagaagcctgtggagaaaggccatccaccagcagatcctgctgctgagaatggagaaggagaaccagaagctggaggccagcagagacgagctgcagagcagaaaggtgaagctggactacgaggaggtgggcgcctgccagaaggaggtgctgatcacctgggacaagaagctgctgaactgcagagccaagatcagatgcgacatggaggacatccacaccctgctgaaggagggcgtgcccaagagcagaagaggcgagatctggcagttcctggccctgcagtacagactgagacacagactgcccaacaagcagcagccccccgacatcagctacaaggagctgctgaagcagctgaccgcccagcagcacgccatcctggtggacctgggcagaaccttccccacccacccctacttcagcgtgcagctgggccccggccagctgagcctgttcaacctgctgaaggcctacagcctgctggacaaggaggtgggctactgccagggcatcagcttcgtggccggcgtgctgctgctgcacatgagcgaggagcaggccttcgagatgctgaagttcctgatgtacgacctgggcttcagaaagcagtacagacccgacatgatgagcctgcagatccagatgtaccagctgagcagactgctgcacgactaccacagagacctgtacaaccacctggaggagaacgagatcagccccagcctgtacgccgccccctggttcctgaccctgttcgccagccagttcagcctgggcttcgtggccagagtgttcgacatcatcttcctgcagggcaccgaggtgatcttcaaggtggccctgagcctgctgagcagccaggagaccctgatcatggagtgcgagagcttcgagaacatcgtggagttcctgaagaacaccctgcccgacatgaacaccagcgagatggagaagatcatcacccaggtgttcgagatggacatcagcaagcagctgcacgcctacgaggtggagtaccacgtgctgcaggacgagctgcaggagagcagctacagctgcgaggacagcgagaccctggagaagctggagagagccaacagccagctgaagagacagaacatggacctgctggagaagctgcaggtggcccacaccaagatccaggccctggagagcaacctggagaacctgctgaccagagagaccaagatgaagagcctgatcagaaccctggagcaggagaagatggcctaccagaagaccgtggagcagctgagaaagctgctgcccgccgacgccctggtgaactgcgacctgctgctgagagacctgaactgcaaccccaacaacaaggccaagatcggcaacaagccctag

SEQ ID NO: 101972 - DNA, 3897 bp, synthetic construct
  misc_feature 1..3897: note = Description of Artificial Sequence: Synthetic coding sequence
  source 1..3897: mol_type = other DNA
atggagccccccagctgcatccaggacgagcccttcccccaccccctggagcccgagcccggcgtgagcgcccagcccggccccggcaagcccagcgacaagagattcagactgtggtacgtgggcggcagctgcctggaccacagaaccaccctgcccatgctgccctggctgatggccgagatcagaagaagaagccagaagcccgaggccggcggctgcggcgcccccgccgccagagaggtgatcctggtgctgagcgcccccttcctgagatgcgtgcccgcccccggcgccggcgccagcggcggcaccagccccagcgccacccagcccaaccccgccgtgttcatcttcgagcacaaggcccagcacatcagcagattcatccacaacagccacgacctgacctacttcgcctacctgatcaaggcccagcccgacgaccccgagagccagatggcctgccacgtgttcagagccaccgaccccagccaggtgcccgacgtgatcagcagcatcagacagctgagcaaggccgccatgaaggaggacgccaagcccagcaaggacaacgaggacgccttctacaacagccagaagttcgaggtgctgtactgcggcaaggtgaccgtgacccacaagaaggcccccagcagcctgatcgacgactgcatggagaagttcagcctgcacgagcagcagagactgaagatccagggcgagcagagaggccccgaccccggcgaggacctggccgacctggaggtggtggtgcccggcagccccggcgactgcctgcccgaggaggccgacggcaccgacacccacctgggcctgcccgccggcgccagccagcccgccctgaccagcagcagagtgtgcttccccgagagaatcctggaggacagcggcttcgacgagcagcaggagttcagaagcagatgcagcagcgtgaccggcgtgcagagaagagtgcacgagggcagccagaagagccagcccagaagaagacacgccagcgcccccagccacgtgcagcccagcgacagcgagaagaacagaaccatgctgttccaggtgggcagattcgagatcaacctgatcagccccgacaccaagagcgtggtgctggagaagaacttcaaggacatcagcagctgcagccagggcatcaagcacgtggaccacttcggcttcatctgcagagagagccccgagcccggcctgagccagtacatctgctacgtgttccagtgcgccagcgagagcctggtggacgaggtgatgctgaccctgaagcaggccttcagcaccgccgccgccctgcagagcgccaagacccagatcaagctgtgcgaggcctgccccatgcacagcctgcacaagctgtgcgagagaatcgagggcctgtacccccccagagccaagctggtgatccagagacacctgagcagcctgaccgacaacgagcaggccgacatcttcgagagagtgcagaagatgaagcccgtgagcgaccaggaggagaacgagctggtgatcctgcacctgagacagctgtgcgaggccaagcagaagacccacgtgcacatcggcgagggccccagcaccatcagcaacagcaccatccccgagaacgccaccagcagcggcagattcaagctggacatcctgaagaacaaggccaagagaagcctgaccagcagcctggagaacatcttcagcagaggcgccaacagaatgagaggcagactgggcagcgtggacagcttcgagagaagcaacagcctggccagcgagaaggactacagccccggcgacagcccccccggcaccccccccgccagcccccccagcagcgcctggcagaccttccccgaggaggacagcgacagcccccagttcagaagaagagcccacaccttcagccacccccccagcagcaccaagagaaagctgaacctgcaggacggcagagcccagggcgtgagaagccccctgctgagacagagcagcagcgagcagtgcagcaacctgagcagcgtgagaagaatgtacaaggagagcaacagcagcagcagcctgcccagcctgcacaccagcttcagcgcccccagcttcaccgcccccagcttcctgaagagcttctaccagaacagcggcagactgagcccccagtacgagaacgagatcagacaggacaccgccagcgagagcagcgacggcgagggcagaaagagaaccagcagcacctgcagcaacgagagcctgagcgtgggcggcaccagcgtgacccccagaagaatcagctggagacagagaatcttcctgagagtggccagccccatgaacaagagccccagcgccatgcagcagcaggacggcctggacagaaacgagctgctgcccctgagccccctgagccccaccatggaggaggagcccctggtggtgttcctgagcggcgaggacgaccccgagaagatcgaggagagaaagaagagcaaggagctgagaagcctgtggagaaaggccatccaccagcagatcctgctgctgagaatggagaaggagaaccagaagctggaggccagcagagacgagctgcagagcagaaaggtgaagctggactacgaggaggtgggcgcctgccagaaggaggtgctgatcacctgggacaagaagctgctgaactgcagagccaagatcagatgcgacatggaggacatccacaccctgctgaaggagggcgtgcccaagagcagaagaggcgagatctggcagttcctggccctgcagtacagactgagacacagactgcccaacaagcagcagccccccgacatcagctacaaggagctgctgaagcagctgaccgcccagcagcacgccatcctggtggacctgggcagaaccttccccacccacccctacttcagcgtgcagctgggccccggccagctgagcctgttcaacctgctgaaggcctacagcctgctggacaaggaggtgggctactgccagggcatcagcttcgtggccggcgtgctgctgctgcacatgagcgaggagcaggccttcgagatgctgaagttcctgatgtacgacctgggcttcagaaagcagtacagacccgacatgatgagcctgcagatccagatgtaccagctgagcagactgctgcacgactaccacagagacctgtacaaccacctggaggagaacgagatcagccccagcctgtacgccgccccctggttcctgaccctgttcgccagccagttcagcctgggcttcgtggccagagtgttcgacatcatcttcctgcagggcaccgaggtgatcttcaaggtggccctgagcctgctgagcagccaggagaccctgatcatggagtgcgagagcttcgagaacatcgtggagttcctgaagaacaccctgcccgacatgaacaccagcgagatggagaagatcatcacccaggtgttcgagatggacatcagcaagcagctgcacgcctacgaggtggagtaccacgtgctgcaggacgagctgcaggagagcagctacagctgcgaggacagcgagaccctggagaagctggagagagccaacagccagctgaagagacagaacatggacctgctggagaagctgcaggtggcccacaccaagatccaggccctggagagcaacctggagaacctgctgaccagagagaccaagatgaagagcctgatcagaaccctggagcaggagaagatggcctaccagaagaccgtggagcagctgagaaagctgctgcccgccgacgccctggtgaactgcgacctgctgctgagagacctgaactgcaaccccaacaacaaggccaagatcggcaacaagccctag

SEQ ID NO: 101973 - DNA, 849 bp, synthetic construct
  misc_feature 1..849: note = Description of Artificial Sequence: Synthetic coding sequence
  source 1..849: mol_type = other DNA
gacaacgagcaggccgacatcttcgagagagtgcagaagatgaagcccgtgagcgaccaggaggagaacgagctggtgatcctgcacctgagacagctgtgcgaggccaagcagaagacccacgtgcacatcggcgagggccccagcaccatcagcaacagcaccatccccgagaacgccaccagcagcggcagattcaagctggacatcctgaagaacaaggccaagagaagcctgaccagcagcctggagaacatcttcagcagaggcgccaacagaatgagaggcagactgggcagcgtggacagcttcgagagaagcaacagcctggccagcgagaaggactacagccccggcgacagcccccccggcaccccccccgccagcccccccagcagcgcctggcagaccttccccgaggaggacagcgacagcccccagttcagaagaagagcccacaccttcagccacccccccagcagcaccaagagaaagctgaacctgcaggacggcagagcccagggcgtgagaagccccctgctgagacagagcagcagcgagcagtgcagcgacggcgagggcagaaagagaaccagcagcacctgcagcaacgagagcctgagcgtgggcggcaccagcgtgacccccagaagaatcagctggagacagagaatcttcctgagagtggccagccccatgaacaagagccccagcgccatgcagcagcaggacggcctggacagaaacgagctgctgcccctgagccccctgagccccaccatggaggaggagcccctggtggtgttcctgagcggcgaggacgaccccgagaagatcgaggagagatag

SEQ ID NO: 101974 - DNA, 1389 bp, synthetic construct
  misc_feature 1..1389: note = Description of Artificial Sequence: Synthetic coding sequence
  source 1..1389: mol_type = other DNA
atgaacaagagccccagcgccatgcagcagcaggacggcctggacagaaacgagctgctgcccctgagccccctgagccccaccatggaggaggagcccctggtggtgttcctgagcggcgaggacgaccccgagaagatcgaggagagaaagaagagcaaggagctgagaagcctgtggagaaaggccatccaccagcagatcctgctgctgagaatggagaaggagaaccagaagctggagggcgtgcccaagagcagaagaggcgagatctggcagttcctggccctgcagtacagactgagacacagactgcccaacaagcagcagccccccgacatcagctacaaggagctgctgaagcagctgaccgcccagcagcacgccatcctggtggacctgggcagaaccttccccacccacccctacttcagcgtgcagctgggccccggccagctgagcctgttcaacctgctgaaggcctacagcctgctggacaaggaggtgggctactgccagggcatcagcttcgtggccggcgtgctgctgctgcacatgagcgaggagcaggccttcgagatgctgaagttcctgatgtacgacctgggcttcagaaagcagtacagacccgacatgatgagcctgcagatccagatgtaccagctgagcagactgctgcacgactaccacagagacctgtacaaccacctggaggagaacgagatcagccccagcctgtacgccgccccctggttcctgaccctgttcgccagccagttcagcctgggcttcgtggccagagtgttcgacatcatcttcctgcagggcaccgaggtgatcttcaaggtggccctgagcctgctgagcagccaggagaccctgatcatggagtgcgagagcttcgagaacatcgtggagttcctgaagaacaccctgcccgacatgaacaccagcgagatggagaagatcatcacccaggtgttcgagatggacatcagcaagcagctgcacgcctacgaggtggagtaccacgtgctgcaggacgagctgcaggagagcagctacagctgcgaggacagcgagaccctggagaagctggagagagccaacagccagctgaagagacagaacatggacctgctggagaagctgcaggtggcccacaccaagatccaggccctggagagcaacctggagaacctgctgaccagagagaccaagatgaagagcctgatcagaaccctggagcaggagaagatggcctaccagaagaccgtggagcagctgagaaagctgctgcccgccgacgccctggtgaactgcgacctgctgctgagagacctgaactgcaaccccaacaacaaggccaagatcggcaacaagccctag

SEQ ID NO: 101975 - DNA, 3873 bp, synthetic construct
  misc_feature 1..3873: note = Description of Artificial Sequence: Synthetic coding sequence
  source 1..3873: mol_type = other DNA
atggagccccccagctgcatccaggacgagcccttcccccaccccctggagcccgagcccggcgtgagcgcccagcccggccccggcaagcccagcgacaagagattcagactgtggtacgtgggcggcagctgcctggaccacagaaccaccctgcccatgctgccctggctgatggccgagatcagaagaagaagccagaagcccgaggccggcggctgcggcgcccccgccgccagagaggtgatcctggtgctgagcgcccccttcctgagatgcgtgcccgcccccggcgccggcgccagcggcggcaccagccccagcgccacccagcccaaccccgccgtgttcatcttcgagcacaaggcccagcacatcagcagattcatccacaacagccacgacctgacctacttcgcctacctgatcaaggcccagcccgacgaccccgagagccagatggcctgccacgtgttcagagccaccgaccccagccaggtgcccgacgtgatcagcagcatcagacagctgagcaaggccgccatgaaggaggacgccaagcccagcaaggacaacgaggacgccttctacaacagccagaagttcgaggtgctgtactgcggcaaggtgaccgtgacccacaagaaggcccccagcagcctgatcgacgactgcatggagaagttcagcctgcacgagcagcagagactgaagatccagggcgagcagagaggccccgaccccggcgaggacctggccgacctggaggtggtggtgcccggcagccccggcgactgcctgcccgaggaggccgacggcaccgacacccacctgggcctgcccgccggcgccagccagcccgccctgaccagcagcagagtgtgcttccccgagagaatcctggaggacagcggcttcgacgagcagcaggagttcagaagcagatgcagcagcgtgaccggcgtgcagagaagagtgcacgagggcagccagaagagccagcccagaagaagacacgccagcgcccccagccacgtgcagcccagcgacagcgagaagaacagaaccatgctgttccaggtgggcagattcgagatcaacctgatcagccccgacaccaagagcgtggtgctggagaagaacttcaaggacatcagcagctgcagccagggcatcaagcacgtggaccacttcggcttcatctgcagagagagccccgagcccggcctgagccagtacatctgctacgtgttccagtgcgccagcgagagcctggtggacgaggtgatgctgaccctgaagcaggccttcagcaccgccgccgccctgcagagcgccaagacccagatcaagctgtgcgaggcctgccccatgcacagcctgcacaagctgtgcgagagaatcgagggcctgtacccccccagagccaagctggtgatccagagacacctgagcagcctgaccgacaacgagcaggccgacatcttcgagagagtgcagaagatgaagcccgtgagcgaccaggaggagaacgagctggtgatcctgcacctgagacagctgtgcgaggccaagcagaagacccacgtgcacatcggcgagggccccagcaccatcagcaacagcaccatccccgagaacgccaccagcagcggcagattcaagctggacatcctgaagaacaaggccaagagaagcctgaccagcagcctggagaacatcttcagcagaggcgccaacagaatgagaggcagactgggcagcgtggacagcttcgagagaagcaacagcctggccagcgagaaggactacagccccggcgacagcccccccggcaccccccccgccagcccccccagcagcgcctggcagaccttccccgaggaggacagcgacagcccccagttcagaagaagagcccacaccttcagccacccccccagcagcaccaagagaaagctgaacctgcaggacggcagagcccagggcgtgagaagccccctgctgagacagagcagcagcgagcagtgcagcaacctgagcagcgtgagaagaatgtacaaggagagcaacagcagcagcagcctgcccagcctgcacaccagcttcagcgcccccagcttcaccgcccccagcttcctgaagagcttctaccagaacagcggcagactgagcccccagtacgagaacgagatcagcgacggcgagggcagaaagagaaccagcagcacctgcagcaacgagagcctgagcgtgggcggcaccagcgtgacccccagaagaatcagctggagacagagaatcttcctgagagtggccagccccatgaacaagagccccagcgccatgcagcagcaggacggcctggacagaaacgagctgctgcccctgagccccctgagccccaccatggaggaggagcccctggtggtgttcctgagcggcgaggacgaccccgagaagatcgaggagagaaagaagagcaaggagctgagaagcctgtggagaaaggccatccaccagcagatcctgctgctgagaatggagaaggagaaccagaagctggaggccagcagagacgagctgcagagcagaaaggtgaagctggactacgaggaggtgggcgcctgccagaaggaggtgctgatcacctgggacaagaagctgctgaactgcagagccaagatcagatgcgacatggaggacatccacaccctgctgaaggagggcgtgcccaagagcagaagaggcgagatctggcagttcctggccctgcagtacagactgagacacagactgcccaacaagcagcagccccccgacatcagctacaaggagctgctgaagcagctgaccgcccagcagcacgccatcctggtggacctgggcagaaccttccccacccacccctacttcagcgtgcagctgggccccggccagctgagcctgttcaacctgctgaaggcctacagcctgctggacaaggaggtgggctactgccagggcatcagcttcgtggccggcgtgctgctgctgcacatgagcgaggagcaggccttcgagatgctgaagttcctgatgtacgacctgggcttcagaaagcagtacagacccgacatgatgagcctgcagatccagatgtaccagctgagcagactgctgcacgactaccacagagacctgtacaaccacctggaggagaacgagatcagccccagcctgtacgccgccccctggttcctgaccctgttcgccagccagttcagcctgggcttcgtggccagagtgttcgacatcatcttcctgcagggcaccgaggtgatcttcaaggtggccctgagcctgctgagcagccaggagaccctgatcatggagtgcgagagcttcgagaacatcgtggagttcctgaagaacaccctgcccgacatgaacaccagcgagatggagaagatcatcacccaggtgttcgagatggacatcagcaagcagctgcacgcctacgaggtggagtaccacgtgctgcaggacgagctgcaggagagcagctacagctgcgaggacagcgagaccctggagaagctggagagagccaacagccagctgaagagacagaacatggacctgctggagaagctgcaggtggcccacaccaagatccaggccctggagagcaacctggagaacctgctgaccagagagaccaagatgaagagcctgatcagaaccctggagcaggagaagatggcctaccagaagaccgtggagcagctgagaaagctgctgcccgccgacgccctggtgaactgcgacctgctgctgagagacctgaactgcaaccccaacaacaaggccaagatcggcaacaagccctag

SEQ ID NO: 101976 - DNA, 1197 bp, synthetic construct
  misc_feature 1..1197: note = Description of Artificial Sequence: Synthetic coding sequence
  source 1..1197: mol_type = other DNA
atgcacttcagcaccgtgaccagagacatggaggccttcaccgccagcagcctgagcagcctgggcgccgccggcggcttccccggcgccgccagccccggcgccgacccctacggccccagagagccccccccccccccccccagatacgacccctgcgccgccgccgcccccggcgcccccggcccccccccccccccccacgcctaccccttcgcccccgccgccggcgccgccaccagcgccgccgccgagcccgagggccccggcgccagctgcgccgccgccgccaaggcccccgtgaagaagaacgccaaggtggccggcgtgagcgtgcagctggagatgaaggccctgtgggacgagttcaaccagctgggcaccgagatgatcgtgaccaaggccggcagaagaatgttccccaccttccaggtgaagctgttcggcatggaccccatggccgactacatgctgctgatggacttcgtgcccgtggacgacaagagatacagatacgccttccacagcagcagctggctggtggccggcaaggccgaccccgccacccccggcagagtgcactaccaccccgacagccccgccaagggcgcccagtggatgaagcagatcgtgagcttcgacaagctgaagctgaccaacaacctgctggacgacaacggccacatcatcctgaacagcatgcacagataccagcccagattccacgtggtgtacgtggaccccagaaaggacagcgagaagtacgccgaggagaacttcaagaccttcgtgttcgaggagaccagattcaccgccgtgaccgcctaccagaaccacagaatcacccagctgaagatcgccagcaaccccttcgccaagggcttcagagactgcgaccccgaggactggcccagaaaccacagacccggcgccctgcccctgatgagcgccttcgccagaagcagaaaccccgtggccagccccacccagcccagcggcaccgagaagggcggccacgtgctgaaggacaaggaggtgaaggccgagaccagcagaaacacccccgagagagaggtggagctgctgagagacgccggcggctgcgtgaacctgggcctgccctgccccgccgagtgccagcccttcaacacccagggcctggtggccggcagaaccgccggcgacagactgtgctag

SEQ ID NO: 101977 - DNA, 1488 bp, synthetic construct
  misc_feature 1..1488: note = Description of Artificial Sequence: Synthetic coding sequence
  source 1..1488: mol_type = other DNA
atgcacttcagcaccgtgaccagagacatggaggccttcaccgccagcagcctgagcagcctgggcgccgccggcggcttccccggcgccgccagccccggcgccgacccctacggccccagagagccccccccccccccccccagatacgacccctgcgccgccgccgcccccggcgcccccggcccccccccccccccccacgcctaccccttcgcccccgccgccggcgccgccaccagcgccgccgccgagcccgagggccccggcgccagctgcgccgccgccgccaaggcccccgtgaagaagaacgccaaggtggccggcgtgagcgtgcagctggagatgaaggccctgtgggacgagttcaaccagctgggcaccgagatgatcgtgaccaaggccggcagaagaatgttccccaccttccaggtgaagctgttcggcatggaccccatggccgactacatgctgctgatggacttcgtgcccgtggacgacaagagatacagatacgccttccacagcagcagctggctggtggccggcaaggccgaccccgccacccccggcagagtgcactaccaccccgacagccccgccaagggcgcccagtggatgaagcagatcgtgagcttcgacaagctgaagctgaccaacaacctgctggacgacaacggccacatcatcctgaacagcatgcacagataccagcccagattccacgtggtgtacgtggaccccagaaaggacagcgagaagtacgccgaggagaacttcaagaccttcgtgttcgaggagaccagattcaccgccgtgaccgcctaccagaaccacagaatcacccagctgaagatcgccagcaaccccttcgccaagggcttcagagactgcgaccccgaggactggcccagaaaccacagacccggcgccctgcccctgatgagcgccttcgccagaagcagaaaccccgtggccagccccacccagcccagcggcaccgagaaggacgccgccgaggccagaagagagttccagagagacgccggcggccccgccgtgctgggcgaccccgcccaccccccccagctgctggccagagtgctgagccccagcctgcccggcgccggcggcgccggcggcctggtgcccctgcccggcgcccccggcggcagacccagcccccccaaccccgagctgagactggaggcccccggcgccagcgagcccctgcaccaccacccctacaagtaccccgccgccgcctacgaccactacctgggcgccaagagcagacccgccccctaccccctgcccggcctgagaggccacggctaccacccccacgcccacccccaccaccaccaccaccccgtgagccccgccgccgccgccgccgccgccgccgccgccgccgccgccgccgccaacatgtacagcagcgccggcgccgccccccccggcagctacgactactgccccagatag

SEQ ID NO: 101978 - DNA, 1119 bp, synthetic construct
  misc_feature 1..1119: note = Description of Artificial Sequence: Synthetic coding sequence
  source 1..1119: mol_type = other DNA
atgcacttcagcaccgtgaccagagacatggaggccttcaccgccagcagcctgagcagcctgggcgccgccggcggcttccccggcgccgccagccccggcgccgacccctacggccccagagagccccccccccccccccccagatacgacccctgcgccgccgccgcccccggcgcccccggcccccccccccccccccacgcctaccccttcgcccccgccgccggcgccgccaccagcgccgccgccgagcccgagggccccggcgccagctgcgccgccgccgccaaggcccccgtgaagaagaacgccaaggtggccggcgtgagcgtgcagctggagatgaaggccctgtgggacgagttcaaccagctgggcaccgagatgatcgtgaccaaggccggcagaagaatgttccccaccttccaggtgaagctgttcggcatggaccccatggccgactacatgctgctgatggacttcgtgcccgtggacgacaagagatacagatacgccttccacagcagcagctggctggtggccggcaaggccgaccccgccacccccggcagagtgcactaccaccccgacagccccgccaagggcgcccagtggatgaagcagatcgtgagcttcgacaagctgaagctgaccaacaacctgctggacgacaacggccacatcatcctgaacagcatgcacagataccagcccagattccacgtggtgtacgtggaccccagaaaggacagcgagaagtacgccgaggagaacttcaagaccttcgtgttcgaggagaccagattcaccgccgtgaccgcctaccagaaccacagaatcacccagctgaagatcgccagcaaccccttcgccaagggcttcagagactgcgaccccgaggactggcccagaaaccacagacccggcgccctgcccctgatgagcgccttcgccagaagcagaaaccccgtggccagccccacccagcccagcggcaccgagaagggcctggtgaccgagggcagcggcctgcagcccggcctgctggacgtgctgctgaagccccccagcaagaagagcgagagcctgagacccccccactgcaaggacacctag

SEQ ID NO: 101979 - DNA, 1158 bp, synthetic construct
  misc_feature 1..1158: note = Description of Artificial Sequence: Synthetic coding sequence
  source 1..1158: mol_type = other DNA
atggccgccttcctgagcgccggcctgggcatcctggcccccagcgagacctaccccctgcccaccaccagcagcggctgggagcccagactgggcagccccttccccagcggcccctgcaccagcagcaccggcgcccaggccgtggccgagcccaccggccagggccccaagaaccccagagtgagcagagtgaccgtgcagctggagatgaagcccctgtgggaggagttcaaccagctgggcaccgagatgatcgtgaccaaggccggcagaagaatgttcccccccttccaggtgaagatcctgggcatggacagcctggccgactacgccctgctgatggacttcatccccctggacgacaagagatacagatacgccttccacagcagcgcctggctggtggccggcaaggccgaccccgccacccccggcagagtgcacttccaccccgacagccccgccaagggcgcccagtggatgagacagatcgtgagcttcgacaagctgaagctgaccaacaacctgctggacgacaacggccacatcatcctgaacagcatgcacagataccagcccagattccacgtggtgttcgtggaccccagaaaggacagcgagagatacgcccaggagaacttcaagagcttcatcttcaccgagacccagttcaccgccgtgaccgcctaccagaaccacagaatcacccagctgaagatcgccagcaaccccttcgccaagggcttcagagagagcgacctggacagctggcccgtggcccccagacccctgctgagcgtgcccgccagaagccacagcagcctgagcccctgcgtgctgaagggcgccaccgacagagagaaggaccccaacaaggccagcgccagcaccagcaagacccccgcctggctgcaccaccagctgctgcccccccccgaggtgctgctggcccccgccacctacagacccgtgacctaccagagcctgtacagcggcgcccccagccacctgggcatccccagaaccagacccgccccctaccccctgcccaacatcagagccgacagagaccagggcggcctgcccctgcccgccggcctgggcctgctgagccccaccgtggtgtgcctgggccccggccaggacagccagtag

SEQ ID NO: 101980 - DNA, 2454 bp, synthetic construct
  misc_feature 1..2454: note = Description of Artificial Sequence: Synthetic coding sequence
  source 1..2454: mol_type = other DNA
atgatggacggccccagaagcgacgtgggcagatggggcggcaaccccctgcagccccccaccacccccagccccgagcccgagcccgagcccgacggcagaagcagaagaggcggcggcagaagcttctgggccagatgctgcggctgctgcagctgcagaaacgccgccgacgacgactggggccccgagcccagcgacagcagaggcagaggcagcagcagcggcaccagaagacccggcagcagaggcagcgacagcagaagacccgtgagcagaggcagcggcgtgaacgccgccggcgacggcaccatcagagagggcatgctggtggtgaacggcgtggacctgctgagcagcagaagcgaccagaacagaagagagcaccacaccgacgagtacgagtacgacgagctgatcgtgagaagaggccagcccttccacatgctgctgctgctgagcagaacctacgagagcagcgacagaatcaccctggagctgctgatcggcaacaaccccgaggtgggcaagggcacccacgtgatcatccccgtgggcaagggcggcagcggcggctggaaggcccaggtggtgaaggccagcggccagaacctgaacctgagagtgcacaccagccccaacgccatcatcggcaagttccagttcaccgtgagaacccagagcgacgccggcgagttccagctgcccttcgaccccagaaacgagatctacatcctgttcaacccctggtgccccgaggacatcgtgtacgtggaccacgaggactggagacaggagtacgtgctgaacgagagcggcagaatctactacggcaccgaggcccagatcggcgagagaacctggaactacggccagttcgaccacggcgtgctggacgcctgcctgtacatcctggacagaagaggcatgccctacggcggcagaggcgaccccgtgaacgtgagcagagtgatcagcgccatggtgaacagcctggacgacaacggcgtgctgatcggcaactggagcggcgactacagcagaggcaccaaccccagcgcctgggtgggcagcgtggagatcctgctgagctacctgagaaccggctacagcgtgccctacggccagtgctgggtgttcgccggcgtgaccaccaccgtgctgagatgcctgggcctggccaccagaaccgtgaccaacttcaacagcgcccacgacaccgacaccagcctgaccatggacatctacttcgacgagaacatgaagcccctggagcacctgaaccacgacagcgtgtggaacttccacgtgtggaacgactgctggatgaagagacccgacctgcccagcggcttcgacggctggcaggtggtggacgccaccccccaggagaccagcagcggcatcttctgctgcggcccctgcagcgtggagagcatcaagaacggcctggtgtacatgaagtacgacacccccttcatcttcgccgaggtgaacagcgacaaggtgtactggcagagacaggacgacggcagcttcaagatcgtgtacgtggaggagaaggccatcggcaccctgatcgtgaccaaggccatcagcagcaacatgagagaggacatcacctacctgtacaagcaccccgagggcagcgacgccgagagaaaggccgtggagaccgccgccgcccacggcagcaagcccaacgtgtacgccaacagaggcagcgccgaggacgtggccatgcaggtggaggcccaggacgccgtgatgggccaggacctgatggtgagcgtgatgctgatcaaccacagcagcagcagaagaaccgtgaagctgcacctgtacctgagcgtgaccttctacaccggcgtgagcggcaccatcttcaaggagaccaagaaggaggtggagctggcccccggcgccagcgacagagtgaccatgcccgtggcctacaaggagtacagaccccacctggtggaccagggcgccatgctgctgaacgtgagcggccacgtgaaggagagcggccaggtgctggccaagcagcacaccttcagactgagaacccccgacctgagcctgaccctgctgggcgccgccgtggtgggccaggagtgcgaggtgcagatcgtgttcaagaaccccctgcccgtgaccctgaccaacgtggtgttcagactggagggcagcggcctgcagagacccaagatcctgaacgtgggcgacatcggcggcaacgagaccgtgaccctgagacagagcttcgtgcccgtgagacccggccccagacagctgatcgccagcctggacagcccccagctgagccaggtgcacggcgtgatccaggtggacgtggcccccgcccccggcgacggcggcttcttcagcgacgccggcggcgacagccacctgggcgagaccatccccatggccagcagaggcggcgcctag

SEQ ID NO: 101981 - DNA, 1200 bp, synthetic construct
  misc_feature 1..1200: note = Description of Artificial Sequence: Synthetic coding sequence
  source 1..1200: mol_type = other DNA
atgcacaagtaccagcccagagtgcacgtgatcagaaaggacttcagcagcgacctgagccccaccaagcccgtgcccgtgggcgacggcgtgaagaccttcaacttccccgagaccgtgttcaccaccgtgaccgcctaccagaaccagcagatcaccagactgaagatcgacagaaaccccttcgccaagggcttcagagacagcggcagaaacagaaccggcctggaggccatcatggagacctacgccttctggagaccccccgtgagaaccctgaccttcgaggacttcaccaccatgcagaagcagcaggccagcaagaagaccagccagggctacaccgtgaaccagcacagcagcgagaccgacgccatcgagctgtacgagagaagagtgtggctgatggagagaagaggcagcaccggcaccagccccaccaccagcagcaccggcacccccagccccagcgccagcagccacctgctgagccccagctgcagcccccccaccttccacctggcccccaacaccttcaacgtgggctgcagagagagccagctgtgcaacctgaacctgagcgactaccccccctgcgccagaagcaacatggccgccctgcagagctaccccggcctgagcgacagcggctacaacagactgcagagcggcaccaccagcgccacccagcccagcgagaccttcatgccccagagaacccccagcctgatcagcggcatccccaccccccccagcctgcccggcaacagcaagatggaggcctacggcggccagctgggcagcttccccaccagccagttccagtacgtgatgcaggccggcaacgccgccagcagcagcagcagcccccacatgttcggcggcagccacatgcagcagagcagctacaacgccttcagcctgcacaacccctacaacctgtacggctacaacttccccaccagccccagactggccgccagccccgagaagctgagcgccagccagagcaccctgctgtgcagcagccccagcaacggcgccttcggcgagagacagtacctgcccagcggcatggagcacagcatgcacatgatcagccccagccccaacaaccagcaggccaccaacacctgcgacggcagacagtacggcgccgtgcccggcagcagcagccagatgagcgtgcacatggtgtag

SEQ ID NO: 101982 - DNA, 1809 bp, synthetic construct
  misc_feature 1..1809: note = Description of Artificial Sequence: Synthetic coding sequence
  source 1..1809: mol_type = other DNA
atgagcgagagaagaagaagcgccgtggccctgagcagcagagcccacgccttcagcgtggaggccctgatcggcagcaacaagaagagaaagctgagagactgggaggagaagggcctggacctgagcatggaggccctgagccccgccggccccctgggcgacaccgaggacgccgccgcccacggcctggagccccaccccgacagcgagcagagcaccggcagcgacagcgaggtgctgaccgagagaaccagctgcagcttcagcacccacaccgacctggccagcggcgccgccggccccgtgcccgccgccatgagcagcatggaggagatccaggtggagctgcagtgcgccgacctgtggaagagattccacgacatcggcaccgagatgatcatcaccaaggccggcagaagaatgttccccgccatgagagtgaagatcaccggcctggacccccaccagcagtactacatcgccatggacatcgtgcccgtggacaacaagagatacagatacgtgtaccacagcagcaagtggatggtggccggcaacgccgacagccccgtgccccccagagtgtacatccaccccgacagcctggccagcggcgacacctggatgagacaggtggtgagcttcgacaagctgaagctgaccaacaacgagctggacgaccagggccacatcatcctgcacagcatgcacaagtaccagcccagagtgcacgtgatcagaaaggacttcagcagcgacctgagccccaccaagcccgtgcccgtgggcgacggcgtgaagaccttcaacttccccgagaccgtgttcaccaccgtgaccgcctaccagaaccagcagatcaccagactgaagatcgacagaaaccccttcgccaagggcttcagagacagcggcagaaacagaaccggcctggaggccatcatggagacctacgccttctggagaccccccgtgagaaccctgaccttcgaggacttcaccaccatgcagaagcagcagggcggcagcaccggcaccagccccaccaccagcagcaccggcacccccagccccagcgccagcagccacctgctgagccccagctgcagcccccccaccttccacctggcccccaacaccttcaacgtgggctgcagagagagccagctgtgcaacctgaacctgagcgactaccccccctgcgccagaagcaacatggccgccctgcagagctaccccggcctgagcgacagcggctacaacagactgcagagcggcaccaccagcgccacccagcccagcgagaccttcatgccccagagaacccccagcctgatcagcggcatccccaccccccccagcctgcccggcaacagcaagatggaggcctacggcggccagctgggcagcttccccaccagccagttccagtacgtgatgcaggccggcaacgccgccagcagcagcagcagcccccacatgttcggcggcagccacatgcagcagagcagctacaacgccttcagcctgcacaacccctacaacctgtacggctacaacttccccaccagccccagactggccgccagccccgagaagctgagcgccagccagagcaccctgctgtgcagcagccccagcaacggcgccttcggcgagagacagtacctgcccagcggcatggagcacagcatgcacatgatcagccccagccccaacaaccagcaggccaccaacacctgcgacggcagacagtacggcgccgtgcccggcagcagcagccagatgagcgtgcacatggtgtag

SEQ ID NO: 101983 - DNA, 762 bp, synthetic construct
  misc_feature 1..762: note = Description of Artificial Sequence: Synthetic coding sequence
  source 1..762: mol_type = other DNA
agagtgagaaccggcctggaggccatcatggagacctacgccttctggagaccccccgtgagaaccctgaccttcgaggacttcaccaccatgcagaagcagcaggccagcaagaagaccagccagggctacaccgtgaaccagcacagcagcgagaccgacgccatcgagctgtacgagagaagagtgtggctgatggagagaagaggcagcaccggcaccagccccaccaccagcagcaccggcacccccagccccagcgccagcagccacctgctgagccccagctgcagcccccccaccttccacctggcccccaacaccttcaacgtgggctgcagagagagccagctgtgcaacctgaacctgagcgactaccccccctgcgccagaagcaacatggccgccctgcagagctaccccggcctgagcgacagcggctacaacagactgcagagcggcaccaccagcgccacccagcccagcgagaccttcatgccccagagaacccccagcctgatcagcggcatccccaccccccccagcctgcccaccgccagatggaagcccaccgtggccagctggggccccttccccctgcccagcttcagcatgagctgcagacaggccatgctgccccccgccccccaccaccacacctgcagcggcgccgccacctgcagcagagcccccaccatgcccagccccttcaccaccctgaccacctgcatggacaccatcagccccctgcccctgggctag

SEQ ID NO: 101984 - DNA, 993 bp, synthetic construct
  misc_feature 1..993: note = Description of Artificial Sequence: Synthetic coding sequence
  source 1..993: mol_type = other DNA
ggcagaaacagaaccggcctggaggccatcatggagacctacgccttctggagaccccccgtgagaaccctgaccttcgaggacttcaccaccatgcagaagcagcaggccagcaagaagaccagccagggctacaccgtgaaccagcacagcagcgagaccgacgccatcgagctgtacgagagaagagtgtggctgatggagagaagaggcagcaccggcaccagccccaccaccagcagcaccggcacccccagccccagcgccagcagccacctgctgagccccagctgcagcccccccaccttccacctggcccccaacaccttcaacgtgggctgcagagagagccagctgtgcaacctgaacctgagcgactaccccccctgcgccagaagcaacatggccgccctgcagagctaccccggcctgagcgacagcggctacaacagactgcagagcggcaccaccagcgccacccagcccagcgagaccttcatgccccagagaacccccagcctgatcagcggcatccccaccccccccagcctgcccggcaacagcaagatggaggcctacggcggccagctgggcagcttccccaccagccagttccagtacgtgatgcaggccggcaacgccgccagcagcagcagcagcccccacatgttcggcggcagccacatgcagcagagcagctacaacgccttcagcctgcacaacccctacaacctgtacggctacaacttccccaccagccccagactggccgccagccccgagaagctgagcgccagccagagcaccctgctgtgcagcagccccagcaacggcgccttcggcgagagacagtacctgcccagcggcatggagcacagcatgcacatgatcagccccagccccaacaaccagcaggccaccaacacctgcgacggcagacagtacggcgccgtgcccggcagcagcagccagatgagcgtgcacatggtgtag

SEQ ID NO: 101985 - DNA, 1347 bp, synthetic construct
  misc_feature 1..1347: note = Description of Artificial Sequence: Synthetic coding sequence
  source 1..1347: mol_type = other DNA
atggccatgagcgagctgggcaccagaaagcccagcgacggcaccgtgagccacctgctgaacgtggtggagagcgagctgcaggccggcagagagaagggcgaccccaccgagaagcagctgcagatcatcctggaggacgcccccctgtggcagagattcaaggaggtgaccaacgagatgatcgtgaccaagaacggcagaagaatgttccccgtgctgaagatcagcgtgaccggcctggaccccaacgccatgtacagcctgctgctggacttcgtgcccaccgacagccacagatggaagtacgtgaacggcgagtgggtgcccgccggcaagcccgaggtgagcagccacagctgcgtgtacatccaccccgacagccccaacttcggcgcccactggatgaaggcccccatcagcttcagcaaggtgaagctgaccaacaagctgaacggcggcggccagatcatgctgaacagcctgcacaagtacgagccccaggtgcacatcgtgagagtgggcagcgcccacagaatggtgaccaactgcagcttccccgagacccagttcatcgccgtgaccgcctaccagaacgaggagatcaccgccctgaagatcaagtacaaccccttcgccaaggccttcctggacgccaaggagagaaaccacctgagagacgtgcccgaggccatcagcgagagccagcacgtgacctacagccacctgggcggctggatcttcagcaaccccgacggcgtgtgcaccgccggcaacagcaactaccagtacgccgcccccctgcccctgcccgccccccacacccaccacggctgcgagcactacagcggcctgagaggccacagacaggccccctaccccagcgcctacatgcacagaaaccacagccccagcgtgaacctgatcgagagcagcagcaacaacctgcaggtgttcagcggccccgacagctggaccagcctgagcagcaccccccacgccagcatcctgagcgtgccccacaccaacggccccatcaaccccggccccagcccctacccctgcctgtggaccatcagcaacggcgccggcggccccagcggccccggccccgaggtgcacgccagcacccccggcgccttcctgctgggcaaccccgccgtgaccagcccccccagcgtgctgagcacccaggcccccaccagcgccggcgtggaggtgctgggcgagcccagcctgaccagcatcgccgtgagcacctggaccgccgtggccagccaccccttcgccggctggggcggccccggcgccggcggccaccacagccccagcagcctggacggctag

SEQ ID NO: 101986 - DNA, 978 bp, synthetic construct
  misc_feature 1..978: note = Description of Artificial Sequence: Synthetic coding sequence
  source 1..978: mol_type = other DNA
atgatcgtgaccaagaacggcagaagaatgttccccgtgctgaagatcagcgtgaccggcctggaccccaacgccatgtacagcctgctgctggacttcgtgcccaccgacagccacagatggaagtacgtgaacggcgagtgggtgcccgccggcaagcccgaggtgagcagccacagctgcgtgtacatccaccccgacagccccaacttcggcgcccactggatgaaggcccccatcagcttcagcaaggtgaagctgaccaacaagctgaacggcggcggccagatcatgctgaacagcctgcacaagtacgagccccaggtgcacatcgtgagagtgggcagcgcccacagaatggtgaccaactgcagcttccccgagacccagttcatcgccgtgaccgcctaccagaacgaggagatcaccgccctgaagatcaagtacaaccccttcgccaaggccttcctggacgccaaggagagaaaccacctgagagacgtgcccgaggccatcagcgagagccagcacgtgacctacagccacctgaacctgatcgagagcagcagcaacaacctgcaggtgttcagcggccccgacagctggaccagcctgagcagcaccccccacgccagcatcctgagcgtgccccacaccaacggccccatcaaccccggccccagcccctacccctgcctgtggaccatcagcaacggcgccggcggccccagcggccccggccccgaggtgcacgccagcacccccggcgccttcctgctgggcaaccccgccgtgaccagcccccccagcgtgctgagcacccaggcccccaccagcgccggcgtggaggtgctgggcgagcccagcctgaccagcatcgccgtgagcacctggaccgccgtggccagccaccccttcgccggctggggcggccccggcgccggcggccaccacagccccagcagcctggacggctag

SEQ ID NO: 101987 - DNA, 957 bp, synthetic construct
  misc_feature 1..957: note = Description of Artificial Sequence: Synthetic coding sequence
  source 1..957: mol_type = other DNA
tgaagaatgttccccgtgctgaagatcagcgtgaccggcctggaccccaacgccatgtacagcctgctgctggacttcgtgcccaccgacagccacagatggaagtacgtgaacggcgagtgggtgcccgccggcaagcccgaggtgagcagccacagctgcgtgtacatccaccccgacagccccaacttcggcgcccactggatgaaggcccccatcagcttcagcaaggtgaagctgaccaacaagctgaacggcggcggccagatcatgctgaacagcctgcacaagtacgagccccaggtgcacatcgtgagagtgggcagcgcccacagaatggtgaccaactgcagcttccccgagacccagttcatcgccgtgaccgcctaccagaacgaggagatcaccgccctgaagatcaagtacaaccccttcgccaaggccttcctggacgccaaggagagaaaccacctgagagacgtgcccgaggccatcagcgagagccagcacgtgacctacagccacctgaacctgatcgagagcagcagcaacaacctgcaggtgttcagcggccccgacagctggaccagcctgagcagcaccccccacgccagcatcctgagcgtgccccacaccaacggccccatcaaccccggccccagcccctacccctgcctgtggaccatcagcaacggcgccggcggccccagcggccccggccccgaggtgcacgccagcacccccggcgccttcctgctgggcaaccccgccgtgaccagcccccccagcgtgctgagcacccaggcccccaccagcgccggcgtggaggtgctgggcgagcccagcctgaccagcatcgccgtgagcacctggaccgccgtggccagccaccccttcgccggctggggcggccccggcgccggcggccaccacagccccagcagcctggacggctag

SEQ ID NO: 101988 - DNA, 846 bp, synthetic construct
  misc_feature 1..846: note = Description of Artificial Sequence: Synthetic coding sequence
  source 1..846: mol_type = other DNA
tgaaaggagagagagctgaactggttctacagaagacagagagtgctgttcgcccacgtgtaccccaccttcaccaacaccagctgcctgtgcaagtgcaagatcaccgccctgaagatcaagtacaaccccttcgccaaggccttcctggacgccaaggagagaaaccacctgagagacgtgcccgaggccatcagcgagagccagcacgtgacctacagccacctgggcggctggatcttcagcaaccccgacggcgtgtgcaccgccggcaacagcaactaccagtacgccgcccccctgcccctgcccgccccccacacccaccacggctgcgagcactacagcggcctgagaggccacagacaggccccctaccccagcgcctacatgcacagaaaccacagccccagcgtgaacctgatcgagagcagcagcaacaacctgcaggtgttcagcggccccgacagctggaccagcctgagcagcaccccccacgccagcatcctgagcgtgccccacaccaacggccccatcaaccccggccccagcccctacccctgcctgtggaccatcagcaacggcgccggcggccccagcggccccggccccgaggtgcacgccagcacccccggcgccttcctgctgggcaaccccgccgtgaccagcccccccagcgtgctgagcacccaggcccccaccagcgccggcgtggaggtgctgggcgagcccagcctgaccagcatcgccgtgagcacctggaccgccgtggccagccaccccttcgccggctggggcggccccggcgccggcggccaccacagccccagcagcctggacggctag

SEQ ID NO: 101989 - DNA, 1344 bp, synthetic construct
  misc_feature 1..1344: note = Description of Artificial Sequence: Synthetic coding sequence
  source 1..1344: mol_type = other DNA
atggagttcaccgccagccccaagccccagctgagcagcagagccaacgccttcagcatcgccgccctgatgagcagcggcggcagcaaggagaaggaggccaccgagaacaccatcaagcccctggagcagttcgtggagaagagcagctgcgcccagcccctgggcgagctgaccagcctggacgcccacggcgagttcggcggcggcagcggcagcagccccagcagcagcagcctgtgcaccgagcccctgatccccaccacccccatcatccccagcgaggagatggccaagatcgcctgcagcctggagaccaaggagctgtgggacaagttccacgagctgggcaccgagatgatcatcaccaagagcggcagaagaatgttccccaccatcagagtgagcttcagcggcgtggaccccgaggccaagtacatcgtgctgatggacatcgtgcccgtggacaacaagagatacagatacgcctaccacagaagcagctggctggtggccggcaaggccgacccccccctgcccgccagactgtacgtgcaccccgacagccccttcaccggcgagcagctgctgaagcagatggtgagcttcgagaaggtgaagctgaccaacaacgagctggaccagcacggccacatcatcctgaacagcatgcacaagtaccagcccagagtgcacatcatcaagaagaaggaccacaccgccagcctgctgaacctgaagagcgaggagttcagaaccttcatcttccccgagaccgtgttcaccgccgtgaccgcctaccagaaccagctgatcaccaagctgaagatcgacagcaaccccttcgccaagggcttcagagacagcagcagactgaccgacatcgagagagagagcgtggagagcctgatccagaagcacagctacgccagaagccccatcagaacctacggcggcgaggaggacgtgctgggcgacgagagccagaccacccccaacagaggcagcgccttcaccaccagcgacaacctgagcctgagcagctgggtgagcagcagcagcagcttccccggcttccagcacccccagagcctgaccgccctgggcaccagcaccgccagcatcgccacccccatcccccaccccatccagggcagcctgcccccctacagcagactgggcatgcccctgacccccagcgccatcgccagcagcatgcagggcagcggccccaccttccccagcttccacatgcccagataccaccactacttccagcagggcccctacgccgccatccagggcctgagacacagcagcgccgtgatgacccccttcgtgtag

SEQ ID NO: 101990 - DNA, 1608 bp, synthetic construct
  misc_feature 1..1608: note = Description of Artificial Sequence: Synthetic coding sequence
  source 1..1608: mol_type = other DNA
atgggcatcgtggagcccggctgcggcgacatgctgaccggcaccgagcccatgcccggcagcgacgagggcagagcccccggcgccgacccccagcacagatacttctaccccgagcccggcgcccaggacgccgacgagagaagaggcggcggcagcctgggcagcccctaccccggcggcgccctggtgcccgccccccccagcagattcctgggcgcctacgcctacccccccagaccccaggccgccggcttccccggcgccggcgagagcttccccccccccgccgacgccgagggctaccagcccggcgagggctacgccgcccccgaccccagagccggcctgtaccccggccccagagaggactacgccctgcccgccggcctggaggtgagcggcaagctgagagtggccctgaacaaccacctgctgtggagcaagttcaaccagcaccagaccgagatgatcatcaccaagcagggcagaagaatgttccccttcctgagcttcaccgtggccggcctggagcccaccagccactacagaatgttcgtggacgtggtgctggtggaccagcaccactggagataccagagcggcaagtgggtgcagtgcggcaaggccgagggcagcatgcccggcaacagactgtacgtgcaccccgacagccccaacaccggcgcccactggatgagacaggaggtgagcttcggcaagctgaagctgaccaacaacaagggcgccagcaacaacgtgacccagatgatcgtgctgcagagcctgcacaagtaccagcccagactgcacatcgtggaggtgaacgacggcgagcccgaggccgcctgcaacgccagcaacacccacatcttcaccttccaggagacccagttcatcgccgtgaccgcctaccagaacgccgagatcacccagctgaagatcgacaacaaccccttcgccaagggcttcagagagaacttcgagagcatgtacaccagcgtggacaccagcatccccagcccccccggccccaactgccagttcctgggcggcgaccactacagccccctgctgcccaaccagtaccccgtgcccagcagattctaccccgacctgcccggccaggccaaggacgtggtgccccaggcctactggctgggcgcccccagagaccacagctacgaggccgagttcagagccgtgagcatgaagcccgccttcctgcccagcgcccccggccccaccatgagctactacagaggccaggaggtgctggcccccggcgccggctggcccgtggccccccagtacccccccaagatgggccccgccagctggttcagacccatgagaaccctgcccatggagcccggccccggcggcagcgagggcagaggccccgaggaccagggcccccccctggtgtggaccgagatcgcccccatcagacccgagagcagcgacagcggcctgggcgagggcgacagcaagagaagaagagtgagcccctaccccagcagcggcgacagcagcagccccgccggcgcccccagccccttcgacaaggaggccgagggccagttctacaactacttccccaactag

SEQ ID NO: 101991 - DNA, 1203 bp, synthetic construct
  misc_feature 1..1203: note = Description of Artificial Sequence: Synthetic coding sequence
  source 1..1203: mol_type = other DNA
atgttccccagcgtgagagtgaaggtgaagggcctggaccccggcaagcagtaccacgtggccatcgacgtggtgcccgtggacagcaagagatacagatacgtgtaccacagcagccagtggatggtggccggcaacaccgaccacctgtgcatcatccccagattctacgtgcaccccgacagcccctgcagcggcgagacctggatgagacagatcatcagcttcgacagaatgaagctgaccaacaacgagatggacgacaagggccacatcatcctgcagagcatgcacaagtacaagcccagagtgcacgtgatcgagcagggcagcagcgtggacctgagccagatccagagcctgcccaccgagggcgtgaagaccttcagcttcaaggagaccgagttcaccaccgtgaccgcctaccagaaccagcagatcaccaagctgaagatcgagagaaaccccttcgccaagggcttcagagacaccggcagaaacagaggcgtgctggacggcctgctggagacctacccctggagacccagcttcaccctggacttcaagaccttcggcgccgacacccagagcggcagcagcggcagcagccccgtgaccagcagcggcggcgcccccagccccctgaacagcctgctgagccccctgtgcttcagccccatgttccacctgcccaccagcagcctgggcatgccctgccccgaggcctacctgcccaacgtgaacctgcccctgtgctacaagatctgccccaccaacttctggcagcagcagcccctggtgctgcccgcccccgagagactggccagcagcaacagcagccagagcctggcccccctgatgatggaggtgcccatgctgagcagcctgggcgtgaccaacagcaagagcggcagcagcgaggacagcagcgaccagtacctgcaggcccccaacagcaccaaccagatgctgtacggcctgcagagccccggcaacatcttcctgcccaacagcatcacccccgaggccctgagctgcagcttccaccccagctacgacttctacagatacaacttcagcatgcccagcagactgatcagcggcagcaaccacctgaaggtgaacgacgacagccaggtgagcttcggcgagggcaagtgcaaccacgtgcactggtaccccgccatcaaccactacctgtag

SEQ ID NO: 101992 - DNA, 1563 bp, synthetic construct
  misc_feature 1..1563: note = Description of Artificial Sequence: Synthetic coding sequence
  source 1..1563: mol_type = other DNA
atggccctgagcagcagagccagagccttcagcgtggaggccctggtgggcagacccagcaagagaaagctgcaggaccccatccaggccgagcagcccgagctgagagagaagaagggcggcgaggaggaggaggagagaagaagcagcgccgccggcaagagcgagcccctggagaagcagcccaagaccgagcccagcaccagcgccagcagcggctgcggcagcgacagcggctacggcaacagcagcgagagcctggaggagaaggacatccagatggagctgcagggcagcgagctgtggaagagattccacgacatcggcaccgagatgatcatcaccaaggccggcagaagaatgttccccagcgtgagagtgaaggtgaagggcctggaccccggcaagcagtaccacgtggccatcgacgtggtgcccgtggacagcaagagatacagatacgtgtaccacagcagccagtggatggtggccggcaacaccgaccacctgtgcatcatccccagattctacgtgcaccccgacagcccctgcagcggcgagacctggatgagacagatcatcagcttcgacagaatgaagctgaccaacaacgagatggacgacaagggccacatcatcctgcagagcatgcacaagtacaagcccagagtgcacgtgatcgagcagggcagcagcgtggacctgagccagatccagagcctgcccaccgagggcgtgaagaccttcagcttcaaggagaccgagttcaccaccgtgaccgcctaccagaaccagcagatcaccaagctgaagatcgagagaaaccccttcgccaagggcttcagagacaccggcagaaacagaggcgtgctggacggcctgctggagacctacccctggagacccagcttcaccctggacttcaagaccttcggcgccgacacccagagcggcagcagcggcagcagccccgtgaccagcagcggcggcgcccccagccccctgaacagcctgctgagccccctgtgcttcagccccatgttccacctgcccaccagcagcctgggcatgccctgccccgaggcctacctgcccaacgtgaacctgcccctgtgctacaagatctgccccaccaacttctggcagcagcagcccctggtgctgcccgcccccgagagactggccagcagcaacagcagccagagcctggcccccctgatgatggaggtgcccatgctgagcagcctgggcgtgaccaacagcaagagcggcagcagcgaggacagcagcgaccagtacctgcaggcccccaacagcaccaaccagatgctgtacggcctgcagagccccggcaacatcttcctgcccaacagcatcacccccgaggccctgagctgcagcttccaccccagctacgacttctacagatacaacttcagcatgcccagcagactgatcagcggcagcaaccacctgaaggtgaacgacgacagccaggtgagcttcggcgagggcaagtgcaaccacgtgcactggtaccccgccatcaaccactacctgtag

SEQ ID NO: 101993 - DNA, 1563 bp, synthetic construct; identical to SEQ ID NO: 101992
  misc_feature 1..1563: note = Description of Artificial Sequence: Synthetic coding sequence
  source 1..1563: mol_type = other DNA

SEQ ID NO: 101994 - DNA, 1203 bp, synthetic construct; identical to SEQ ID NO: 101991
  misc_feature 1..1203: note = Description of Artificial Sequence: Synthetic coding sequence
  source 1..1203: mol_type = other DNA

SEQ ID NO: 101995 - DNA, 2232 bp, synthetic construct
  misc_feature 1..2232: note = Description of Artificial Sequence: Synthetic coding sequence
  source 1..2232: mol_type = other DNA
atgagcctgagcatgagagaccccgtgatccccggcaccagcatggcctaccaccccttcctgccccacagagcccccgacttcgccatgagcgccgtgctgggccaccagccccccttcttccccgccctgaccctgccccccaacggcgccgccgccctgagcctgcccggcgccctggccaagcccatcatggaccagctggtgggcgccgccgagaccggcatccccttcagcagcctgggcccccaggcccacctgagacccctgaagaccatggagcccgaggaggaggtggaggacgaccccaaggtgcacctggaggccaaggagctgtgggaccagttccacaagagaggcaccgagatggtgatcaccaagagcggcagaagaatgttcccccccttcaaggtgagatgcagcggcctggacaagaaggccaagtacatcctgctgatggacatcatcgccgccgacgactgcagatacaagttccacaacagcagatggatggtggccggcaaggccgaccccgagatgcccaagagaatgtacatccaccccgacagccccgccaccggcgagcagtggatgagcaaggtggtgaccttccacaagctgaagctgaccaacaacatcagcgacaagcacggcttcaccctggccttccccagcgaccacgccacctggcagggcaactacagcttcggcacccagaccatcctgaacagcatgcacaagtaccagcccagattccacatcgtgagagccaacgacatcctgaagctgccctacagcaccttcagaacctacctgttccccgagaccgagttcatcgccgtgaccgcctaccagaacgacaagatcacccagctgaagatcgacaacaaccccttcgccaagggcttcagagacaccggcaacggcagaagagagaagagaaagcagctgaccctgcagagcatgagagtgttcgacgagagacacaagaaggagaacggcaccagcgacgagagcagcagcgagcaggccgccttcaactgcttcgcccaggccagcagccccgccgccagcaccgtgggcaccagcaacctgaaggacctgtgccccagcgagggcgagagcgacgccgaggccgagagcaaggaggagcacggccccgaggcctgcgacgccgccaagatcagcaccaccaccagcgaggagccctgcagagacaagggcagccccgccgtgaaggcccacctgttcgccgccgagagacccagagacagcggcagactggacaaggccagccccgacagcagacacagccccgccaccatcagcagcagcaccagaggcctgggcgccgaggagagaagaagccccgtgagagagggcaccgcccccgccaaggtggaggaggccagagccctgcccggcaaggaggccttcgcccccctgaccgtgcagaccgacgccgccgccgcccacctggcccagggccccctgcccggcctgggcttcgcccccggcctggccggccagcagttcttcaacggccaccccctgttcctgcaccccagccagttcgccatgggcggcgccttcagcagcatggccgccgccggcatgggccccctgctggccaccgtgagcggcgccagcaccggcgtgagcggcctggacagcaccgccatggccagcgccgccgccgcccagggcctgagcggcgccagcgccgccaccctgcccttccacctgcagcagcacgtgctggccagccagggcctggccatgagccccttcggcagcctgttcccctacccctacacctacatggccgccgccgccgccgccagcagcgccgccgccagcagcagcgtgcacagacaccccttcctgaacctgaacaccatgagacccagactgagatacagcccctacagcatccccgtgcccgtgcccgacggcagcagcctgctgaccaccgccctgcccagcatggccgccgccgccggccccctggacggcaaggtggccgccctggccgccagccccgccagcgtggccgtggacagcggcagcgagctgaacagcagaagcagcaccctgagcagcagcagcatgagcctgagccccaagctgtgcgccgagaaggaggccgccaccagcgagctgcagagcatccagagactggtgagcggcctggaggccaagcccgacagaagcagaagcgccagcccctag

SEQ ID NO: 101996 - DNA, 2172 bp, synthetic construct
  misc_feature 1..2172: note = Description of Artificial Sequence: Synthetic coding sequence
  source 1..2172: mol_type = other DNA
atgagcctgagcatgagagaccccgtgatccccggcaccagcatggcctaccaccccttcctgccccacagagcccccgacttcgccatgagcgccgtgctgggccaccagccccccttcttccccgccctgaccctgccccccaacggcgccgccgccctgagcctgcccggcgccctggccaagcccatcatggaccagctggtgggcgccgccgagaccggcatccccttcagcagcctgggcccccaggcccacctgagacccctgaagaccatggagcccgaggaggaggtggaggacgaccccaaggtgcacctggaggccaaggagctgtgggaccagttccacaagagaggcaccgagatggtgatcaccaagagcggcagaagaatgttcccccccttcaaggtgagatgcagcggcctggacaagaaggccaagtacatcctgctgatggacatcatcgccgccgacgactgcagatacaagttccacaacagcagatggatggtggccggcaaggccgaccccgagatgcccaagagaatgtacatccaccccgacagccccgccaccggcgagcagtggatgagcaaggtggtgaccttccacaagctgaagctgaccaacaacatcagcgacaagcacggcttcaccatcctgaacagcatgcacaagtaccagcccagattccacatcgtgagagccaacgacatcctgaagctgccctacagcaccttcagaacctacctgttccccgagaccgagttcatcgccgtgaccgcctaccagaacgacaagatcacccagctgaagatcgacaacaaccccttcgccaagggcttcagagacaccggcaacggcagaagagagaagagaaagcagctgaccctgcagagcatgagagtgttcgacgagagacacaagaaggagaacggcaccagcgacgagagcagcagcgagcaggccgccttcaactgcttcgcccaggccagcagccccgccgccagcaccgtgggcaccagcaacctgaaggacctgtgccccagcgagggcgagagcgacgccgaggccgagagcaaggaggagcacggccccgaggcctgcgacgccgccaagatcagcaccaccaccagcgaggagccctgcagagacaagggcagccccgccgtgaaggcccacctgttcgccgccgagagacccagagacagcggcagactggacaaggccagccccgacagcagacacagccccgccaccatcagcagcagcaccagaggcctgggcgccgaggagagaagaagccccgtgagagagggcaccgcccccgccaaggtggaggaggccagagccctgcccggcaaggaggccttcgcccccctgaccgtgcagaccgacgccgccgccgcccacctggcccagggccccctgcccggcctgggcttcgcccccggcctggccggccagcagttcttcaacggccaccccctgttcctgcaccccagccagttcgccatgggcggcgccttcagcagcatggccgccgccggcatgggccccctgctggccaccgtgagcggcgccagcaccggcgtgagcggcctggacagcaccgccatggccagcgccgccgccgcccagggcctgagcggcgccagcgccgccaccctgcccttccacctgcagcagcacgtgctggccagccagggcctggccatgagccccttcggcagcctgttcccctacccctacacctacatggccgccgccgccgccgccagcagcgccgccgccagcagcagcgtgcacagacaccccttcctgaacctgaacaccatgagacccagactgagatacagcccctacagcatccccgtgcccgtgcccgacggcagcagcctgctgaccaccgccctgcccagcatggccgccgccgccggccccctggacggcaaggtggccgccctggccgccagccccgccagcgtggccgtggacagcggcagcgagctgaacagcagaagcagcaccctgagcagcagcagcatgagcctgagccccaagctgtgcgccgagaaggaggccgccaccagcgagctgcagagcatccagagactggtgagcggcctggaggccaagcccgacagaagcagaagcgccagcccctag

SEQ ID NO: 101997 - DNA, 1803 bp, synthetic construct
  misc_feature 1..1803: note = Description of Artificial Sequence: Synthetic coding sequence
  source 1..1803: mol_type = other DNA
atgagcctgagcatgagagaccccgtgatccccggcaccagcatggcctaccaccccttcctgccccacagagcccccgacttcgccatgagcgccgtgctgggccaccagccccccttcttccccgccctgaccctgccccccaacggcgccgccgccctgagcctgcccggcgccctggccaagcccatcatggaccagctggtgggcgccgccgagaccggcatccccttcagcagcctgggcccccaggcccacctgagacccctgaagaccatggagcccgaggaggaggtggaggacgaccccaaggtgcacctggaggccaaggagctgtgggaccagttccacaagagaggcaccgagatggtgatcaccaagagcggcagaagaatgttcccccccttcaaggtgagatgcagcggcctggacaagaaggccaagtacatcctgctgatggacatcatcgccgccgacgactgcagatacaagttccacaacagcagatggatggtggccggcaaggccgaccccgagatgcccaagagaatgtacatccaccccgacagccccgccaccggcgagcagtggatgagcaaggtggtgaccttccacaagctgaagctgaccaacaacatcagcgacaagcacggcttcaccctggccttccccagcgaccacgccacctggcagggcaactacagcttcggcacccagaccatcctgaacagcatgcacaagtaccagcccagattccacatcgtgagagccaacgacatcctgaagctgccctacagcaccttcagaacctacctgttccccgagaccgagttcatcgccgtgaccgcctaccagaacgacaagatcacccagctgaagatcgacaacaaccccttcgccaagggcttcagagacaccggcaacggcagaagagagaagagaaagcagctgaccctgcagagcatgagagtgttcgacgagagacacaagaaggagaacggcaccagcgacgagagcagcagcgagcaggccgccttcaactgcttcgcccaggccagcagccccgccgccagcaccgtgggcaccagcaacctgaaggacctgtgccccagcgagggcgagagcgacgccgaggccgagagcaaggaggagcacggccccgaggcctgcgacgccgccaagatcagcaccaccaccagcgaggagccctgcagagacaagggcagccccgccgtgaaggcccacctgttcgccgccgagagacccagagacagcggcagactggacaaggccagccccgacagcagacacagccccgccaccatcagcagcagcaccagaggcctgggcgccgaggagagaagaagccccgtgagagagggcaccgcccccgccaaggtggaggaggccagagccctgcccggcaaggaggccttcgcccccctgaccgtgcagaccgacgccgccgccgccgccgccagcagcagcgtgcacagacaccccttcctgaacctgaacaccatgagacccagactgagatacagcccctacagcatccccgtgcccgtgcccgacggcagcagcctgctgaccaccgccctggccgccagccccgccagcgtggccgtggacagcggcagcgagctgaacagcagaagcagcaccctgagcagcagcagcatgagcctgagccccaagctgtgcgccgagaaggaggccgccaccagcgagctgcagagcatccagagactggtgagcggcctggaggccaagcccgacagaagcagaagcgccagcccctag

SEQ ID NO: 101998 - DNA, 1638 bp, synthetic construct
  misc_feature 1..1638: note = Description of Artificial Sequence: Synthetic coding sequence
  source 1..1638: mol_type = other DNA
atgctgcaggacaagggcctgagcgagagcgaggaggccttcagagcccccggccccgccctgggcgaggccagcgccgccaacgcccccgagcccgccctggccgcccccggcctgagcggcgccgccctgggcagcccccccggccccggcgccgacgtggtggccgccgccgccgccgagcagaccatcgagaacatcaaggtgggcctgcacgagaaggagctgtggaagaagttccacgaggccggcaccgagatgatcatcaccaaggccggcagaagaatgttccccagctacaaggtgaaggtgaccggcatgaaccccaagaccaagtacatcctgctgatcgacatcgtgcccgccgacgaccacagatacaagttctgcgacaacaagtggatggtggccggcaaggccgagcccgccatgcccggcagactgtacgtgcaccccgacagccccgccaccggcgcccactggatgagacagctggtgagcttccagaagctgaagctgaccaacaaccacctggaccccttcggccacatcatcctgaacagcatgcacaagtaccagcccagactgcacatcgtgaaggccgacgagaacaacgccttcggcagcaagaacaccgccttctgcacccacgtgttccccgagaccagcttcatcagcgtgaccagctaccagaaccacaagatcacccagctgaagatcgagaacaaccccttcgccaagggcttcagaggcagcgacgacagcgacctgagagtggccagactgcagagcaaggagtaccccgtgatcagcaagagcatcatgagacagagactgatcagcccccagctgagcgccacccccgacgtgggccccctgctgggcacccaccaggccctgcagcactaccagcacgagaacggcgcccacagccagctggccgagccccaggacctgcccctgagcaccttccccacccagagagacagcagcctgttctaccactgcctgaagagaagagacggcaccagacacctggacctgccctgcaagagaagctacctggaggcccccagcagcgtgggcgaggaccactacttcagaagcccccccccctacgaccagcagatgctgagccccagctactgcagcgaggtgacccccagagaggcctgcatgtacagcggcagcggccccgagatcgccggcgtgagcggcgtggacgacctgccccccccccccctgagctgcaacatgtggaccagcgtgagcccctacaccagctacagcgtgcagaccatggagaccgtgccctaccagcccttccccacccacttcaccgccaccaccatgatgcccagactgcccaccctgagcgcccagagcagccagccccccggcaacgcccacttcagcgtgtacaaccagctgagccagagccaggtgagagagagaggccccagcgccagcttccccagagagagaggcctgccccagggctgcgagagaaagccccccagcccccacctgaacgccgccaacgagttcctgtacagccagaccttcagcctgagcagagagagcagcctgcagtaccacagcggcatgggcaccgtggagaactggaccgacggctag

SEQ ID NO: 101999 - DNA, 1641 bp, synthetic construct
  misc_feature 1..1641: note = Description of Artificial Sequence: Synthetic coding sequence
  source 1..1641: mol_type = other DNA
atgctgcaggacaagggcctgagcgagagcgaggaggccttcagagcccccggccccgccctgggcgaggccagcgccgccaacgcccccgagcccgccctggccgcccccggcctgagcggcgccgccctgggcagcccccccggccccggcgccgacgtggtggccgccgccgccgccgagcagaccatcgagaacatcaaggtgggcctgcacgagaaggagctgtggaagaagttccacgaggccggcaccgagatgatcatcaccaaggccggcagaagaatgttccccagctacaaggtgaaggtgaccggcatgaaccccaagaccaagtacatcctgctgatcgacatcgtgcccgccgacgaccacagatacaagttctgcgacaacaagtggatggtggccggcaaggccgagcccgccatgcccggcagactgtacgtgcaccccgacagccccgccaccggcgcccactggatgagacagctggtgagcttccagaagctgaagctgaccaacaaccacctggaccccttcggccacatcatcctgaacagcatgcacaagtaccagcccagactgcacatcgtgaaggccgacgagaacaacgccttcggcagcaagaacaccgccttctgcacccacgtgttccccgagaccagcttcatcagcgtgaccagctaccagaaccacaagatcacccagctgaagatcgagaacaaccccttcgccaagggcttcagaggcagcgacgacagcgacctgagagtggccagactgcagagcaaggagtaccccgtgatcagcaagagcatcatgagacagagactgatcagcccccagctgagcgccacccccgacgtgggccccctgctgggcacccaccaggccctgcagcactaccagcacgagaacggcgcccacagccagctggccgagccccaggacctgcccctgagcaccttccccacccagagagacagcagcctgttctaccactgcctgaagagaagagccgacggcaccagacacctggacctgccctgcaagagaagctacctggaggcccccagcagcgtgggcgaggaccactacttcagaagcccccccccctacgaccagcagatgctgagccccagctactgcagcgaggtgacccccagagaggcctgcatgtacagcggcagcggccccgagatcgccggcgtgagcggcgtggacgacctgccccccccccccctgagctgcaacatgtggaccagcgtgagcccctacaccagctacagcgtgcagaccatggagaccgtgccctaccagcccttccccacccacttcaccgccaccaccatgatgcccagactgcccaccctgagcgcccagagcagccagccccccggcaacgcccacttcagcgtgtacaaccagctgagccagagccaggtgagagagagaggccccagcgccagcttccccagagagagaggcctgccccagggctgcgagagaaagccccccagcccccacctgaacgccgccaacgagttcctgtacagccagaccttcagcctgagcagagagagcagcctgcagtaccacagcggcatgggcaccgtggagaactggaccgacggctag

SEQ ID NO: 102000 - DNA, 1557 bp, synthetic construct
  misc_feature 1..1557: note = Description of Artificial Sequence: Synthetic coding sequence
  source 1..1557: mol_type = other DNA
atggccgacgccgacgagggcttcggcctggcccacacccccctggagcccgacgccaaggacctgccctgcgacagcaagcccgagagcgccctgggcgcccccagcaagagccccagcagcccccaggccgccttcacccagcagggcatggagggcatcaaggtgttcctgcacgagagagagctgtggctgaagttccacgaggtgggcaccgagatgatcatcaccaaggccggcagaagaatgttccccagctacaaggtgaaggtgaccggcctgaaccccaagaccaagtacatcctgctgatggacatcgtgcccgccgacgaccacagatacaagttcgccgacaacaagtggagcgtgaccggcaaggccgagcccgccatgcccggcagactgtacgtgcaccccgacagccccgccaccggcgcccactggatgagacagctggtgagcttccagaagctgaagctgaccaacaaccacctggaccccttcggccacatcatcctgaacagcatgcacaagtaccagcccagactgcacatcgtgaaggccgacgagaacaacggcttcggcagcaagaacaccgccttctgcacccacgtgttccccgagaccgccttcatcgccgtgaccagctaccagaaccacaagatcacccagctgaagatcgagaacaaccccttcgccaagggcttcagaggcagcgacgacatggagctgcacagaatgagcagaatgcagagcaaggagtaccccgtggtgcccagaagcaccgtgagacagaaggtggccagcaaccacagccccttcagcagcgagagcagagccctgagcaccagcagcaacctgggcagccagtaccagtgcgagaacggcgtgagcggccccagccaggacctgctgcccccccccaacccctaccccctgccccaggagcacagccagatctaccactgcaccaagagaaaggaggaggagtgcagcaccaccgaccacccctacaagaagccctacatggagaccagccccagcgaggaggacagcttctacagaagcagctacccccagcagcagggcctgggcgccagctacagaaccgagagcgcccagagacaggcctgcatgtacgccagcagcgccccccccagcgagcccgtgcccagcctggaggacatcagctgcaacacctggcccagcatgcccagctacagcagctgcaccgtgaccaccgtgcagcccatggacagactgccctaccagcacttcagcgcccacttcaccagcggccccctggtgcccagactggccggcatggccaaccacggcagcccccagctgggcgagggcatgttccagcaccagaccagcgtggcccaccagcccgtggtgagacagtgcggcccccagaccggcctgcagagccccggcaccctgcagccccccgagttcctgtacagccacggcgtgcccagaaccctgagcccccaccagtaccacagcgtgcacggcgtgggcatggtgcccgagtggagcgacaacagctag

SEQ ID NO: 102001 - DNA, 1407 bp, synthetic construct
  misc_feature 1..1407: note = Description of Artificial Sequence: Synthetic coding sequence
  source 1..1407: mol_type = other DNA
atggagggcatcaaggtgttcctgcacgagagagagctgtggctgaagttccacgaggtgggcaccgagatgatcatcaccaaggccggcagaagaatgttccccagctacaaggtgaaggtgaccggcctgaaccccaagaccaagtacatcctgctgatggacatcgtgcccgccgacgaccacagatacaagttcgccgacaacaagtggagcgtgaccggcaaggccgagcccgccatgcccggcagactgtacgtgcaccccgacagccccgccaccggcgcccactggatgagacagctggtgagcttccagaagctgaagctgaccaacaaccacctggaccccttcggccacatcatcctgaacagcatgcacaagtaccagcccagactgcacatcgtgaaggccgacgagaacaacggcttcggcagcaagaacaccgccttctgcacccacgtgttccccgagaccgccttcatcgccgtgaccagctaccagaaccacaagatcacccagctgaagatcgagaacaaccccttcgccaagggcttcagaggcagcgacgacatggagctgcacagaatgagcagaatgcagagcaaggagtaccccgtggtgcccagaagcaccgtgagacagaaggtggccagcaaccacagccccttcagcagcgagagcagagccctgagcaccagcagcaacctgggcagccagtaccagtgcgagaacggcgtgagcggccccagccaggacctgctgcccccccccaacccctaccccctgccccaggagcacagccagatctaccactgcaccaagagaaaggaggaggagtgcagcaccaccgaccacccctacaagaagccctacatggagaccagccccagcgaggaggacagcttctacagaagcagctacccccagcagcagggcctgggcgccagctacagaaccgagagcgcccagagacaggcctgcatgtacgccagcagcgccccccccagcgagcccgtgcccagcctggaggacatcagctgcaacacctggcccagcatgcccagctacagcagctgcaccgtgaccaccgtgcagcccatggacagactgccctaccagcacttcagcgcccacttcaccagcggccccctggtgcccagactggccggcatggccaaccacggcagcccccagctgggcgagggcatgttccagcaccagaccagcgtggcccaccagcccgtggtgagacagtgcggcccccagaccggcctgcagagccccggcaccctgcagccccccgagttcctgtacagccacggcgtgcccagaaccctgagcccccaccagtaccacagcgtgcacggcgtgggcatggtgcccgagtggagcgacaacagctag

SEQ ID NO: 102002 - DNA, 1557 bp, synthetic construct; identical to SEQ ID NO: 102000
  misc_feature 1..1557: note = Description of Artificial Sequence: Synthetic coding sequence
  source 1..1557: mol_type = other DNA

SEQ ID NO: 102003 - DNA, 1269 bp, synthetic construct
  misc_feature 1..1269: note = Description of Artificial Sequence: Synthetic coding sequence
  source 1..1269: mol_type = other DNA
atggacatcgtgcccgccgacgaccacagatacaagttcgccgacaacaagtggagcgtgaccggcaaggccgagcccgccatgcccggcagactgtacgtgcaccccgacagccccgccaccggcgcccactggatgagacagctggtgagcttccagaagctgaagctgaccaacaaccacctggaccccttcggccacatcatcctgaacagcatgcacaagtaccagcccagactgcacatcgtgaaggccgacgagaacaacggcttcggcagcaagaacaccgccttctgcacccacgtgttccccgagaccgccttcatcgccgtgaccagctaccagaaccacaagatcacccagctgaagatcgagaacaaccccttcgccaagggcttcagaggcagcgacgacatggagctgcacagaatgagcagaatgcagagcaaggagtaccccgtggtgcccagaagcaccgtgagacagaaggtggccagcaaccacagccccttcagcagcgagagcagagccctgagcaccagcagcaacctgggcagccagtaccagtgcgagaacggcgtgagcggccccagccaggacctgctgcccccccccaacccctaccccctgccccaggagcacagccagatctaccactgcaccaagagaaaggaggaggagtgcagcaccaccgaccacccctacaagaagccctacatggagaccagccccagcgaggaggacagcttctacagaagcagctacccccagcagcagggcctgggcgccagctacagaaccgagagcgcccagagacaggcctgcatgtacgccagcagcgccccccccagcgagcccgtgcccagcctggaggacatcagctgcaacacctggcccagcatgcccagctacagcagctgcaccgtgaccaccgtgcagcccatggacagactgccctaccagcacttcagcgcccacttcaccagcggccccctggtgcccagactggccggcatggccaaccacggcagcccccagctgggcgagggcatgttccagcaccagaccagcgtggcccaccagcccgtggtgagacagtgcggcccccagaccggcctgctgcacaacagacacttcctggagaaggagagagagagaggcgagagagagagaagaagagagaccgtggccaagagaacccccagaaccagattcttcatcagccccaacgtgcacatctgcacccagggcagatggatgctgatctag

SEQ ID NO: 102004 - DNA, 1050 bp, synthetic construct
  misc_feature 1..1050: note = Description of Artificial Sequence: Synthetic coding sequence
  source 1..1050: mol_type = other DNA
atggccgacgccgacgagggcttcggcctggcccacacccccctggagcccgacgccaaggacctgccctgcgacagcaagcccgagagcgccctgggcgcccccagcaagagccccagcagcccccaggccgccttcacccagcagggcatggagggcatcaaggtgttcctgcacgagagagagctgtggctgaagttccacgaggtgggcaccgagatgatcatcaccaaggccggcagaagaatgttccccagctacaaggtgaaggtgaccggcctgaaccccaagaccaagtacatcctgctgatggacatcgtgcccgccgacgaccacagatacaagttcgccgacaacaagtggagcgtgaccggcaaggccgagcccgccatgcccggcagactgtacgtgcaccccgacagccccgccaccggcgcccactggatgagacagctggtgagcttccagaagctgaagctgaccaacaaccacctggaccccttcggccacatcatcctgaacagcatgcacaagtaccagcccagactgcacatcgtgaaggccgacgagaacaacggcttcggcagcaagaacaccgccttctgcacccacgtgttccccgagaccgccttcatcgccgtgaccagctaccagaaccacaagatcacccagctgaagatcgagaacaaccccttcgccaagggcttcagaggcagcgacgacatggagctgcacagaatgagcagaatgcagagcaaggagtaccccgtggtgcccagaagcaccgtgagacagaaggtggccagcaaccacagccccttcagcagcgagagcagagccctgagcaccagcagcaacctgggcagccagtaccagtgcgagaacggcgtgagcggccccagccaggacctgctgcccccccccaacccctaccccctgccccaggagcacagccagatctaccactgcaccaagagaaagggcgagtgcgaccacccctggagcatctgcttcctgagctacctgttcctgagcctgggctggggctag

SEQ ID NO: 102005 - DNA, 1311 bp, synthetic construct
  misc_feature 1..1311: note = Description of Artificial Sequence: Synthetic coding sequence
  source 1..1311: mol_type = other DNA
atgtaccaccccagagagctgtaccccagcctgggcgccggctacagactgggccccgcccagcccggcgccgacagcagcttcccccccgccctggccgagggctacagataccccgagctggacacccccaagctggactgcttcctgagcggcatggaggccgcccccagaaccctggccgcccacccccccctgcccctgctgccccccgccatgggcaccgagcccgcccccagcgcccccgaggccctgcacagcctgcccggcgtgagcctgagcctggagaacagagagctgtggaaggagttcagcagcgtgggcaccgagatgatcatcaccaaggccggcagaagaatgttccccgcctgcagagtgagcgtgaccggcctggaccccgaggccagatacctgttcctgctggacgtgatccccgtggacggcgccagatacagatggcagggcagaagatgggagcccagcggcaaggccgagcccagactgcccgacagagtgtacatccaccccgacagccccgccaccggcgcccactggatgagacagcccgtgagcttccacagagtgaagctgaccaacagcaccctggacccccacggccacctgatcctgcacagcatgcacaagtaccagcccagaatccacctggtgagagccgcccagctgtgcagccagcactggggcggcatggccagcttcagattccccgagaccaccttcatcagcgtgaccgcctaccagaacccccagatcacccagctgaagatcgccgccaaccccttcgccaagggcttcagagagaacggcagaaactgcaagagagagagagacgccagagtgaagagaaagctgagaggccccgagcccgccgccaccgaggcctacggcagcggcgacacccccggcggcccctgcgacagcaccctgggcggcgacatcagagagagcgaccccgagcaggcccccgcccccggcgaggccaccgccgcccccgcccccctgtgcggcggccccagcgccgaggcctacctgctgcaccccgccgccttccacggcgcccccagccacctgcccaccagaagccccagcttccccgaggcccccgacagcggcagaagcgccccctacagcgccgccttcctggagctgccccacggcagcggcggcagcggctaccccgccgccccccccgccgtgcccttcgccccccacttcctgcagggcggccccttccccctgccctacaccgcccccggcggctacctggacgtgggcagcaagcccatgtactag

SEQ ID NO: 102006 - DNA, 1311 bp, synthetic construct; identical to SEQ ID NO: 102005
  misc_feature 1..1311: note = Description of Artificial Sequence: Synthetic coding sequence
  source 1..1311: mol_type = other DNA

SEQ ID NO: 102007 - DNA, 888 bp, synthetic construct
  misc_feature 1..888: note = Description of Artificial Sequence: Synthetic coding sequence
  source 1..888: mol_type = other DNA
atgtaccaccccagagagctgtaccccagcctgggcgccggctacagactgggccccgcccagcccggcgccgacagcagcttcccccccgccctggccgagggctacagataccccgagctggacacccccaagctggactgcttcctgagcggcatggaggccgcccccagaaccctggccgcccacccccccctgcccctgctgccccccgccatgggcaccgagcccgcccccagcgcccccgaggccctgcacagcctgcccggcgtgagcctgagcctggagaacagagagctgtggaaggagttcagcagcgtgggcaccgagatgatcatcaccaaggccggcagaagaatgttccccgcctgcagagtgagcgtgaccggcctggaccccgaggccagatacctgttcctgctggacgtgatccccgtggacggcgccagatacagatggcagggcagaagatgggagcccagcggcaaggccgagcccagactgcccgacagagtgtacatccaccccgacagccccgccaccggcgcccactggatgagacagcccgtgagcttccacagagtgaagctgaccaacagcaccctggacccccacggccacctgatcctgcacagcatgcacaagtaccagcccagaatccacctggtgagagccgcccagctgtgcagccagcactggggcggcatggccagcttcagattccccgagaccaccttcatcagcgtgaccgcctaccagaacccccagatcacccagctgaagatcgccgccaaccccttcgccaagggcttcagagagaacggcagaaactgcaagagatgggagctgttcatccacctgttcatgcacagcaccaacgtgtactag

SEQ ID NO: 102008 - DNA, 1974 bp, synthetic construct
  misc_feature 1..1974: note = Description of Artificial Sequence: Synthetic coding sequence
  source 1..1974: mol_type = other DNA
atggagatggagaccaccgagcccgagcccgactgcgtggtgcagccccccagcccccccgacgacttcagctgccagatgagactgagcgagaagatcacccccctgaagacctgcttcaagaagaaggaccagaagagactgggcaccggcaccctgagaagcctgagacccatcctgaacaccctgctggagagcggcagcctggacggcgtgttcagaagcagaaaccagagcaccgacgagaacagcctgcacgagcccatgatgaagaaggccatggagatcaacagcagctgcccccccgccgagaacaacatgagcgtgctgatccccgacagaaccaacgtgggcgaccagatccccgaggcccaccccagcaccgaggcccccgagagagtggtgcccatccaggaccacagcttccccagcgagaccctgagcggcaccgtggccgacagcacccccgcccacttccagaccgacctgctgcaccccgtgagcagcgacgtgcccaccagccccgactgcctggacaaggtgatcgactacgtgcccggcatcttccaggagaacagcttcaccatccagtacatcctggacaccagcgacaagctgagcaccgagctgttccaggacaagagcgaggaggccagcctggacctggtgttcgagctggtgaaccagctgcagtaccacacccaccaggagaacggcatcgagatctgcatggacttcctgcagggcacctgcatctacggcagagactgcctgaagcaccacaccgtgctgccctaccactggcagatcaagagaaccaccacccagaagtggcagagcgtgttcaacgacagccaggagcacctggagagattctactgcaaccccgagaacgacagaatgagaatgaagtacggcggccaggagttctgggccgacctgaacgccatgaacgtgtacgagaccaccgagttcgaccagctgagaagactgagcaccccccccagcagcaacgtgaacagcatctaccacaccgtgtggaagttcttctgcagagaccacttcggctggagagagtaccccgagagcgtgatcagactgatcgaggaggccaacagcagaggcctgaaggaggtgagattcatgatgtggaacaaccactacatcctgcacaacagcttcttcagaagagagatcaagagaagacccctgttcagaagctgcttcatcctgctgccctacctgcagaccctgggcggcgtgcccacccaggcccccccccccctggaggccaccagcagcagccagatcatctgccccgacggcgtgaccagcgccaacttctaccccgagacctgggtgtacatgcaccccagccaggacttcatccaggtgcccgtgagcgccgaggacaagagctacagaatcatctacaacctgttccacaagaccgtgcccgagttcaagtacagaatcctgcagatcctgagagtgcagaaccagttcctgtgggagaagtacaagagaaagaaggagtacatgaacagaaagatgttcggcagagacagaatcatcaacgagagacacctgttccacggcaccagccaggacgtggtggacggcatctgcaagcacaacttcgaccccagagtgtgcggcaagcacgccaccatgttcggccagggcagctacttcgccaagaaggccagctacagccacaacttcagcaagaagagcagcaagggcgtgcacttcatgttcctggccaaggtgctgaccggcagatacaccatgggcagccacggcatgagaagacccccccccgtgaaccccggcagcgtgaccagcgacctgtacgacagctgcgtggacaacttcttcgagccccagatcttcgtgatcttcaacgacgaccagagctacccctacttcgtgatccagtacgaggaggtgagcaacaccgtgagcatctag

SEQ ID NO: 102009 - DNA, 1974 bp, synthetic construct; identical to SEQ ID NO: 102008
  misc_feature 1..1974: note = Description of Artificial Sequence: Synthetic coding sequence
  source 1..1974: mol_type = other DNA

SEQ ID NO: 102010 - DNA, 1521 bp, synthetic construct
  misc_feature 1..1521: note = Description of Artificial Sequence: Synthetic coding sequence
  source 1..1521: mol_type = other DNA
atggagatggagaccaccgagcccgagcccgactgcgtggtgcagccccccagcccccccgacgacttcagctgccagatgagactgagcgagaagatcacccccctgaagacctgcttcaagaagaaggaccagaagagactgggcaccggcaccctgagaagcctgagacccatcctgaacaccctgctggagagcggcagcctggacggcgtgttcagaagcagaaaccagagcaccgacgagaacagcctgcacgagcccatgatgaagaaggccatggagatcaacagcagctgcccccccgccgagaacaacatgagcgtgctgatccccgacagaaccaacgtgggcgaccagatccccgaggcccaccccagcaccgaggcccccgagagagtggtgcccatccaggaccacagcttccccagcgagaccctgagcggcaccgtggccgacagcacccccgcccacttccagaccgacctgctgcaccccgtgagcagcgacgtgcccaccagccccgactgcctggacaaggtgatcgactacgtgcccggcatcttccaggagaacagcttcaccatccagtacatcctggacaccagcgacaagctgagcaccgagctgttccaggacaagagcgaggaggccagcctggacctggtgttcgagctggtgaaccagctgcagtaccacacccaccaggagaacggcatcgagatctgcatggacttcctgcagggcacctgcatctacggcagagactgcctgaagcaccacaccgtgctgccctaccactggcagatcaagagaaccaccacccagaagtggcagagcgtgttcaacgacagccaggagcacctggagagattctactgcaaccccgagaacgacagaatgagaatgaagtacggcggccaggagttctgggccgacctgaacgccatgaacgtgtacgagaccaccgagttcgaccagctgagaagactgagcaccccccccagcagcaacgtgaacagcatctaccacaccgtgtggaagttcttctgcagagaccacttcggctggagagagtaccccgagagcgtgatcagactgatcgaggaggccaacagcagaggcctgaaggaggtgagattcatgatgtggaacaaccactacatcctgcacaacagcttcttcagaagagagatcaagagaagacccctgttcagaagctgcttcatcctgctgccctacctgcagaccctgggcggcgtgcccacccaggcccccccccccctggaggccaccagcagcagccagatcatctgccccgacggcgtgaccagcgccaacttctaccccgagacctgggtgtacatgcaccccagccaggacttcatccaggtgcccgtgagcgccgaggacaagagctacagaatcatctacaacctgttccacaagaccgtgcccgagttcaagtacagaatcctgcagatcctgagagtgcagaaccagttcctgtgggagaagtag

SEQ ID NO: 102011 - DNA, 1965 bp, synthetic construct
  misc_feature 1..1965: note = Description of Artificial Sequence: Synthetic coding sequence
  source 1..1965: mol_type = other DNA
atggagatggagaccaccgagcccgagcccgactgcgtggtgcagccccccagcccccccgacgacttcagctgccagatgagactgagcgagaagatcacccccctgaagacctgcttcaagaagaaggaccagaagagactgggcaccggcaccctgagaagcctgagacccatcctgaacaccctgctggagagcggcagcctggacggcgtgttcagaagcagaaaccagagcaccgacgagaacagcctgcacgagcccatgatgaagaaggccatggagatcaacagcagctgcccccccgccgagaacaacatgagcgtgctgatccccgacagaaccaacgtgggcgaccagatccccgaggcccaccccagcaccgaggcccccgagagagtggtgcccatccaggaccacagcttccccagcgagaccctgagcggcaccgtggccgacagcacccccgcccacttccagaccgacctgctgcaccccgtgagcagcgacgtgcccaccagccccgactgcctggacaaggtgatcgactacgtgcccggcatcttccaggagaacagcttcaccatccagtacatcctggacaccagcgacaagctgagcaccgagctgttccaggacaagagcgaggaggccagcctggacctggtgttcgagctggtgaaccagctgcagtaccacacccaccaggagaacggcatcgagatctgcatggacttcctgcagggcacctgcatctacggcagagactgcctgaagcaccacaccgtgctgccctaccactggcagatcaagagaaccaccacccagaagtggcagagcgtgttcaacgacagccaggagcacctggagagattctactgcaaccccgagaacgacagaatgagaatgaagtacggcggccaggagttctgggccgacctgaacgccatgaacgtgtacgagaccaccgagttcgaccagctgagaagactgagcaccccccccagcagcaacgtgaacagcatctaccacaccgtgtggaagttcttctgcagagaccacttcggctggagagagtaccccgagagcgtgatcagactgatcgaggaggccaacagcagaggcctgaaggaggtgagattcatgatgtggaacaaccactacatcctgcacaacagcttcttcagaagagagatcaagagaagacccctgttcagaagctgcttcatcctgctgccctacctgcagaccctgggcggcgtgcccacccaggcccccccccccctggaggccaccagcagcagccagatcatctgccccgacggcgtgaccagcgccaacttctaccccgagacctgggtgtacatgcaccccagccaggacttcatccaggtgcccgtgagcgccgaggacaagagctacagaatcatctacaacctgttccacaagaccgtgcccgagttcaagtacagaatcctgcagatcctgagagtgcagaaccagttcctgtgggagaagtacaagagaaagaaggagtacatgaacagaaagatgttcggcagagacagaatcatcaacgagagacacctgttccacggcaccagccaggacgtggtggacggcatctgcaagcacaacttcgaccccagagtgtgcggcaagcacgccaccatgttcggccagggcagctacttcgccaagaaggccagctacagccacaacttcagcaagaagagcagcaagggcgtgcacttcatgttcctggccaaggtgctgaccggcagatacaccatgggcagccacggcatgagaagacccccccccgtgaaccccggcagcgtgaccagcgacctgtacgacagctgcgtggacaacttcttcgagccccagatcttcgtgatcttcaacgacgaccagagctacccctacttcgtgatccagtacgaggaggtgagcaacacctag

SEQ ID NO: 102012 - DNA, 1974 bp, synthetic construct; identical to SEQ ID NO: 102008
  misc_feature 1..1974: note = Description of Artificial Sequence: Synthetic coding sequence
  source 1..1974: mol_type = other DNA

SEQ ID NO: 102013 - DNA, 1974 bp, synthetic construct; identical to SEQ ID NO: 102008
  misc_feature 1..1974: note = Description of Artificial Sequence: Synthetic coding sequence
  source 1..1974: mol_type = other DNA

SEQ ID NO: 102014 - DNA, 1662 bp, synthetic construct
  misc_feature 1..1662: note = Description of Artificial Sequence: Synthetic coding sequence
  source 1..1662: mol_type = other DNA
atgggcgccctggagatgcaggacgaggaggacagaatcgaggccctgaagcaggtggccgacaagctgcccagacccaacctgctgctgctgaagcacctggtgtacgtgctgcacctgatcagcaagaacagcgaggtgaacagaatggacagcagcaacctggccatctgcatcggccccaacatgctgaccctggagaacgaccagagcctgagcttcgaggcccagaaggacctgaacaacaaggtgaagaccctggtggagttcctgatcgacaactgcttcgagatcttcggcgagaacatccccgtgcacagcagcatcaccagcgacgacagcctggagcacaccgacagcagcgacgtgagcaccctgcagaacgacagcgcctacgacagcaacgaccccgacgtggagagcaacagcagcagcggcatcagcagccccagcagacagccccaggtgcccatggccaccgccgccggcctggacagcgccggcccccaggacgccagagaggtgagccccgagcccatcgtgagcaccgtggccagactgaagagcagcctggcccagcccgacagaagatacagcgagcccagcatgcccagcagccaggagtgcctggagagcagagtgaccaaccagaccctgaccaagagcgagggcgacttccccgtgcccagagtgggcagcagactggagagcgaggaggccgaggaccccttccccgaggaggtgttccccgccgtgcagggcaagaccaagagacccgtggacctgaagatcaagaacctggcccccggcagcgtgctgcccagagccctggtgctgaaggccttcagcagcagcagcctggacgccagcagcgacagcagccccgtggccagccccagcagccccaagagaaacttcttcagcagacaccagagcttcaccaccaagaccgagaagggcaagcccagcagagagatcaagaagcacagcatgagcttcaccttcgccccccacaagaaggtgctgaccaagaacctgagcgccggcagcggcaagagccaggacttcaccagagaccacgtgcccagaggcgtgagaaaggagagccagctggccggcagaatcgtgcaggagaacggctgcgagacccacaaccagaccgccagaggcttctgcctgagaccccacgccctgagcgtggacgacgtgttccagggcgccgactgggagagacccggcagcccccccagctacgaggaggccatgcagggccccgccgccagactggtggccagcgagagccagaccgtgggcagcatgaccgtgggcagcatgagagccagaatgctggaggcccactgcctgctgccccccctgccccccgcccaccacgtggaggacagcagacacagaggcagcaaggagcccctgcccggccacggcctgagccccctgcccgagagatggaagcagagcagaaccgtgcacgccagcggcgacagcctgggccacgtgagcggccccggcagacccgagctgctgcccctgagaaccgtgagcgagagcgtgcagagaaacaagagagactgcctggtgagaagatgcagccagcccgtgttcgaggccgaccagttccagtacgccaaggagagctacatctag

SEQ ID NO: 102015 - DNA, 801 bp, synthetic construct
  misc_feature 1..801: note = Description of Artificial Sequence: Synthetic coding sequence
  source 1..801: mol_type = other DNA
atgaagctgagaagcagccacaacgccagcaagaccctgaacgccaacaacatggagaccctgatcgagtgccagagcgagggcgacatcaaggagcaccccctgctggccagctgcgagagcgaggacagcatctgccagctgatcgaggtgaagaagagaaagaaggtgctgagctggcccttcctgatgagaagactgagccccgccagcgacttcagcggcgccctggagaccgacctgaaggccagcctgttcgaccagcccctgagcatcatctgcggcgacagcgacaccctgcccagacccatccaggacatcctgaccatcctgtgcctgaagggccccagcaccgagggcatcttcagaagagccgccaacgagaaggccagaaaggagctgaaggaggagctgaacagcggcgacgccgtggacctggagagactgcccgtgcacctgctggccgtggtgttcaaggacttcctgagaagcatccccagaaagctgctgagcagcgacctgttcgaggagtggatgggcgccctggagatgcaggacgaggaggacagaatcgaggccctgaagcaggtggccgacaagctgcccagacccaacctgctgctgctgaagcacctggtgtacgtgctgcacctgatcagcaagaacagcgaggtgaacagaatggacagcagcaacctggccatctgcatcggccccaacatgctgaccctggagaacgaccagagcctgagcttcgaggcccagaaggacctgaacaacaaggtgtgcagcgcctactag

SEQ ID NO: 102016 - DNA, 2196 bp, synthetic construct
  misc_feature 1..2196: note = Description of Artificial Sequence: Synthetic coding sequence
  source 1..2196: mol_type = other DNA
atgaagctgagaagcagccacaacgccagcaagaccctgaacgccaacaacatggagaccctgatcgagtgccagagcgagggcgacatcaaggagcaccccctgctggccagctgcgagagcgaggacagcatctgccagctgatcgaggtgaagaagagaaagaaggtgctgagctggcccttcctgatgagaagactgagccccgccagcgacttcagcggcgccctggagaccgacctgaaggccagcctgttcgaccagcccctgagcatcatctgcggcgacagcgacaccctgcccagacccatccaggacatcctgaccatcctgtgcctgaagggccccagcaccgagggcatcttcagaagagccgccaacgagaaggccagaaaggagctgaaggaggagctgaacagcggcgacgccgtggacctggagagactgcccgtgcacctgctggccgtggtgttcaaggacttcctgagaagcatccccagaaagctgctgagcagcgacctgttcgaggagtggatgggcgccctggagatgcaggacgaggaggacagaatcgaggccctgaagcaggtggccgacaagctgcccagacccaacctgctgctgctgaagcacctggtgtacgtgctgcacctgatcagcaagaacagcgaggtgaacagaatggacagcagcaacctggccatctgcatcggccccaacatgctgaccctggagaacgaccagagcctgagcttcgaggcccagaaggacctgaacaacaaggtgaagaccctggtggagttcctgatcgacaactgcttcgagatcttcggcgagaacatccccgtgcacagcagcatcaccagcgacgacagcctggagcacaccgacagcagcgacgtgagcaccctgcagaacgacagcgcctacgacagcaacgaccccgacgtggagagcaacagcagcagcggcatcagcagccccagcagacagccccaggtgcccatggccaccgccgccggcctggacagcgccggcccccaggacgccagagaggtgagccccgagcccatcgtgagcaccgtggccagactgaagagcagcctggcccagcccgacagaagatacagcgagcccagcatgcccagcagccaggagtgcctggagagcagagtgaccaaccagaccctgaccaagagcgagggcgacttccccgtgcccagagtgggcagcagactggagagcgaggaggccgaggaccccttccccgaggaggtgttccccgccgtgcagggcaagaccaagagacccgtggacctgaagatcaagaacctggcccccggcagcgtgctgcccagagccctggtgctgaaggccttcagcagcagcagcctggacgccagcagcgacagcagccccgtggccagccccagcagccccaagagaaacttcttcagcagacaccagagcttcaccaccaagaccgagaagggcaagcccagcagagagatcaagaagcacagcatgagcttcaccttcgccccccacaagaaggtgctgaccaagaacctgagcgccggcagcggcaagagccaggacttcaccagagaccacgtgcccagaggcgtgagaaaggagagccagctggccggcagaatcgtgcaggagaacggctgcgagacccacaaccagaccgccagaggcttctgcctgagaccccacgccctgagcgtggacgacgtgttccagggcgccgactgggagagacccggcagcccccccagctacgaggaggccatgcagggccccgccgccagactggtggccagcgagagccagaccgtgggcagcatgaccgtgggcagcatgagagccagaatgctggaggcccactgcctgctgccccccctgccccccgcccaccacgtggaggacagcagacacagaggcagcaaggagcccctgcccggccacggcctgagccccctgcccgagagatggaagcagagcagaaccgtgcacgccagcggcgacagcctgggccacgtgagcggccccggcagacccgagctgctgcccctgagaaccgtgagcgagagcgtgcagagaaacaagagagactgcctggtgagaagatgcagccagcccgtgttcgaggccgaccagttccagtacgccaaggagagctacatctag

SEQ ID NO: 102017 - DNA, 828 bp, synthetic construct
  misc_feature 1..828: note = Description of Artificial Sequence: Synthetic coding sequence
  source 1..828: mol_type = other DNA
atggccaccgccgccggcctggacagcgccggcccccaggacgccagagaggtgagccccgagcccatcgtgagcaccgtggccagactgaagagcagcctggcccagcccgacagaagatacagcgagcccagcatgcccagcagccaggagtgcctggagagcagagtgaccaaccagaccctgaccaagagcgagggcgacttccccgtgcccagagtgggcagcagactggagagcgaggaggccgaggaccccttccccgaggaggtgttccccgccgtgcagggcaagaccaagagacccgtggacctgaagatcaagaacctggcccccggcagcgtgctgcccagagccctggtgctgaaggccttcagcagcagcagcctggacgccagcagcgacagcagccccgtggccagccccagcagccccaagagaaacttcttcagcagacaccagagcttcaccaccaagaccgagaagggcaagcccagcagagagatcaagaagcacagcatgagcttcaccttcgccccccacaagaaggtgctgaccaagaacctgagcgccggcagcggcaagagccaggacttcaccagagaccacgtgcccagaggcgtgagaaaggagagccagctggccggcagaatcgtgcaggagaacggctgcgagacccacaaccagaccgccagaggcttctgcctgagaccccacgccctgagcgtggacgacgtgttccagggcgccgactgggagagacccggcagcccccccagctacgaggaggccatgcagggccccgccgccagaccctggggcgcctag

SEQ ID NO: 102018 - DNA, 327 bp, synthetic construct
  misc_feature 1..327: note = Description of Artificial Sequence: Synthetic coding sequence
  source 1..327: mol_type = other DNA
atgaccagaaagatcttcaccaacaccagagagagatggagacagcagaacgtgaacagcgccttcgccaagctgagaaagctgatccccacccacccccccgacaagaagctgagcaagaacgagaccctgagactggccatgagatacatcaacttcctggtgaaggtgctgggcgagcagagcctgcagcagaccggcgtggccgcccagggcaacatcctgggcctgttcccccagggcccccacctgcccggcctggaggacagaaccctgctggagaactaccaggtgcccagccccggccccagccaccacatcccctag

SEQ ID NO: 102019 - DNA, 780 bp, synthetic construct
  misc_feature 1..780: note = Description of Artificial Sequence: Synthetic coding sequence
  source 1..780: mol_type = other DNA
atggccagcccccagggcggccagatcgccatcgccatgagactgagaaaccagctgcagagcgtgtacaagatggaccccctgagaaacgaggaggaggtgagagtgaagatcaaggacctgaacgagcacatcgtgtgctgcctgtgcgccggctacttcgtggacgccaccaccatcaccgagtgcctgcacaccttctgcaagagctgcatcgtgaagtacctgcagaccagcaagtactgccccatgtgcaacatcaagatccacgagacccagcccctgctgaacctgaagctggacagagtgatgcaggacatcgtgtacaagctggtgcccggcctgcaggacagcgaggagaagagaatcagagagttctaccagagcagaggcctggacagagtgacccagcccaccggcgaggagcccgccctgagcaacctgggcctgcccttcagcagcttcgaccacagcaaggcccactactacagatacgacgagcagctgaacctgtgcctggagagactgagcagcggcaaggacaagaacaagagcgtgctgcagaacaagtacgtgagatgcagcgtgagagccgaggtgagacacctgagaagagtgctgtgccacagactgatgctgaacccccagcacgtgcagctgctgttcgacaacgaggtgctgcccgaccacatgaccatgaagcagatctggctgagcagatggttcggcaagcccagccccctgctgctgcagtacagcgtgaaggagaagagaagatag

SEQ ID NO: 102020 - DNA, 876 bp, synthetic construct
  misc_feature 1..876: note = Description of Artificial Sequence: Synthetic coding sequence
  source 1..876: mol_type = other DNA
atggaggcccccgccagcgcccagaccccccacccccacgagcccatcagcttcggcatcgaccagatcctgaacagccccgaccaggacagcgcccccgcccccagaggccccgacggcgccagctacctgggcggcccccccggcggcagacccggcgccacctaccccagcctgcccgccagcttcgccggcctgggcgcccccttcgaggacgccggcagctacagcgtgaacctgagcctggcccccgccggcgtgatcagagtgcccgcccacagacccctgcccggcgccgtgcccccccccctgcccagcgccctgcccgccatgcccagcgtgcccaccgtgagcagcctgggcggcctgaacttcccctggatggagagcagcagaagattcgtgaaggacagattcaccgccgccgccgccctgacccccttcaccgtgaccagaagaatcggccacccctaccagaacagaaccccccccaagagaaagaagcccagaaccagcttcagcagagtgcagatctgcgagctggagaagagattccacagacagaagtacctggccagcgccgagagagccgccctggccaagagcctgaagatgaccgacgcccaggtgaagacctggttccagaacagaagaaccaagtggagaagacagaccgccgaggagagagaggccgagagacagcaggccagcagactgatgctgcagctgcagcacgacgccttccagaagagcctgaacgacagcatccagcccgaccccctgtgcctgcacaacagcagcctgttcgccctgcagaacctgcagccctgggaggaggacagcagcaaggtgcccgccgtgaccagcctggtgtag

SEQ ID NO: 102021 - DNA, 312 bp, synthetic construct
  misc_feature 1..312: note = Description of Artificial Sequence: Synthetic coding sequence
  source 1..312: mol_type = other DNA
atggccgagagctggagcggccaggccctgcaggccctgcccgccaccgtgctgggcgccctgggcagcgagttcctgagagagtgggaggcccaggacatgagagtgaccctgttcaagctgctgctgctgtggctggtgctgagcctgctgggcatccagctggcctggggcttctacggcaacaccgtgaccggcctgtaccacagacccggcctgggcggccagaacggcagcacccccgacggcagcacccacttccccagctgggagatggccgccaacgagcccctgaagacccacagagagtag

SEQ ID NO: 102022 - DNA, 387 bp, synthetic construct
  misc_feature 1..387: note = Description of Artificial Sequence: Synthetic coding sequence
  source 1..387: mol_type = other DNA
atggccagcgaggccagcgtgagactgggcgtgccccccggcagactgtggatccagagacccggcatctacgaggacgaggagggcagaacctgggtgaccgtggtggtgagattcaaccccagcagaagagagtgggccagagccagccagggcagcagatacgagcccagcatcaccgtgcacctgtggcagatggccgtgcacaccagagagctgctgagcagcggccagatgcccttcagccagctgcccgccgtgtggcagctgtaccccggcagaaagtacagagccgccgacagcagcttctgggagatcgccgaccacggccagatcgacagcatggagcagctggtgctgacctaccagcccgagagaaaggactag

SEQ ID NO: 102023 - DNA, 387 bp, synthetic construct; identical to SEQ ID NO: 102022
  misc_feature 1..387: note = Description of Artificial Sequence: Synthetic coding sequence
  source 1..387: mol_type = other DNA

SEQ ID NO: 102024 - DNA, 4776 bp, synthetic construct
  misc_feature 1..4776: note = Description of Artificial Sequence: Synthetic coding sequence
  source 1..4776: mol_type = other DNA
atgggcaacgccgagagccagcacgtggagcacgagttctacggcgagaagcacgccagcctgggcagaaagcacaccagcagaagcctgagactgagccacaagaccagaagaaccagacacgccagcagcggcaaggtgatccacagaaacagcgaggtgagcaccagaagcagcagcacccccagcatcccccagagcctggccgagaacggcctggagcccttcagccaggacggcaccctggaggacttcggcagccccatctgggtggacagagtggacatgggcctgagacccgtgagctacaccgacagcagcgtgacccccagcgtggacagcagcatcgtgctgaccgccgccagcgtgcagagcatgcccgacaccgaggagagcagactgtacggcgacgacgccacctacctggccgagggcggcagaagacagcacagctacaccagcaacggccccaccttcatggagaccgccagcttcaagaagaagagaagcaagagcgccgacatctggagagaggacagcctggagttcagcctgagcgacctgagccaggagcacctgaccagcaacgaggagatcctgggcagcgccgaggagaaggactgcgaggaggccagaggcatggagaccagagccagccccagacagctgagcacctgccagagagccaacagcctgggcgacctgtacgcccagaagaacagcggcgtgaccgccaacggcggccccggcagcaagttcgccggctactgcagaaacctggtgagcgacatccccaacctggccaaccacaagatgccccccgccgccgccgaggagacccccccctacagcaactacaacaccctgccctgcagaaagagccactgcctgagcgagggcgccaccaacccccagatcagccacagcaacagcatgcagggcagaagagccaagaccacccaggacgtgaacgccggcgagggcagcgagttcgccgacagcggcatcgagggcgccaccaccgacaccgacctgctgagcagaagaagcaacgccaccaacagcagctacagccccaccaccggcagagccttcgtgggcagcgacagcggcagcagcagcaccggcgacgccgccagacagggcgtgtacgagaacttcagaagagagctggagatgagcaccaccaacagcgagagcctggaggaggccggcagcgcccacagcgacgagcagagcagcggcaccctgagcagccccggccagagcgacatcctgctgaccgccgcccagggcaccgtgagaaaggccggcgccctggccgtgaagaacttcctggtgcacaagaagaacaagaaggtggagagcgccaccagaagaaagtggaagcactactgggtgagcctgaagggctgcaccctgttcttctacgagagcgacggcagaagcggcatcgaccacaacagcatccccaagcacgccgtgtgggtggagaacagcatcgtgcaggccgtgcccgagcaccccaagaaggacttcgtgttctgcctgagcaacagcctgggcgacgccttcctgttccagaccaccagccagaccgagctggagaactggatcaccgccatccacagcgcctgcgccaccgccgtggccagacaccaccacaaggaggacaccctgagactgctgaagagcgagatcaagaagctggagcagaagatcgacatggacgagaagatgaagaagatgggcgagatgcagctgagcagcgtgaccgacagcaagaagaagaagaccatcctggaccagatcttcgtgtgggagcagaacctggagcagttccagatggacctgttcagattcagatgctacctggccagcctgcagggcggcgagctgcccaaccccaagagactgctggccttcgccagcagacccaccaaggtggccatgggcagactgggcatcttcagcgtgagcagcttccacgccctggtggccgccagaaccggcgagaccggcgtgagaagaagaacccaggccatgagcagaagcgccagcaagagaagaagcagattcagcagcctgtggggcctggacaccaccagcaagaagaagcagggcagacccagcatcaaccaggtgttcggcgagggcaccgaggccgtgaagaagagcctggagggcatcttcgacgacatcgtgcccgacggcaagagagagaaggaggtggtgctgcccaacgtgcaccagcacaaccccgactgcgacatctgggtgcacgagtacttcacccccagctggttctgcctgcccaacaaccagcccgccctgaccgtggtgagacccggcgacaccgccagagacaccctggagctgatctgcaagacccaccagctggaccacagcgcccactacctgagactgaagttcctgatcgagaacaagatgcagctgtacgtgccccagcccgaggaggacatctacgagctgctgtacaaggagatcgagatctgccccaaggtgacccagagcatccacatcgagaagagcgacaccgccgccgacacctacggcttcagcctgagcagcgtggaggaggacggcatcagaagactgtacgtgaacagcgtgaaggagaccggcctggccagcaagaagggcctgaaggccggcgacgagatcctggagatcaacaacagagccgccgacgccctgaacagcagcatgctgaaggacttcctgagccagcccagcctgggcctgctggtgagaacctaccccgagctggaggagggcgtggagctgctggagagccccccccacagagtggacggccccgccgacctgggcgagagccccctggccttcctgaccagcaaccccggccacagcctgtgcagcgagcagggcagcagcgccgagaccgcccccgaggagaccgagggccccgacctggagagcagcgacgagaccgaccacagcagcaagagcaccgagcaggtggccgccttctgcagaagcctgcacgagatgaaccccagcgaccagagccccagcccccaggacagcaccggcccccagctggccaccatgagacagctgagcgacgccgacaagctgagaaaggtgatctgcgagctgctggagaccgagagaacctacgtgaaggacctgaactgcctgatggagagatacctgaagcccctgcagaaggagaccttcctgacccaggacgagctggacgtgctgttcggcaacctgaccgagatggtggagttccaggtggagttcctgaagaccctggaggacggcgtgagactggtgcccgacctggagaagctggagaaggtggaccagttcaagaaggtgctgttcagcctgggcggcagcttcctgtactacgccgacagattcaagctgtacagcgccttctgcgccagccacaccaaggtgcccaaggtgctggtgaaggccaagaccgacaccgccttcaaggccttcctggacgcccagaaccccaagcagcagcacagcagcaccctggagagctacctgatcaagcccatccagagaatcctgaagtaccccctgctgctgagagagctgttcgccctgaccgacgccgagagcgaggagcactaccacctggacgtggccatcaagaccatgaacaaggtggccagccacatcaacgagatgcagaagatccacgaggagttcggcgccgtgttcgaccagctgatcgccgagcagaccggcgagaagaaggaggtggccgacctgagcatgggcgacctgctgctgcacaccaccgtgatctggctgaacccccccgccagcctgggcaagtggaagaaggagcccgagctggccgccttcgtgttcaagaccgccgtggtgctggtgtacaaggacggcagcaagcagaagaagaagctggtgggcagccacagactgagcatctacgaggactgggaccccttcagattcagacacatgatccccaccgaggccctgcaggtgagagccctggccagcgccgacgccgaggccaacgccgtgtgcgagatcgtgcacgtgaagagcgagagcgagggcagacccgagagagtgttccacctgtgctgcagcagccccgagagcagaaaggacttcctgaaggccgtgcacagcatcctgagagacaagcacagaagacagctgctgaagaccgagagcctgcccagcagccagcagtacgtgcccttcggcggcaagagactgtgcgccctgaagggcgccagacccgccatgagcagagccgtgagcgcccccagcaagagcctgggcagaagaagaagaagactggccagaaacagattcaccatcgacagcgacgccgtgagcgccagcagccccgagaaggagagccagcagccccccggcggcggcgacaccgacagatgggtggaggagcagttcgacctggcccagtacgaggagcaggacgacatcaaggagaccgacatcctgagcgacgacgacgagttctgcgagagcgtgaagggcgccagcgtggacagagacctgcaggagagactgcaggccaccagcatcagccagagagagagaggcagaaagaccctggacagccacgccagcagaatggcccagctgaagaagcaggccgccctgagcggcatcaacggcggcctggagagcgccagcgaggaggtgatctgggtgagaagagaggacttcgcccccagcagaaagctgaacaccgagatctag

SEQ ID NO: 102025 - DNA, 3216 bp, synthetic construct
  misc_feature 1..3216: note = Description of Artificial Sequence: Synthetic coding sequence
  source 1..3216: mol_type = other DNA
atggagaccgccagcttcaagaagaagagaagcaagagcgccgacatctggagagaggacagcctggagttcagcctgagcgacctgagccaggagcacctgaccagcaacgaggagatcctgggcagcgccgaggagaaggactgcgaggaggccagaggcatggagaccagagccagccccagacagctgagcacctgccagagagccaacagcctgggcgacctgtacgcccagaagaacagcggcgtgaccgccaacggcggccccggcagcaagttcgccggctactgcagaaacctggtgagcgacatccccaacctggccaaccacaagatgccccccgccgccgccgaggagacccccccctacagcaactacaacaccctgccctgcagaaagagccactgcctgagcgagggcgccaccaacccccagatcagccacagcaacagcatgcagggcagaagagccaagaccacccaggacgtgaacgccggcgagggcagcgagttcgccgacagcggcatcgagggcgccaccaccgacaccgacctgctgagcagaagaagcaacgccaccaacagcagctacagccccaccaccggcagagccttcgtgggcagcgacagcggcagcagcagcaccggcgacgccgccagacagggcgtgtacgagaacttcagaagagagctggagatgagcaccaccaacagcgagagcctggaggaggccggcagcgcccacagcgacgagcagagcagcggcaccctgagcagccccggccagagcgacatcctgctgaccgccgcccagggcaccgtgagaaaggccggcgccctggccgtgaagaacttcctggtgcacaagaagaacaagaaggtggagagcgccaccagaagaaagtggaagcactactgggtgagcctgaagggctgcaccctgttcttctacgagagcgacggcagaagcggcatcgaccacaacagcatccccaagcacgccgtgtgggtggagaacagcatcgtgcaggccgtgcccgagcaccccaagaaggacttcgtgttctgcctgagcaacagcctgggcgacgccttcctgttccagaccaccagccagaccgagctggagaactggatcaccgccatccacagcgcctgcgccaccgccgtggccagacaccaccacaaggaggacaccctgagactgctgaagagcgagatcaagaagctggagcagaagatcgacatggacgagaagatgaagaagatgggcgagatgcagctgagcagcgtgaccgacagcaagaagaagaagaccatcctggaccagatcttcgtgtgggagcagaacctggagcagttccagatggacctgttcagattcagatgctacctggccagcctgcagggcggcgagctgcccaaccccaagagactgctggccttcgccagcagacccaccaaggtggccatgggcagactgggcatcttcagcgtgagcagcttccacgccctggtggccgccagaaccggcgagaccggcgtgagaagaagaacccaggccatgagcagaagcgccagcaagagaagaagcagattcagcagcctgtggggcctggacaccaccagcaagaagaagcagggcagacccagcatcaaccaggtgttcggcgagggcaccgaggccgtgaagaagagcctggagggcatcttcgacgacatcgtgcccgacggcaagagagagaaggaggtggtgctgcccaacgtgcaccagcacaaccccgactgcgacatctgggtgcacgagtacttcacccccagctggttctgcctgcccaacaaccagcccgccctgaccgtggtgagacccggcgacaccgccagagacaccctggagctgatctgcaagacccaccagctggaccacagcgcccactacctgagactgaagttcctgatcgagaacaagatgcagctgtacgtgccccagcccgaggaggacatctacgagctgctgtacaaggagatcgagatctgccccaaggtgacccagagcatccacatcgagaagagcgacaccgccgccgacacctacggcttcagcctgagcagcgtggaggaggacggcatcagaagactgtacgtgaacagcgtgaaggagaccggcctggccagcaagaagggcctgaaggccggcgacgagatcctggagatcaacaacagagccgccgacgccctgaacagcagcatgctgaaggacttcctgagccagcccagcctgggcctgctggtgagaacctaccccgagctggaggagggcgtggagctgctggagagccccccccacagagtggacggccccgccgacctgggcgagagccccctggccttcctgaccagcaaccccggccacagcctgtgcagcgagcagggcagcagcgccgagaccgcccccgaggagaccgagggccccgacctggagagcagcgacgagaccgaccacagcagcaagagcaccgagcaggtggccgccttctgcagaagcctgcacgagatgaaccccagcgaccagagccccagcccccaggacagcaccggcccccagctggccaccatgagacagctgagcgacgccgacaagctgagaaaggtgatctgcgagctgctggagaccgagagaacctacgtgaaggacctgaactgcctgatggagagatacctgaagcccctgcagaaggagaccttcctgacccaggacgagctggacgtgctgttcggcaacctgaccgagatggtggagttccaggtggagttcctgaagaccctggaggacggcgtgagactggtgcccgacctggagaagctggagaaggtggaccagttcaagaaggtgctgttcagcctgggcggcagcttcctgtactacgccgacagattcaagctgtacagcgccttctgcgcccacaagagcagccagggccccggcgagagccaggacagacacggcttccagggcatcctgggctgccccgagcccgaggccgccgccctgatccacgccggcgtggtgccccaccaggcccaccccgaggacccccaggtgcccaccagcgcccagggcgccgtgagacccgacagatgcggcgagagaggcgccctgccccccggcagaggccaccaggaccacgagcagggctgccagagccaccagtag

SEQ ID NO: 102026 - DNA, 678 bp, synthetic construct
  misc_feature 1..678: note = Description of Artificial Sequence: Synthetic coding sequence
  source 1..678: mol_type = other DNA
atgggcaacgccgagagccagcacgtggagcacgagttctacggcgagaagcacgccagcctgggcagaaagcacaccagcagaagcctgagactgagccacaagaccagaagaaccagacacgccagcagcggcaaggtgatccacagaaacagcgaggtgagcaccagaagcagcagcacccccagcatcccccagagcctggccgagaacggcctggagcccttcagccaggacggcaccctggaggacttcggcagccccatctgggtggacagagtggacatgggcctgagacccgtgagctacaccgacagcagcgtgacccccagcgtggacagcagcatcgtgctgaccgccgccagcgtgcagagcatgcccgacaccgaggagagcagactgtacggcgacgacgccacctacctggccgagggcggcagaagacagcacagctacaccagcaacggccccaccttcatggagaccgccagcttcaagaagaagagaagcaagagcgccgacatctggagagaggacagcctggagttcagcctgagcgacctgagccaggagcacctgaccagcaacgaggagatcctgggcagcgccgaggagaaggactgcgaggaggccagaggcatggagaccagagccagccccagacagctgagcacctag

SEQ ID NO: 102027 - DNA, 4596 bp, synthetic construct
  misc_feature 1..4596: note = Description of Artificial Sequence: Synthetic coding sequence
  source 1..4596: mol_type = other DNA
atgggcaacgccgagagccagcacgtggagcacgagttctacggcgagaagcacgccagcctgggcagaaagcacaccagcagaagcctgagactgagccacaagaccagaagaaccagacacgccagcagcggcaaggtgatccacagaaacagcgaggtgagcaccagaagcagcagcacccccagcatcccccagagcctggccgagaacggcctggagcccttcagccaggacggcaccctggaggacttcggcagccccatctgggtggacagagtggacatgggcctgagacccgtgagctacaccgacagcagcgtgacccccagcgtggacagcagcatcgtgctgaccgccgccagcgtgcagagcatgcccgacaccgaggagagcagactgtacggcgacgacgccacctacctggccgagggcggcagaagacagcacagctacaccagcaacggccccaccttcatggagaccgccagcttcaagaagaagagaagcaagagcgccgacatctggagagaggacagcctggagttcagcctgagcgacctgagccaggagcacctgaccagcaacgaggagatcctgggcagcgccgaggagaaggactgcgaggaggccagaggcatggagaccagagccagccccagacagctgagcacctgccagagagccaacagcctgggcgacctgtacgcccagaagaacagcggcgtgaccgccaacggcggccccggcagcaagttcgccggctactgcagaaacctggtgagcgacatccccaacctggccaaccacaagatgccccccgccgccgccgaggagacccccccctacagcaactacaacaccctgccctgcagaaagagccactgcctgagcgagggcgccaccaacccccagatcagccacagcaacagcatgcagggcagaagagccaagaccacccaggacgtgaacgccggcgagggcagcgagttcgccgacagcggcatcgagggcgccaccaccgacaccgacctgctgagcagaagaagcaacgccaccaacagcagctacagccccaccaccggcagagccttcgtgggcagcgacagcggcagcagcagcaccggcgacgccgccagacagggcgtgtacgagaacttcagaagagagctggagatgagcaccaccaacagcgagagcctggaggaggccggcagcgcccacagcgacgagcagagcagcggcaccctgagcagccccggccagagcgacatcctgctgaccgccgcccagggcaccgtgagaaaggccggcgccctggccgtgaagaacttcctggtgcacaagaagaacaagaaggtggagagcgccaccagaagaaagtggaagcactactgggtgagcctgaagggctgcaccctgttcttctacgagagcgacggcagaagcggcatcgaccacaacagcatccccaagcacgccgtgtgggtggagaacagcatcgtgcaggccgtgcccgagcaccccaagaaggacttcgtgttctgcctgagcaacagcctgggcgacgccttcctgttccagaccaccagccagaccgagctggagaactggatcaccgccatccacagcgcctgcgccaccgccgtggccagacaccaccacaaggaggacaccctgagactgctgaagagcgagatcaagaagctggagcagaagatcgacatggacgagaagatgaagaagatgggcgagatgcagctgagcagcgtgaccgacagcaagaagaagaagaccatcctggaccagatcttcgtgtgggagcagaacctggagcagttccagatggacctgttcagattcagatgctacctggccagcctgcagggcggcgagctgcccaaccccaagagactgctggccttcgccagcagacccaccaaggtggccatgggcagactgggcatcttcagcgtgagcagcttccacgccctggtggccgccagaaccggcgagaccggcgtgagaagaagaacccaggccatgagcagaagcgccagcaagagaagaagcagattcagcagcctgtggggcctggacaccaccagcaagaagaagcagggcagacccagcatcaaccagagagagaaggaggtggtgctgcccaacgtgcaccagcacaaccccgactgcgacatctgggtgcacgagtacttcacccccagctggttctgcctgcccaacaaccagcccgccctgaccgtggtgagacccggcgacaccgccagagacaccctggagctgatctgcaagctgtacaaggagatcgagatctgccccaaggtgacccagagcatccacatcgagaagagcgacaccgccgccgacacctacggcttcagcctgagcagcgtggaggaggacggcatcagaagactgtacgtgaacagcgtgaaggagaccggcctggccagcaagaagggcctgaaggccggcgacgagatcctggagatcaacaacagagccgccgacgccctgaacagcagcatgctgaaggacttcctgagccagcccagcctgggcctgctggtgagaacctaccccgagctggaggagggcgtggagctgctggagagccccccccacagagtggacggccccgccgacctgggcgagagccccctggccttcctgaccagcaaccccggccacagcctgtgcagcgagcagggcagcagcgccgagaccgcccccgaggagaccgagggccccgacctggagagcagcgacgagaccgaccacagcagcaagagcaccgagcaggtggccgccttctgcagaagcctgcacgagatgaaccccagcgaccagagccccagcccccaggacagcaccggcccccagctggccaccatgagacagctgagcgacgccgacaagctgagaaaggtgatctgcgagctgctggagaccgagagaacctacgtgaaggacctgaactgcctgatggagagatacctgaagcccctgcagaaggagaccttcctgacccaggacgagctggacgtgctgttcggcaacctgaccgagatggtggagttccaggtggagttcctgaagaccctggaggacggcgtgagactggtgcccgacctggagaagctggagaaggtggaccagttcaagaaggtgctgttcagcctgggcggcagcttcctgtactacgccgacagattcaagctgtacagcgccttctgcgccagccacaccaaggtgcccaaggtgctggtgaaggccaagaccgacaccgccttcaaggccttcctggacgcccagaaccccaagcagcagcacagcagcaccctggagagctacctgatcaagcccatccagagaatcctgaagtaccccctgctgctgagagagctgttcgccctgaccgacgccgagagcgaggagcactaccacctggacgtggccatcaagaccatgaacaaggtggccagccacatcaacgagatgcagaagatccacgaggagttcggcgccgtgttcgaccagctgatcgccgagcagaccggcgagaagaaggaggtggccgacctgagcatgggcgacctgctgctgcacaccaccgtgatctggctgaacccccccgccagcctgggcaagtggaagaaggagcccgagctggccgccttcgtgttcaagaccgccgtggtgctggtgtacaaggacggcagcaagcagaagaagaagctggtgggcagccacagactgagcatctacgaggactgggaccccttcagattcagacacatgatccccaccgaggccctgcaggtgagagccctggccagcgccgacgccgaggccaacgccgtgtgcgagatcgtgcacgtgaagagcgagagcgagggcagacccgagagagtgttccacctgtgctgcagcagccccgagagcagaaaggacttcctgaaggccgtgcacagcatcctgagagacaagcacagaagacagctgctgaagaccgagagcctgcccagcagccagcagtacgtgcccttcggcggcaagagactgtgcgccctgaagggcgccagacccgccatgagcagagccgtgagcgcccccagcaagagcctgggcagaagaagaagaagactggccagaaacagattcaccatcgacagcgacgccgtgagcgccagcagccccgagaaggagagccagcagccccccggcggcggcgacaccgacagatgggtggaggagcagttcgacctggcccagtacgaggagcaggacgacatcaaggagaccgacatcctgagcgacgacgacgagttctgcgagagcgtgaagggcgccagcgtggacagagacctgcaggagagactgcaggccaccagcatcagccagagagagagaggcagaaagaccctggacagccacgccagcagaatggcccagctgaagaagcaggccgccctgagcggcatcaacggcggcctggagagcgccagcgaggaggtgatctgggtgagaagagaggacttcgcccccagcagaaagctgaacaccgagatctag

SEQ ID NO: 102028 - DNA, 2493 bp, synthetic construct
  misc_feature 1..2493: note = Description of Artificial Sequence: Synthetic coding sequence
  source 1..2493: mol_type = other DNA
atgggcagcatgttcagaagcgaggaggtggccctggtgcagctgttcctgcccaccgccgccgcctacacctgcgtgagcagactgggcgagctgggcctggtggagttcagagacctgaacgccagcgtgagcgccttccagagaagattcgtggtggacgtgagaagatgcgaggagctggagaagaccttcaccttcctgcaggaggaggtgagaagagccggcctggtgctgcccccccccaagggcagactgcccgcccccccccccagagacctgctgagaatccaggaggagaccgagagactggcccaggagctgagagacgtgagaggcaaccagcaggccctgagagcccagctgcaccagctgcagctgcacgccgccgtgctgagacagggccacgagccccagctggccgccgcccacaccgacggcgccagcgagagaacccccctgctgcaggcccccggcggcccccaccaggacctgagagtgaacttcgtggccggcgccgtggagccccacaaggcccccgccctggagagactgctgtggagagcctgcagaggcttcctgatcgccagcttcagagagctggagcagcccctggagcaccccgtgaccggcgagcccgccacctggatgaccttcctgatcagctactggggcgagcagatcggccagaagatcagaaagatcaccgactgcttccactgccacgtgttccccttcctgcagcaggaggaggccagactgggcgccctgcagcagctgcagcagcagagccaggagctgcaggaggtgctgggcgagaccgagagattcctgagccaggtgctgggcagagtgctgcagctgctgccccccggccaggtgcaggtgcacaagatgaaggccgtgtacctggccctgaaccagtgcagcgtgagcaccacccacaagtgcctgatcgccgaggcctggtgcagcgtgagagacctgcccgccctgcaggaggccctgagagacagcagcatggaggagggcgtgagcgccgtggcccacagaatcccctgcagagacatgccccccaccctgatcagaaccaacagattcaccgccagcttccagggcatcgtggacgcctacggcgtgggcagataccaggaggtgaaccccgccccctacaccatcatcaccttccccttcctgttcgccgtgatgttcggcgacgtgggccacggcctgctgatgttcctgttcgccctggccatggtgctggccgagaacagacccgccgtgaaggccgcccagaacgagatctggcagaccttcttcagaggcagatacctgctgctgctgatgggcctgttcagcatctacaccggcttcatctacaacgagtgcttcagcagagccaccagcatcttccccagcggctggagcgtggccgccatggccaaccagagcggctggagcgacgccttcctggcccagcacaccatgctgaccctggaccccaacgtgaccggcgtgttcctgggcccctaccccttcggcatcgaccccatctggagcctggccgccaaccacctgagcttcctgaacagcttcaagatgaagatgagcgtgatcctgggcgtggtgcacatggccttcggcgtggtgctgggcgtgttcaaccacgtgcacttcggccagagacacagactgctgctggagaccctgcccgagctgaccttcctgctgggcctgttcggctacctggtgttcctggtgatctacaagtggctgtgcgtgtgggccgccagagccgccagcgcccccagcatcctgatccacttcatcaacatgttcctgttcagccacagccccagcaacagactgctgtaccccagacaggaggtggtgcaggccaccctggtggtgctggccctggccatggtgcccatcctgctgctgggcacccccctgcacctgctgcacagacacagaagaagactgagaagaagacccgccgacagacaggaggagaacaaggccggcctgctggacctgcccgacgccagcgtgaacggctggagcagcgacgaggagaaggccggcggcctggacgacgaggaggaggccgagctggtgcccagcgaggtgctgatgcaccaggccatccacaccatcgagttctgcctgggctgcgtgagcaacaccgccagctacctgagactgtgggccctgagcctggcccacgcccagctgagcgaggtgctgtgggccatggtgatgagaatcggcctgggcctgggcagagaggtgggcgtggccgccgtggtgctggtgcccatcttcgccgccttcgccgtgatgaccgtggccatcctgctggtgatggagggcctgagcgccttcctgcacgccctgagactgcactgggtggagttccagaacaagttctacagcggcaccggctacaagctgagccccttcaccttcgccgccaccgacgactag

SEQ ID NO: 102029 - DNA, 657 bp, synthetic construct
  misc_feature 1..657: note = Description of Artificial Sequence: Synthetic coding sequence
  source 1..657: mol_type = other DNA
atgggcagcatgttcagaagcgaggaggtggccctggtgcagctgttcctgcccaccgccgccgcctacacctgcgtgagcagactgggcgagctgggcctggtggagttcagagacctgaacgccagcgtgagcgccttccagagaagattcgtggtggacgtgagaagatgcgaggagctggagaagaccttcaccttcctgcaggaggaggtgagaagagccggcctggtgctgcccccccccaagggcagactgcccgcccccccccccagagacctgctgagaatccaggaggagaccgagagactggcccaggagctgagagacgtgagaggcaaccagcaggccctgagagcccagctgcaccagctgcagctgcacgccgccgtgctgagacagggccacgagccccagctggccgccgcccacaccgacggcgccagcgagagaacccccctgctgcaggcccccggcggcccccaccaggacctgagagtgaacttcgtggccggcgccgtggagccccacaaggcccccgccctggagagactgctgtggagagcctgcagaggcttcctgatcgccagcttcagagagctggagcagcccctggagcaccccgtgaccggcgagcccgccacctggatgacctag

SEQ ID NO: 102030 - DNA, 186 bp, synthetic construct
  misc_feature 1..186: note = Description of Artificial Sequence: Synthetic coding sequence
  source 1..186: mol_type = other DNA
gacgacgaggaggaggccgagctggtgcccagcgaggtgctgatgcaccaggccatccacaccatcgagttctgcctgggctgcgtgagcaacaccgccagctacctgagactgtgggccctgagcctggcccacgccagatggaacagcagaaccagcagcacccaggccagagccaccagctag

SEQ ID NO: 102031 - DNA, 1845 bp, synthetic construct
  misc_feature 1..1845: note = Description of Artificial Sequence: Synthetic coding sequence
  source 1..1845: mol_type = other DNA
atgaccttcctgatcagctactggggcgagcagatcggccagaagatcagaaagatcaccgactgcttccactgccacgtgttccccttcctgcagcaggaggaggccagactgggcgccctgcagcagctgcagcagcagagccaggagctgcaggaggtgctgggcgagaccgagagattcctgagccaggtgctgggcagagtgctgcagctgctgccccccggccaggtgcaggtgcacaagatgaaggccgtgtacctggccctgaaccagtgcagcgtgagcaccacccacaagtgcctgatcgccgaggcctggtgcagcgtgagagacctgcccgccctgcaggaggccctgagagacagcagcatggaggagggcgtgagcgccgtggcccacagaatcccctgcagagacatgccccccaccctgatcagaaccaacagattcaccgccagcttccagggcatcgtggacgcctacggcgtgggcagataccaggaggtgaaccccgccccctacaccatcatcaccttccccttcctgttcgccgtgatgttcggcgacgtgggccacggcctgctgatgttcctgttcgccctggccatggtgctggccgagaacagacccgccgtgaaggccgcccagaacgagatctggcagaccttcttcagaggcagatacctgctgctgctgatgggcctgttcagcatctacaccggcttcatctacaacgagtgcttcagcagagccaccagcatcttccccagcggctggagcgtggccgccatggccaaccagagcggctggagcgacgccttcctggcccagcacaccatgctgaccctggaccccaacgtgaccggcgtgttcctgggcccctaccccttcggcatcgaccccatctggagcctggccgccaaccacctgagcttcctgaacagcttcaagatgaagatgagcgtgatcctgggcgtggtgcacatggccttcggcgtggtgctgggcgtgttcaaccacgtgcacttcggccagagacacagactgctgctggagaccctgcccgagctgaccttcctgctgggcctgttcggctacctggtgttcctggtgatctacaagtggctgtgcgtgtgggccgccagagccgccagcgcccccagcatcctgatccacttcatcaacatgttcctgttcagccacagccccagcaacagactgctgtaccccagacaggaggtggtgcaggccaccctggtggtgctggccctggccatggtgcccatcctgctgctgggcacccccctgcacctgctgcacagacacagaagaagactgagaagaagacccgccgacagacaggaggagaacaaggccggcctgctggacctgcccgacgccagcgtgaacggctggagcagcgacgaggagaaggccggcggcctggacgacgaggaggaggccgagctggtgcccagcgaggtgctgatgcaccaggccatccacaccatcgagttctgcctgggctgcgtgagcaacaccgccagctacctgagactgtgggccctgagcctggcccacgcccagctgagcgaggtgctgtgggccatggtgatgagaatcggcctgggcctgggcagagaggtgggcgtggccgccgtggtgctggtgcccatcttcgccgccttcgccgtgatgaccgtggccatcctgctggtgatggagggcctgagcgccttcctgcacgccctgagactgcactgggtggagttccagaacaagttctacagcggcaccggctacaagctgagccccttcaccttcgccgccaccgacgactag

SEQ ID NO: 102032 - DNA, 357 bp, synthetic construct
  misc_feature 1..357: note = Description of Artificial Sequence: Synthetic coding sequence
  source 1..357: mol_type = other DNA
atggtgcccatcctgctgctgggcacccccctgcacctgctgcacagacacagaagaagactgagaagaagacccgccgacagacaggaggagaacaaggccggcctgctggacctgcccgacgccagcgtgaacggctggagcagcgacgaggagaaggccggcggcctggacgacgaggaggaggccgagctggtgcccagcgaggtgctgatgcaccaggccatccacaccatcgagttctgcctgggctgcgtgagcaacaccgccagctacctgagactgtgggccctgagcctggcccacgccagatggaacagcagaaccagcagcacccaggccagagccaccagctag

SEQ ID NO: 102033 - DNA, 1671 bp, synthetic construct
  misc_feature 1..1671: note = Description of Artificial Sequence: Synthetic coding sequence
  source 1..1671: mol_type = other DNA
atggagggccccctgagcgtgttcggcgacagaagcaccggcgagaccatcagaagccagaacgtgatggccgccgccagcatcgccaacatcgtgaagagcagcctgggccccgtgggcctggacaagatgctggtggacgacatcggcgacgtgaccatcaccaacgacggcgccaccatcctgaagctgctggaggtggagcaccccgccgccaaggtgctgtgcgagctggccgacctgcaggacaaggaggtgggcgacggcaccaccagcgtggtgatcatcgccgccgagctgctgaagaacgccgacgagctggtgaagcagaagatccaccccaccagcgtgatcagcggctacagactggcctgcaaggaggccgtgagatacatcaacgagaacctgatcgtgaacaccgacgagctgggcagagactgcctgatcaacgccgccaagaccagcatgagcagcaagatcatcggcatcaacggcgacttcttcgccaacatggtggtggacgccgtgctggccatcaagtacaccgacatcagaggccagcccagataccccgtgaacagcgtgaacatcctgaaggcccacggcagaagccagatggagagcatgctgatcagcggctacgccctgaactgcgtggtgggcagccagggcatgcccaagagaatcgtgaacgccaagatcgcctgcctggacttcagcctgcagaagaccaagatgaagctgggcgtgcaggtggtgatcaccgaccccgagaagctggaccagatcagacagagagagagcgacatcaccaaggagagaatccagaagatcctggccaccggcgccaacgtgatcctgaccaccggcggcatcgacgacatgtgcctgaagtacttcgtggaggccggcgccatggccgtgagaagagtgctgaagagagacctgaagagaatcgccaaggccagcggcgccaccatcctgagcaccctggccaacctggagggcgaggagaccttcgaggccgccatgctgggccaggccgaggaggtggtgcaggagagaatctgcgacgacgagctgatcctgatcaagaacaccaaggccagaaccagcgccagcatcatcctgagaggcgccaacgacttcatgtgcgacgagatggagagaagcctgcacgacgccctgtgcgtggtgaagagagtgctggagagcaagagcgtggtgcccggcggcggcgccgtggaggccgccctgagcatctacctggagaactacgccaccagcatgggcagcagagagcagctggccatcgccgagttcgccagaagcctgctggtgatccccaacaccctggccgtgaacgccgcccaggacagcaccgacctggtggccaagctgagagccttccacaacgaggcccaggtgaaccccgagagaaagaacctgaagtggatcggcctggacctgagcaacggcaagcccagagacaacaagcaggccggcgtgttcgagcccaccatcgtgaaggtgaagagcctgaagttcgccaccgaggccgccatcaccatcctgagaatcgacgacctgatcaagctgcaccccgagagcaaggacgacaagcacggcagctacgaggacgccgtgcacagcggcgccctgaacgactag

SEQ ID NO: 102034 - DNA, 1206 bp, synthetic construct
  misc_feature 1..1206: note = Description of Artificial Sequence: Synthetic coding sequence
  source 1..1206: mol_type = other DNA
atgagcagcaagatcatcggcatcaacggcgacttcttcgccaacatggtggtggacgccgtgctggccatcaagtacaccgacatcagaggccagcccagataccccgtgaacagcgtgaacatcctgaaggcccacggcagaagccagatggagagcatgctgatcagcggctacgccctgaactgcgtggtgggcagccagggcatgcccaagagaatcgtgaacgccaagatcgcctgcctggacttcagcctgcagaagaccaagatgaagctgggcgtgcaggtggtgatcaccgaccccgagaagctggaccagatcagacagagagagagcgacatcaccaaggagagaatccagaagatcctggccaccggcgccaacgtgatcctgaccaccggcggcatcgacgacatgtgcctgaagtacttcgtggaggccggcgccatggccgtgagaagagtgctgaagagagacctgaagagaatcgccaaggccagcggcgccaccatcctgagcaccctggccaacctggagggcgaggagaccttcgaggccgccatgctgggccaggccgaggaggtggtgcaggagagaatctgcgacgacgagctgatcctgatcaagaacaccaaggccagaaccagcgccagcatcatcctgagaggcgccaacgacttcatgtgcgacgagatggagagaagcctgcacgacgccctgtgcgtggtgaagagagtgctggagagcaagagcgtggtgcccggcggcggcgccgtggaggccgccctgagcatctacctggagaactacgccaccagcatgggcagcagagagcagctggccatcgccgagttcgccagaagcctgctggtgatccccaacaccctggccgtgaacgccgcccaggacagcaccgacctggtggccaagctgagagccttccacaacgaggcccaggtgaaccccgagagaaagaacctgaagtggatcggcctggacctgagcaacggcaagcccagagacaacaagcaggccggcgtgttcgagcccaccatcgtgaaggtgaagagcctgaagttcgccaccgaggccgccatcaccatcctgagaatcgacgacctgatcaagctgcaccccgagagcaaggacgacaagcacggcagctacgaggacgccgtgcacagcggcgccctgaacgactag

SEQ ID NO: 102035 - DNA, 1302 bp, synthetic construct
  misc_feature 1..1302: note = Description of Artificial Sequence: Synthetic coding sequence
  source 1..1302: mol_type = other DNA
atggagggccccctgagcgtgttcggcgacagaagcaccggcgagaccatcagaagccagaacgtgatggccgccgccagcatcgccaacatcgtgaagagcagcctgggccccgtgggcctggacaagatgctggtggacgacatcggcgacgtgaccatcaccaacgacggcgccaccatcctgaagctgctggaggtggagcaccccgccgccaaggtgctgtgcgagctggccgacctgcaggacaaggaggtgggcgacggcaccaccagcgtggtgatcatcgccgccgagctgctgaagaacgccgacgagctggtgaagcagaagatccaccccaccagcgtgatcagcggctacagactggcctgcaaggaggccgtgagatacatcaacgagaacctgatcgtgaacaccgacgagctgggcagagactgcctgatcaacgccgccaagaccagcatgagcagcaagatcatcggcatcaacggcgacttcttcgccaacatggtggtggacgccgtgctggccatcaagtacaccgacatcagaggccagcccagataccccgtgaacagcgtgaacatcctgaaggcccacggcagaagccagatggagagcatgctgatcagcggctacgccctgaactgcgtggtgggcagccagggcatgcccaagagaatcgtgaacgccaagatcgcctgcctggacttcagcctgcagaagaccaagatgaagctgggcgtgcaggtggtgatcaccgaccccgagaagctggaccagatcagacagagagagagcgacatcaccaaggagagaatccagaagatcctggccaccggcgccaacgtgatcctgaccaccggcggcatcgacgacatgtgcctgaagtacttcgtggaggccggcgccatggccgtgagaagagtgctgaagagagacctgaagagaatcgccaaggccagcggcgccaccatcctgagcaccctggccaacctggagggcgaggagaccttcgaggccgccatgctgggccaggccgaggaggtggtgcaggagagaatctgcgacgacgagctgatcctgatcaagaacaccaaggccagaaccagcgccagcatcatcctgagaggcgccaacgacttcatgtgcgacgagatggagagaagcctgcacgacgccctgtgcgtggtgaagagagtgctggagagcaagagcgtggtgcccggcggcggcgccgtggaggccgccctgagcatctacctggagaactacgccaccagcatggactggagctag

SEQ ID NO: 102036 - DNA, 648 bp, synthetic construct
  misc_feature 1..648: note = Description of Artificial Sequence: Synthetic coding sequence
  source 1..648: mol_type = other DNA
atgctggccggccagctggaggccagagaccccaaggagggcacccaccccgaggacccctgccccggcgccggcgccgtgatggagaagaccgccgtggccgccgaggtgctgaccgaggactgcaacaccggcgagatgccccccctgcagcagcagatcatcagactgcaccaggagctgggcagacagaagagcctgtgggccgacgtgcacggcaagctgagaagccacatcgacgccctgagagagcagaacatggagctgagagagaagctgagagccctgcagctgcagagatggaaggccagaaagaagagcgccgccagcccccacgccggccaggagagccacaccctggccctggagcccgccttcggcaagatcagccccctgagcgccgacgaggagaccatccccaagtacgccggccacaagaaccagagcgccaccctgctgggccagagaagcagcagcaacaacagcgccccccccaagcccatgagcctgaagatcgagagaatcagcagctggaagacccccccccaggagaacagagacaagaacctgagcagaagaagacaggacagaagagccacccccaccggcagacccaccccctgcgccgagagaagaggcggcgtgtag

SEQ ID NO: 102037 - DNA, 981 bp, synthetic construct
  misc_feature 1..981: note = Description of Artificial Sequence: Synthetic coding sequence
  source 1..981: mol_type = other DNA
atggagaagacccccgccgccgccgaggtgcccagagaggacagcaacgccggcgagatgcccagcctgcagcagcagatcaccagcctgcaccaggagctgggcagacagcagagcctgtgggccgacatccacagaaagctgcagagccacatggacgccctgagaaagcagaacagagagctgagagaggagctgagaggcctgcagagacagcagtgggaggccggcaagaagcccgccgccagcccccacgccggcagagagagccacaccctggccctggagcccgccttcggcaagatcagccacctgagcgccgacgaggacaccacccccaagtacgccggcagaaagagccagagcgccaccctgctgggccagagatggagcagcaaccacctggccccccccaagcccatgagcctgaagaccgagagaatcaacagcggcaagacccccccccaggaggacagagagaagagcccccccggcagaagacaggacagaagccccgcccccaccggcagacccacccccggcgccgagagaagaggcgtgagcgaggacggcaagatcatgcaccccagcagcagaagcccccagaacagcggcggcagaaagagccccgtgcaggccagccaggccaccaccctgcaggagcagaccgccgccgccagaggcgccgacagaagcagcagcgtgctgggcagcagcgagggcggcttcctgagcagagtgcaggccgacgagttcgccagcagcgcccccgacagcgccgagagacagaacctgcccgtgaacccccccagcagcctggagatcgcccaggccatggacaccaagatgaagaaggaggaggtgcaggaggagaagagacaccccaagggcaaggccgacgactgcagaagaagcggcttccccagcgagttccccggcgccctgcacgccgcccccagcagacaggacatgggcccctag

SEQ ID NO: 102038 - DNA, 1326 bp, synthetic construct
  misc_feature 1..1326: note = Description of Artificial Sequence: Synthetic coding sequence
  source 1..1326: mol_type = other DNA
atggcccccaagggcatcctgggcagcttccccaccgccatgaacctgagcctggagggcaaggtgaaggagaccgtgcacaacgccttctgggaccacctgaaggagcagctgagcgccaccccccccgacttcagctgcgccctggagctgctgaaggagatcaaggagatcctgctgagcctgctgctgcccagacagaacagactgagaatcgagatcgaggaggccctggacatggacctgctgaagcaggaggccgagcacggcgccctgaaggtgctgtacctgagcaagtacgtgctgaacatgatggccctgctgtgcgcccccgtgagagacgaggccgtgcagaagctggagaacatcaccgaccccgtgtggctgctgagaggcatcttccaggtgctgggcagaatgaagatggacatggtgaactacaccatccagagcctgcagccccacctgcaggagcacagcatccagtacgagagagccaagttccaggagctgctgaacaagcagcccagcctgctgaaccacaccaccaagtggctgacccaggccgccggcgacctgaccatgagcccccccacctgccccgacaccagcgacagcagcagcgtggccggccccagccccaacgaggccgccaacaaccccgagcccctgagccccaccatggtgctgtgccagggcttcctgaacctgctgctgtgggacctggagaacgaggagttccccgagaccctgctgatggacagaaccagactgcaggagctgaagagccagctgcaccagctgaccgtgatggccagcgtgctgctggtggccagcagcttcagcggcagcgtgctgttcggcagcccccagttcgtggacaagctgaagagaatcaccaagagcctgctggaggacttccacagcagacccgaggaggccatcctgaccgtgagcgagcaggtgagccaggagatccaccagagcctgaagaacatgggcctggtggccctgagcagcgacaacaccgccagcctgatgggccagctgcagaacatcgccaagaaggagaactgcgtgtgcagcgtgatcgaccagagaatccacctgttcctgaagtgctgcctggtgctgggcgtgcagagaagcctgctggacctgcccggcggcctgaccctgatcgaggccgagctggccgagctgggccagaagttcgtgaacctgacccaccacaaccagcaggtgttcggcccctactacaccgagatcctgaagaccctgatcagccccgcccaggccctggagaccaaggtggagagcgtgtag

SEQ ID NO: 102039 - DNA, 1551 bp, synthetic construct
  misc_feature 1..1551: note = Description of Artificial Sequence: Synthetic coding sequence
  source 1..1551: mol_type = other DNA
atgaccagaggcggcggcggcggcgacaccatcagcaagatgcccgacgtgaaggagagcgtgccccccaagtaccccggcgacagcgagggcagaagctgcaagcccgagaccagcggccccccccaggaggacaagagcggcagcgaggaccccccccccttcctgagcgtgaccggcctgaccgagaccgtgaacgaggtgagcaagctgagcaacaagatcggcatgaactgcgactactacatggaggagaaggtgctgccccccagcagcctggagggcaaggtgaaggagaccgtgcacaacgccttctgggaccacctgaaggagcagctgagcgccaccccccccgacttcagctgcgccctggagctgctgaaggagatcaaggagatcctgctgagcctgctgctgcccagacagaacagactgagaatcgagatcgaggaggccctggacatggacctgctgaagcaggaggccgagcacggcgccctgaaggtgctgtacctgagcaagtacgtgctgaacatgatggccctgctgtgcgcccccgtgagagacgaggccgtgcagaagctggagaacatcaccgaccccgtgtggctgctgagaggcatcttccaggtgctgggcagaatgaagatggacatggtgaactacaccatccagagcctgcagccccacctgcaggagcacagcatccagtacgagagagccaagttccaggagctgctgaacaagcagcccagcctgctgaaccacaccaccaagtggctgacccaggccgccggcgacctgaccatgagcccccccacctgccccgacaccagcgacagcagcagcgtggccggccccagccccaacgaggccgccaacaaccccgagcccctgagccccaccatggtgctgtgccagggcttcctgaacctgctgctgtgggacctggagaacgaggagttccccgagaccctgctgatggacagaaccagactgcaggagctgaagagccagctgcaccagctgaccgtgatggccagcgtgctgctggtggccagcagcttcagcggcagcgtgctgttcggcagcccccagttcgtggacaagctgaagagaatcaccaagagcctgctggaggacttccacagcagacccgaggaggccatcctgaccgtgagcgagcaggtgagccaggagatccaccagagcctgaagaacatgggcctggtggccctgagcagcgacaacaccgccagcctgatgggccagctgcagaacatcgccaagaaggagaactgcgtgtgcagcgtgatcgaccagagaatccacctgttcctgaagtgctgcctggtgctgggcgtgcagagaagcctgctggacctgcccggcggcctgaccctgatcgaggccgagctggccgagctgggccagaagttcgtgaacctgacccaccacaaccagcaggtgttcggcccctactacaccgagatcctgaagaccctgatcagccccgcccaggccctggagaccaaggtggagagcgtgtag

SEQ ID NO: 102040 - DNA, 822 bp, synthetic construct
  misc_feature 1..822: note = Description of Artificial Sequence: Synthetic coding sequence
  source 1..822: mol_type = other DNA
ggcctgagccacagagccaccccccagcccgccgccccccccagatggtacgcccccggcagacaggccgccagacccaccgagagaacccccgtggacgaccccagaagaggcagaagaagcctggagggcaaggtgaaggagaccgtgcacaacgccttctgggaccacctgaaggagcagctgagcgccaccccccccgacttcagctgcgccctggagctgctgaaggagatcaaggagatcctgctgagcctgctgctgcccagacagaacagactgagaatcgagatcgaggaggccctggacatggacctgctgaagcaggaggccgagcacggcgccctgaaggtgctgtacctgagcaagtacgtgctgaacatgatggccctgctgtgcgcccccgtgagagacgaggccgtgcagaagctggagaacatcaccgaccccgtgtggctgctgagaggcatcttccaggtgctgggcagaatgaagatggacatggtgaactacaccatccagagcctgcagccccacctgcaggagcacagcatccagtacgagagagccaagttccaggagctgctgaacaagcagcccagcctgctgaaccacaccaccaagtggctgacccaggccgccggcgacctgaccatgagcccccccacctgccccgacaccagcgacagcagcagcgtggccggccccagccccaacgaggccgccaacaaccccgagcccctgagccccaccatggtgctgtgccagggcttcctgaacctgctgctgtgggacctggagaacgaggagttccccgagtag

SEQ ID NO: 102041 - DNA, 1326 bp, synthetic construct; identical to SEQ ID NO: 102038
  misc_feature 1..1326: note = Description of Artificial Sequence: Synthetic coding sequence
  source 1..1326: mol_type = other DNA

SEQ ID NO: 102042 - DNA, 312 bp, synthetic construct
  misc_feature 1..312: note = Description of Artificial Sequence: Synthetic coding sequence
  source 1..312: mol_type = other DNA
atggcccccaagggcatcctgggcagcttccccaccgccatgaacctgagcctggagggcaaggtgaaggagaccgtgcacaacgccttctgggaccacctgaaggagcagctgagcgccaccccccccgacttcagctgcgccctggagctgctgaaggagatcaaggagatcctgctgagcctgctgctgcccagacagaacagactgagaatcgagatcgaggaggccctggacatggacctgctgaagcaggaggccgagcacggcgccctgaaggtgctgtacctgagcaagtacgtgctgaactag

SEQ ID NO: 102043 - DNA, 1512 bp, synthetic construct
  misc_feature 1..1512: note = Description of Artificial Sequence: Synthetic coding sequence
  source 1..1512: mol_type = other DNA
atgcccgacgtgaaggagagcgtgccccccaagtaccccggcgacagcgagggcagaagctgcaagcccgagaccagcggccccccccaggaggacaagagcggcagcgaggaccccccccccttcctgagcgtgaccggcctgaccgagaccgtgaacgaggtgagcaagctgagcaacaagatcggcatgaactgcgactactacatggaggagaaggtgctgccccccagcagcctggagggcaaggtgaaggagaccgtgcacaacgccttctgggaccacctgaaggagcagctgagcgccaccccccccgacttcagctgcgccctggagctgctgaaggagatcaaggagatcctgctgagcctgctgctgcccagacagaacagactgagaatcgagatcgaggaggccctggacatggacctgctgaagcaggaggccgagcacggcgccctgaaggtgctgtacctgagcaagtacgtgctgaacatgatggccctgctgtgcgcccccgtgagagacgaggccgtgcagaagctggagaacatcaccgaccccgtgtggctgctgagaggcatcttccaggtgctgggcagaatgaagatggacatggtgaactacaccatccagagcctgcagccccacctgcaggagcacagcatccagtacgagagagccaagttccaggagctgctgaacaagcagcccagcctgctgaaccacaccaccaagtggctgacccaggccgccggcgacctgaccatgagcccccccacctgccccgacaccagcgacagcagcagcgtggccggccccagccccaacgaggccgccaacaaccccgagcccctgagccccaccatggtgctgtgccagggcttcctgaacctgctgctgtgggacctggagaacgaggagttccccgagaccctgctgatggacagaaccagactgcaggagctgaagagccagctgcaccagctgaccgtgatggccagcgtgctgctggtggccagcagcttcagcggcagcgtgctgttcggcagcccccagttcgtggacaagctgaagagaatcaccaagagcctgctggaggacttccacagcagacccgaggaggccatcctgaccgtgagcgagcaggtgagccaggagatccaccagagcctgaagaacatgggcctggtggccctgagcagcgacaacaccgccagcctgatgggccagctgcagaacatcgccaagaaggagaactgcgtgtgcagcgtgatcgaccagagaatccacctgttcctgaagtgctgcctggtgctgggcgtgcagagaagcctgctggacctgcccggcggcctgaccctgatcgaggccgagctggccgagctgggccagaagttcgtgaacctgacccaccacaaccagcaggtgttcggcccctactacaccgagatcctgaagaccctgatcagccccgcccaggccctggagaccaaggtggagagcgtgtag

SEQ ID NO: 102044 - DNA, 1413 bp, synthetic construct
  misc_feature 1..1413: note = Description of Artificial Sequence: Synthetic coding sequence
  source 1..1413: mol_type = other DNA
atgaccagaggcggcggcggcggcgtgctgagcgtgaccggcctgaccgagaccgtgaacgaggtgagcaagctgagcaacaagatcggcatgaactgcgactactacatggaggagaaggtgctgccccccagcagcctggagggcaaggtgaaggagaccgtgcacaacgccttctgggaccacctgaaggagcagctgagcgccaccccccccgacttcagctgcgccctggagctgctgaaggagatcaaggagatcctgctgagcctgctgctgcccagacagaacagactgagaatcgagatcgaggaggccctggacatggacctgctgaagcaggaggccgagcacggcgccctgaaggtgctgtacctgagcaagtacgtgctgaacatgatggccctgctgtgcgcccccgtgagagacgaggccgtgcagaagctggagaacatcaccgaccccgtgtggctgctgagaggcatcttccaggtgctgggcagaatgaagatggacatggtgaactacaccatccagagcctgcagccccacctgcaggagcacagcatccagtacgagagagccaagttccaggagctgctgaacaagcagcccagcctgctgaaccacaccaccaagtggctgacccaggccgccggcgacctgaccatgagcccccccacctgccccgacaccagcgacagcagcagcgtggccggccccagccccaacgaggccgccaacaaccccgagcccctgagccccaccatggtgctgtgccagggcttcctgaacctgctgctgtgggacctggagaacgaggagttccccgagaccctgctgatggacagaaccagactgcaggagctgaagagccagctgcaccagctgaccgtgatggccagcgtgctgctggtggccagcagcttcagcggcagcgtgctgttcggcagcccccagttcgtggacaagctgaagagaatcaccaagagcctgctggaggacttccacagcagacccgaggaggccatcctgaccgtgagcgagcaggtgagccaggagatccaccagagcctgaagaacatgggcctggtggccctgagcagcgacaacaccgccagcctgatgggccagctgcagaacatcgccaagaaggagaactgcgtgtgcagcgtgatcgaccagagaatccacctgttcctgaagtgctgcctggtgctgggcgtgcagagaagcctgctggacctgcccggcggcctgaccctgatcgaggccgagctggccgagctgggccagaagttcgtgaacctgacccaccacaaccagcaggtgttcggcccctactacaccgagatcctgaagaccctgatcagccccgcccaggccctggagaccaaggtggagagcgtgtag

SEQ ID NO: 102045 - DNA, 1398 bp, synthetic construct
  misc_feature 1..1398: note = Description of Artificial Sequence: Synthetic coding sequence
  source 1..1398: mol_type = other DNA
atgaccagaggcggcggcggcggcggcctgaccgagaccgtgaacgaggtgagcaagctgagcaacaagatcggcatgaactgcgactactacatggaggagaaggtgctgccccccagcagcctggagggcaaggtgaaggagaccgtgcacaacgccttctgggaccacctgaaggagcagctgagcgccaccccccccgacttcagctgcgccctggagctgctgaaggagatcaaggagatcctgctgagcctgctgctgcccagacagaacagactgagaatcgagatcgaggaggccctggacatggacctgctgaagcaggaggccgagcacggcgccctgaaggtgctgtacctgagcaagtacgtgctgaacatgatggccctgctgtgcgcccccgtgagagacgaggccgtgcagaagctggagaacatcaccgaccccgtgtggctgctgagaggcatcttccaggtgctgggcagaatgaagatggacatggtgaactacaccatccagagcctgcagccccacctgcaggagcacagcatccagtacgagagagccaagttccaggagctgctgaacaagcagcccagcctgctgaaccacaccaccaagtggctgacccaggccgccggcgacctgaccatgagcccccccacctgccccgacaccagcgacagcagcagcgtggccggccccagccccaacgaggccgccaacaaccccgagcccctgagccccaccatggtgctgtgccagggcttcctgaacctgctgctgtgggacctggagaacgaggagttccccgagaccctgctgatggacagaaccagactgcaggagctgaagagccagctgcaccagctgaccgtgatggccagcgtgctgctggtggccagcagcttcagcggcagcgtgctgttcggcagcccccagttcgtggacaagctgaagagaatcaccaagagcctgctggaggacttccacagcagacccgaggaggccatcctgaccgtgagcgagcaggtgagccaggagatccaccagagcctgaagaacatgggcctggtggccctgagcagcgacaacaccgccagcctgatgggccagctgcagaacatcgccaagaaggagaactgcgtgtgcagcgtgatcgaccagagaatccacctgttcctgaagtgctgcctggtgctgggcgtgcagagaagcctgctggacctgcccggcggcctgaccctgatcgaggccgagctggccgagctgggccagaagttcgtgaacctgacccaccacaaccagcaggtgttcggcccctactacaccgagatcctgaagaccctgatcagccccgcccaggccctggagaccaaggtggagagcgtgtag

SEQ ID NO: 102046 - DNA, 165 bp, synthetic construct
  misc_feature 1..165: note = Description of Artificial Sequence: Synthetic coding sequence
  source 1..165: mol_type = other DNA
atgaccagaggcggcggcggcggcgacaccatcagcaagatgcccgacgtgaaggagagcgtgccccccaagtaccccggcgacagcgagggcagaagctgcaagcccgagaccagcggccccccccaggaggacaagagcggcagcgaggacccccccccctag

SEQ ID NO: 102047 - DNA, 165 bp, synthetic construct; identical to SEQ ID NO: 102046
  misc_feature 1..165: note = Description of Artificial Sequence: Synthetic coding sequence
  source 1..165: mol_type = other DNA

SEQ ID NO: 102048 - DNA, 597 bp, synthetic construct
  misc_feature 1..597: note = Description of Artificial Sequence: Synthetic coding sequence
  source 1..597: mol_type = other DNA
atgttcttcgagagacacctggagaacctgctgaagcacttcatccccggcaccaccgaccccgccgtgatcctggacctgctgcccctgtgcagaaactacgtgagaagagtgcacgtggaccagttcctgccccccgtgcagctgcccgcccagctgagacccggcgaccagagcgacagcggcagcgagggcgagatggaggagcccaccgtggaccactaccagctgggcgacctggtggccggcctgagccacctggaggagctggacctggtgtacgacgtgaaggactgcggcatgaacttcgagtggaacctgttcctgttcacctacagagactgcctgagcctggccgccgccatcaaggcctgccacaccctgaaggacggcggcaagcagctgctggagggcatgagcgacaacaagaccctgctggagttcgacctgagactgagcgacgtggcccaggagagcgagtacctgatcggccaggccctgtacgccaacagagaggccgccagacagagagccctgaaccccagccacttcatgagcaccatcaccgccaacggccccgagaacagcgtgggctag

SEQ ID NO: 102049 - DNA, 597 bp, synthetic construct; identical to SEQ ID NO: 102048
  misc_feature 1..597: note = Description of Artificial Sequence: Synthetic coding sequence
  source 1..597: mol_type = other DNA

SEQ ID NO: 102050 - DNA, 1506 bp, synthetic construct
  misc_feature 1..1506: note = Description of Artificial Sequence: Synthetic coding sequence
  source 1..1506: mol_type = other DNA
atgcaggacaccgtgaccaccagcgccctgctggaccccagccacagcagcgtgagcacccaggacaacagcagcaccggcggccacaccagcagcaccagcccccagctgagcaagcccagcatcacccccgtgcccgccaagagcagaaacccccaccccagagccaacatcagaagaatgagaagaatcatcgccgaggaccccgagtggagcctggccatcgtgcccctgctgaccgagctgtgcatccagcacatcatcagaaacttccagaagaaccccatcctgaagcagatgctgcccgagcaccagcagaaggtgctgaaccacctgagccccgacctgcccctggccgtgaccgccaacctgatcgacagcgagaactactggctgagatgctgcatgcacagatggcccgtgtgccacgtggcccaccacggcggcagctggaagagaatgttcttcgagagacacctggagaacctgctgaagcacttcatccccggcaccaccgaccccgccgtgatcctggacctgctgcccctgtgcagaaactacgtgagaagagtgcacgtggaccagttcctgccccccgtgcagctgcccgcccagctgagacccggcgaccagagcgacagcggcagcgagggcgagatggaggagcccaccgtggaccactaccagctgggcgacctggtggccggcctgagccacctggaggagctggacctggtgtacgacgtgaaggactgcggcatgaacttcgagtggaacctgttcctgttcacctacagagactgcctgagcctggccgccgccatcaaggcctgccacaccctgaagatcttcaagctgaccagaagcaaggtggacgacgacaaggccagaatcatcatcagaagcctgctggaccaccccgtgctggaggagctggacctgagccagaacctgatcggcgacagaggcgccagaggcgccgccaagctgctgagccacagcagactgagagtgctgaacctggccaacaaccaggtgagagcccccggcgcccagagcctggcccacgccctggcccacaacaccaacctgatcagcctgaacctgagactgaactgcatcgaggacgagggcggccaggccctggcccacgccctgcagaccaacaagtgcctgaccaccctgcacctgggcggcaacgagctgagcgagcccaccgccaccctgctgagccaggtgctggccatcaacaccaccctgaccagcatcaacctgagctgcaaccacatcggcctggacggcggcaagcagctgctggagggcatgagcgacaacaagaccctgctggagttcgacctgagactgagcgacgtggcccaggagagcgagtacctgatcggccaggccctgtacgccaacagagaggccgccagacagagagccctgaaccccagccacttcatgagcaccatcaccgccaacggccccgagaacagcgtgggctag

SEQ ID NO: 102051 - DNA, 597 bp, synthetic construct
  misc_feature 1..597: note = Description of Artificial Sequence: Synthetic coding sequence
  source 1..597: mol_type = other DNA
atggagaagagaggcagaggcgtgaagagcagccccatccagacccccaaccagaccccccagcaggcccccgtgacccccagaaaggagagaagacccagcatgttcgagaaggaggcctacacccagatcctgagagagagactgagagagagcatccacaacgtgcagtacgtggagccccccttcgacgacagcatcgccgacatcggcaaggagtggaagagcgccctggccaagctgaagttcgccaacagctacagaatggagcccctgaagaagttccaggcccacagcgtggagaccaaggtgcagcagatcctgaccgagagcctgaaggacgtgaagtacgacgacaaggtgttcagccacctgagcctggagctggccgacagaatcctgctggccgtgaaggagttcggctaccacagatacaagttcatcatcaaggtgctgttcatccagaagaccggccaggccatcaacatcgccagcagatggatctgggacatcgcctgggacagctgggtggccgccaagcacgaggccgagagctacgtggccctggtgctggtgttcgccctgtactacgagtag

SEQ ID NO: 102052 - DNA, 666 bp, synthetic construct
  misc_feature 1..666: note = Description of Artificial Sequence: Synthetic coding sequence
  source 1..666: mol_type = other DNA
atggccagcagacccctgccccccggcagacaggaggaggagaacgccaaggacagcggcagaaagcccagccccgtgagacccagaggctgcctgcccagcatcgacgaggccagacccgccggccccggccccgcccccgccagcagaagaggcagcatgctgggcctggccgccagcttcagcagaagaaacagcctggtgggccccggcgccggccccggcggccagagacccagcctgggccccgtgccccccctgggcagcagagtgagcttcagcggcctgcccctggcccccgccagatgggtggcccccagctacagaaccgagcccgtgcccggcgagagatgggaggccgccagagcccagagagccctggaggccgccctggccgccggcctgcacgacgcctgctacagcagcgacgaggccgccagactggtgagagagctgtgcgagcaggtgcacgtgagactgagagagctgagcccccccagatacaagctggtgtgcagcgtggtgctgggccccagagccggccagggcgtgcacgtggtgagcagagccctgtgggacgtggccagagacggcctggccagcgtgagctacaccaacaccagcctgttcgccgtggccaccgtgcacggcctgtactgcgagtag

SEQ ID NO: 102053 - DNA, 666 bp, synthetic construct; identical to SEQ ID NO: 102052
  misc_feature 1..666: note = Description of Artificial Sequence: Synthetic coding sequence
  source 1..666: mol_type = other DNA

SEQ ID NO: 102054 - DNA, 1074 bp, synthetic construct
  misc_feature 1..1074: note = Description of Artificial Sequence: Synthetic coding sequence
  source 1..1074: mol_type = other DNA
atggagagaatgagcgacagcgccgacaagcccatcgacaacgacgccgagggcgtgtggagccccgacatcgagcagagcttccaggaggccctggccatctaccccccctgcggcagaagaaagatcatcctgagcgacgagggcaagatgtacggcagaaacgagctgatcgccagatacatcaagctgagaaccggcaagaccagaaccagaaagcaggtgagcagccacatccaggtgctggccagaagaaagagcagagacttccacagcaagctgaaggtgaccagcatggaccagaccgccaaggacaaggccctgcagcacatggccgccatgagcagcgcccagatcgtgagcgccaccgccatccacaacaagctgggcctgcccggcatccccagacccaccttccccggcgcccccggcttctggcccggcatgatccagaccggccagcccggcagcagccaggacgtgaagcccttcgtgcagcaggcctaccccatccagcccgccgtgaccgcccccatccccggcttcgagcccgccagcgcccccgcccccagcgtgcccgcctggcagggcagaagcatcggcaccaccaagctgagactggtggagttcagcgccttcctggagcagcagagagaccccgacagcgccgacctgaactgcaacatccaggacgacgccggcgccttctacggcgtgaccagccagtacgagagcagcgagaacatgaccgtgacctgcagcaccaaggtgtgcagcttcggcaagcaggtggtggagaaggtggagaccgagtacgccagattcgagaacggcagattcgtgtacagaatcaacagaagccccatgtgcgagtacatgatcaacttcatccacaagctgaagcacctgcccgagaagtacatgatgaacagcgtgctggagaacttcaccatcctgctggtggtgaccaacagagacacccaggagaccctgctgtgcatggcctgcgtgttcgaggtgagcaacagcgagcacggcgcccagcaccacatctacagactggtgaaggactag

SEQ ID NO: 102055 - DNA, 1236 bp, synthetic construct
  misc_feature 1..1236: note = Description of Artificial Sequence: Synthetic coding sequence
  source 1..1236: mol_type = other DNA
atggagagaatgagcgacagcgccgacaagcccatcgacaacgacgccgagggcgtgtggagccccgacatcgagcagagcttccaggaggccctggccatctaccccccctgcggcagaagaaagatcatcctgagcgacgagggcaagatgtacggcagaaacgagctgatcgccagatacatcaagctgagaaccggcaagaccagaaccagaaagcaggtgagcagccacatccaggtgctggccagaagaaagagcagagacttccacagcaagctgaaggaccagaccgccaaggacaaggccctgcagcacatggccgccatgagcagcgcccagatcgtgagcgccaccgccatccacaacaagctgggcctgcccggcatccccagacccaccttccccggcgcccccggcttctggcccggcatgatccagaccggccagcccggcagcagccaggacgtgaagcccttcgtgcagcaggcctaccccatccagcccgccgtgaccgcccccatccccggcttcgagcccgccagcgcccccgcccccagcgtgcccgcctggcagggcagaagcatcggcaccaccaagctgagactggtggagttcagcgccttcctggagcagcagagagaccccgacagctacaacaagcacctgttcgtgcacatcggccacgccaaccacagctacagcgaccccctgctggagagcgtggacatcagacagatctacgacaagttccccgagaagaagggcggcctgaaggagctgttcggcaagggcccccagaacgccttcttcctggtgaagttctgggccgacctgaactgcaacatccaggacgacgccggcgccttctacggcgtgaccagccagtacgagagcagcgagaacatgaccgtgacctgcagcaccaaggtgtgcagcttcggcaagcaggtggtggagaaggtggagaccgagtacgccagattcgagaacggcagattcgtgtacagaatcaacagaagccccatgtgcgagtacatgatcaacttcatccacaagctgaagcacctgcccgagaagtacatgatgaacagcgtgctggagaacttcaccatcctgctggtggtgaccaacagagacacccaggagaccctgctgtgcatggcctgcgtgttcgaggtgagcaacagcgagcacggcgcccagcaccacatctacagactggtgaaggactag

SEQ ID NO: 102056 - DNA, 1281 bp, synthetic construct
  misc_feature 1..1281: note = Description of Artificial Sequence: Synthetic coding sequence
  source 1..1281: mol_type = other DNA
atcgagcccagcagctggagcggcagcgagagccccgccgagaacatggagagaatgagcgacagcgccgacaagcccatcgacaacgacgccgagggcgtgtggagccccgacatcgagcagagcttccaggaggccctggccatctaccccccctgcggcagaagaaagatcatcctgagcgacgagggcaagatgtacggcagaaacgagctgatcgccagatacatcaagctgagaaccggcaagaccagaaccagaaagcaggtgagcagccacatccaggtgctggccagaagaaagagcagagacttccacagcaagctgaaggaccagaccgccaaggacaaggccctgcagcacatggccgccatgagcagcgcccagatcgtgagcgccaccgccatccacaacaagctgggcctgcccggcatccccagacccaccttccccggcgcccccggcttctggcccggcatgatccagaccggccagcccggcagcagccaggacgtgaagcccttcgtgcagcaggcctaccccatccagcccgccgtgaccgcccccatccccggcttcgagcccgccagcgcccccgcccccagcgtgcccgcctggcagggcagaagcatcggcaccaccaagctgagactggtggagttcagcgccttcctggagcagcagagagaccccgacagctacaacaagcacctgttcgtgcacatcggccacgccaaccacagctacagcgaccccctgctggagagcgtggacatcagacagatctacgacaagttccccgagaagaagggcggcctgaaggagctgttcggcaagggcccccagaacgccttcttcctggtgaagttctgggccgacctgaactgcaacatccaggacgacgccggcgccttctacggcgtgaccagccagtacgagagcagcgagaacatgaccgtgacctgcagcaccaaggtgtgcagcttcggcaagcaggtggtggagaaggtggagaccgagtacgccagattcgagaacggcagattcgtgtacagaatcaacagaagccccatgtgcgagtacatgatcaacttcatccacaagctgaagcacctgcccgagaagtacatgatgaacagcgtgctggagaacttcaccatcctgctggtggtgaccaacagagacacccaggagaccctgctgtgcatggcctgcgtgttcgaggtgagcaacagcgagcacggcgcccagcaccacatctacagactggtgaaggactag

SEQ ID NO: 102057 - DNA, 993 bp, synthetic construct
  misc_feature 1..993: note = Description of Artificial Sequence: Synthetic coding sequence
  source 1..993: mol_type = other DNA
atgagatacgtgctgagctggtgcgtgaccgtgaccttcaaggaccagaccgccaaggacaaggccctgcagcacatggccgccatgagcagcgcccagatcgtgagcgccaccgccatccacaacaagctgggcctgcccggcatccccagacccaccttccccggcgcccccggcttctggcccggcatgatccagaccggccagcccggcagcagccaggacgtgaagcccttcgtgcagcaggcctaccccatccagcccgccgtgaccgcccccatccccggcttcgagcccgccagcgcccccgcccccagcgtgcccgcctggcagggcagaagcatcggcaccaccaagctgagactggtggagttcagcgccttcctggagcagcagagagaccccgacagctacaacaagcacctgttcgtgcacatcggccacgccaaccacagctacagcgaccccctgctggagagcgtggacatcagacagatctacgacaagttccccgagaagaagggcggcctgaaggagctgttcggcaagggcccccagaacgccttcttcctggtgaagttctgggccgacctgaactgcaacatccaggacgacgccggcgccttctacggcgtgaccagccagtacgagagcagcgagaacatgaccgtgacctgcagcaccaaggtgtgcagcttcggcaagcaggtggtggagaaggtggagaccgagtacgccagattcgagaacggcagattcgtgtacagaatcaacagaagccccatgtgcgagtacatgatcaacttcatccacaagctgaagcacctgcccgagaagtacatgatgaacagcgtgctggagaacttcaccatcctgctggtggtgaccaacagagacacccaggagaccctgctgtgcatggcctgcgtgttcgaggtgagcaacagcgagcacggcgcccagcaccacatctacagactggtgaaggactag

SEQ ID NO: 102058 - DNA, 207 bp, synthetic construct
  misc_feature 1..207: note = Description of Artificial Sequence: Synthetic coding sequence
  source 1..207: mol_type = other DNA
atcgagcccagcagctggagcggcagcgagagccccgccgagaacatggagagaatgagcgacagcgccgacaagcccatcgacaacgacgccgagggcgtgtggagccccgacatcgagcagagcttccaggaggccctggccatctaccccccctgcggcagaagaaagatcatcctgagcgacgagggcaagatgtacggctag

SEQ ID NO: 102059 - DNA, 1281 bp, synthetic construct; identical to SEQ ID NO: 102056
  misc_feature 1..1281: note = Description of Artificial Sequence: Synthetic coding sequence
  source 1..1281: mol_type = other DNA

SEQ ID NO: 102060 - DNA, 1344 bp, synthetic construct
  misc_feature 1..1344: note = Description of Artificial Sequence: Synthetic coding sequence
  source 1..1344: mol_type = other DNA
atgggcgagcccagagccggcgccgccctggacgacggcagcggctggaccggcagcgaggagggcagcgaggagggcaccggcggcagcgagggcgccggcggcgacggcggccccgacgccgagggcgtgtggagccccgacatcgagcagagcttccaggaggccctggccatctaccccccctgcggcagaagaaagatcatcctgagcgacgagggcaagatgtacggcagaaacgagctgatcgccagatacatcaagctgagaaccggcaagaccagaaccagaaagcaggtgagcagccacatccaggtgctggccagaagaaagagcagagagatccagagcaagctgaaggaccaggtgagcaaggacaaggccttccagaccatggccaccatgagcagcgcccagctgatcagcgcccccagcctgcaggccaagctgggccccaccggcccccaggccagcgagctgttccagttctggagcggcggcagcggccccccctggaacgtgcccgacgtgaagcccttcagccagacccccttcaccctgagcctgaccccccccagcaccgacctgcccggctacgagcccccccaggccctgagccccctgcccccccccacccccagcccccccgcctggcaggccagaggcctgggcaccgccagactgcagctggtggagttcagcgccttcgtggagccccccgacgccgtggacagctaccagagacacctgttcgtgcacatcagccagcactgccccagccccggcgccccccccctggagagcgtggacgtgagacagatctacgacaagttccccgagaagaagggcggcctgagagagctgtacgacagaggccccccccacgccttcttcctggtgaagttctgggccgacctgaactggggccccagcggcgaggaggccggcgccggcggcagcatcagcagcggcggcttctacggcgtgagcagccagtacgagagcctggagcacatgaccctgacctgcagcagcaaggtgtgcagcttcggcaagcaggtggtggagaaggtggagaccgagagagcccagctggaggacggcagattcgtgtacagactgctgagaagccccatgtgcgagtacctggtgaacttcctgcacaagctgagacagctgcccgagagatacatgatgaacagcgtgctggagaacttcaccatcctgcaggtggtgaccaacagagacacccaggagctgctgctgtgcaccgcctacgtgttcgaggtgagcaccagcgagagaggcgcccagcaccacatctacagactggtgagagactag

SEQ ID NO: 102061 - DNA, 1353 bp, synthetic construct
  misc_feature 1..1353: note = Description of Artificial Sequence: Synthetic coding sequence
  source 1..1353: mol_type = other DNA
atgggcgagcccagagccggcgccgccctggacgacggcagcggctggaccggcagcgaggagggcagcgaggagggcaccggcggcagcgagggcgccggcggcgacggcggccccgacgccgagggcgtgtggagccccgacatcgagcagagcttccaggaggccctggccatctaccccccctgcggcagaagaaagatcatcctgagcgacgagggcaagatgtacggcagaaacgagctgatcgccagatacatcaagctgagaaccggcaagaccagaaccagaaagcaggtgagcagccacatccaggtgctggccagaagaaagagcagagagatccagagcaagctgaaggaccaggtgagcaaggacaaggccttccagaccatggccaccatgagcagcgcccagctgatcagcgcccccagcctgcaggccaagctgggccccaccggcccccaggtggtgcaggccagcgagctgttccagttctggagcggcggcagcggccccccctggaacgtgcccgacgtgaagcccttcagccagacccccttcaccctgagcctgaccccccccagcaccgacctgcccggctacgagcccccccaggccctgagccccctgcccccccccacccccagcccccccgcctggcaggccagaggcctgggcaccgccagactgcagctggtggagttcagcgccttcgtggagccccccgacgccgtggacagctaccagagacacctgttcgtgcacatcagccagcactgccccagccccggcgccccccccctggagagcgtggacgtgagacagatctacgacaagttccccgagaagaagggcggcctgagagagctgtacgacagaggccccccccacgccttcttcctggtgaagttctgggccgacctgaactggggccccagcggcgaggaggccggcgccggcggcagcatcagcagcggcggcttctacggcgtgagcagccagtacgagagcctggagcacatgaccctgacctgcagcagcaaggtgtgcagcttcggcaagcaggtggtggagaaggtggagaccgagagagcccagctggaggacggcagattcgtgtacagactgctgagaagccccatgtgcgagtacctggtgaacttcctgcacaagctgagacagctgcccgagagatacatgatgaacagcgtgctggagaacttcaccatcctgcaggtggtgaccaacagagacacccaggagctgctgctgtgcaccgcctacgtgttcgaggtgagcaccagcgagagaggcgcccagcaccacatctacagactggtgagagactag

SEQ ID NO: 102062 - DNA, 960 bp, synthetic construct
  misc_feature 1..960: note = Description of Artificial Sequence: Synthetic coding sequence
  source 1..960: mol_type = other DNA
atggccaccatgagcagcgcccagctgatcagcgcccccagcctgcaggccaagctgggccccaccggcccccaggtggtgcaggccagcgagctgttccagttctggagcggcggcagcggccccccctggaacgtgcccgacgtgaagcccttcagccagacccccttcaccctgagcctgaccccccccagcaccgacctgcccggctacgagcccccccaggccctgagccccctgcccccccccacccccagcccccccgcctggcaggccagaggcctgggcaccgccagactgcagctggtggagttcagcgccttcgtggagccccccgacgccgtggacagctaccagagacacctgttcgtgcacatcagccagcactgccccagccccggcgccccccccctggagagcgtggacgtgagacagatctacgacaagttccccgagaagaagggcggcctgagagagctgtacgacagaggccccccccacgccttcttcctggtgaagttctgggccgacctgaactggggccccagcggcgaggaggccggcgccggcggcagcatcagcagcggcggcttctacggcgtgagcagccagtacgagagcctggagcacatgaccctgacctgcagcagcaaggtgtgcagcttcggcaagcaggtggtggagaaggtggagaccgagagagcccagctggaggacggcagattcgtgtacagactgctgagaagccccatgtgcgagtacctggtgaacttcctgcacaagctgagacagctgcccgagagatacatgatgaacagcgtgctggagaacttcaccatcctgcaggtggtgaccaacagagacacccaggagctgctgctgtgcaccgcctacgtgttcgaggtgagcaccagcgagagaggcgcccagcaccacatctacagactggtgagagactag

SEQ ID NO: 102063 - DNA, 1356 bp, synthetic construct
  misc_feature 1..1356: note = Description of Artificial Sequence: Synthetic coding sequence
  source 1..1356: mol_type = other DNA
atgggcgagcccagagccggcgccgccctggacgacggcagcggctggaccggcagcgaggagggcagcgaggagggcaccggcggcagcgagggcgccggcggcgacggcggccccgacgccgagggcgtgtggagccccgacatcgagcagagcttccaggaggccctggccatctaccccccctgcggcagaagaaagatcatcctgagcgacgagggcaagatgtacggcagaaacgagctgatcgccagatacatcaagctgagaaccggcaagaccagaaccagaaagcaggtgagcagccacatccaggtgctggccagaagaaagagcagagagatccagagcaagctgaaggccctgaacgtggaccaggtgagcaaggacaaggccttccagaccatggccaccatgagcagcgcccagctgatcagcgcccccagcctgcaggccaagctgggccccaccggcccccaggccagcgagctgttccagttctggagcggcggcagcggccccccctggaacgtgcccgacgtgaagcccttcagccagacccccttcaccctgagcctgaccccccccagcaccgacctgcccggctacgagcccccccaggccctgagccccctgcccccccccacccccagcccccccgcctggcaggccagaggcctgggcaccgccagactgcagctggtggagttcagcgccttcgtggagccccccgacgccgtggacagctaccagagacacctgttcgtgcacatcagccagcactgccccagccccggcgccccccccctggagagcgtggacgtgagacagatctacgacaagttccccgagaagaagggcggcctgagagagctgtacgacagaggccccccccacgccttcttcctggtgaagttctgggccgacctgaactggggccccagcggcgaggaggccggcgccggcggcagcatcagcagcggcggcttctacggcgtgagcagccagtacgagagcctggagcacatgaccctgacctgcagcagcaaggtgtgcagcttcggcaagcaggtggtggagaaggtggagaccgagagagcccagctggaggacggcagattcgtgtacagactgctgagaagccccatgtgcgagtacctggtgaacttcctgcacaagctgagacagctgcccgagagatacatgatgaacagcgtgctggagaacttcaccatcctgcaggtggtgaccaacagagacacccaggagctgctgctgtgcaccgcctacgtgttcgaggtgagcaccagcgagagaggcgcccagcaccacatctacagactggtgagagactag

SEQ ID NO: 102064 - DNA, 1356 bp, synthetic construct; identical to SEQ ID NO: 102063
  misc_feature 1..1356: note = Description of Artificial Sequence: Synthetic coding sequence
  source 1..1356: mol_type = other DNA

SEQ ID NO: 102065 - DNA, 1353 bp, synthetic construct; identical to SEQ ID NO: 102061
  misc_feature 1..1353: note = Description of Artificial Sequence: Synthetic coding sequence
  source 1..1353: mol_type = other DNA

SEQ ID NO: 102066 - DNA, 1308 bp, synthetic construct
  misc_feature 1..1308: note = Description of Artificial Sequence: Synthetic coding sequence
  source 1..1308: mol_type = other DNA
atcgccagcaacagctggaacgccagcagcagccccggcgaggccagagaggacggccccgagggcctggacaagggcctggacaacgacgccgagggcgtgtggagccccgacatcgagcagagcttccaggaggccctggccatctaccccccctgcggcagaagaaagatcatcctgagcgacgagggcaagatgtacggcagaaacgagctgatcgccagatacatcaagctgagaaccggcaagaccagaaccagaaagcaggtgagcagccacatccaggtgctggccagaaagaaggtgagagagtaccaggtgggcatcaaggccatgaacctggaccaggtgagcaaggacaaggccctgcagagcatggccagcatgagcagcgcccagatcgtgagcgccagcgtgctgcagaacaagttcagcccccccagccccctgccccaggccgtgttcagcaccagcagcagattctggagcagcccccccctgctgggccagcagcccggccccagccaggacatcaagcccttcgcccagcccgcctaccccatccagccccccctgccccccaccctgagcagctacgagcccctggcccccctgcccagcgccgccgccagcgtgcccgtgtggcaggacagaaccatcgccagcagcagactgagactgctggagtacagcgccttcatggaggtgcagagagaccccgacacctacagcaagcacctgttcgtgcacatcggccagaccaaccccgccttcagcgacccccccctggaggccgtggacgtgagacagatctacgacaagttccccgagaagaagggcggcctgaaggagctgtacgagaagggcccccccaacgccttcttcctggtgaagttctgggccgacctgaacagcaccatccaggagggccccggcgccttctacggcgtgagcagccagtacagcagcgccgacagcatgaccatcagcgtgagcaccaaggtgtgcagcttcggcaagcaggtggtggagaaggtggagaccgagtacgccagactggagaacggcagattcgtgtacagaatccacagaagccccatgtgcgagtacatgatcaacttcatccacaagctgaagcacctgcccgagaagtacatgatgaacagcgtgctggagaacttcaccatcctgcaggtggtgaccagcagagacagccaggagaccctgctggtgatcgccttcgtgttcgaggtgagcaccagcgagcacggcgcccagcaccacgtgtacaagctggtgaaggactag

SEQ ID NO: 102067 - DNA, 1356 bp, synthetic construct
  misc_feature 1..1356: note = Description of Artificial Sequence: Synthetic coding sequence
  source 1..1356: mol_type = other DNA
ctgagcagacccgtgggcagcggccccgagcccagagccaccagcaccatcgccagcaacagctggaacgccagcagcagccccggcgaggccagagaggacggccccgagggcctggacaagggcctggacaacgacgccgagggcgtgtggagccccgacatcgagcagagcttccaggaggccctggccatctaccccccctgcggcagaagaaagatcatcctgagcgacgagggcaagatgtacggcagaaacgagctgatcgccagatacatcaagctgagaaccggcaagaccagaaccagaaagcaggtgagcagccacctgcaggtgctggccagaagaaagagcagagagatccagagcaagctgaagagcagcccccaggaccaggtgagcaaggacaaggccctgcagagcatggccagcatgagcagcgcccagatcgtgagcgccagcgtgctgcagaacaagttcagcccccccagccccctgccccaggccgtgttcagcaccagcagcagattctggagcagcccccccctgctgggccagcagcccggccccagccaggacatcaagcccttcgcccagcccgcctaccccatccagccccccctgccccccaccctgagcagctacgagcccctggcccccctgcccagcgccgccgccagcgtgcccgtgtggcaggacagaaccatcgccagcagcagactgagactgctggagtacagcgccttcatggaggtgcagagagaccccgacacctacagcaagcacctgttcgtgcacatcggccagaccaaccccgccttcagcgacccccccctggaggccgtggacgtgagacagatctacgacaagttccccgagaagaagggcggcctgaaggagctgtacgagaagggcccccccaacgccttcttcctggtgaagttctgggccgacctgaacagcaccatccaggagggccccggcgccttctacggcgtgagcagccagtacagcagcgccgacagcatgaccatcagcgtgagcaccaaggtgtgcagcttcggcaagcaggtggtggagaaggtggagaccgagtacgccagactggagaacggcagattcgtgtacagaatccacagaagccccatgtgcgagtacatgatcaacttcatccacaagctgaagcacctgcccgagaagtacatgatgaacagcgtgctggagaacttcaccatcctgcaggtggtgaccagcagagacagccaggagaccctgctggtgatcgccttcgtgttcgaggtgagcaccagcgagcacggcgcccagcaccacgtgtacaagctggtgaaggactag

SEQ ID NO: 102068 - DNA, 1176 bp, synthetic construct
  misc_feature 1..1176: note = Description of Artificial Sequence: Synthetic coding sequence
  source 1..1176: mol_type = other DNA
ctggagggcaccgccggcaccatcaccagcaacgagtggagcagccccaccagccccgagggcagcaccgccagcggcggcagccaggccctggacaagcccatcgacaacgacgccgagggcgtgtggagccccgacatcgagcagagcttccaggaggccctggccatctaccccccctgcggcagaagaaagatcatcctgagcgacgagggcaagatgtacggcagaaacgagctgatcgccagatacatcaagctgagaaccggcaagaccagaaccagaaagcaggtgagcagccacatccaggtgctggccagaagaaaggccagagagatccaggccaagctgaagttctggcagggcgccctgcccggccaggccggcaccagccacgacgtgaagcccttcagccagcagacctacgccgtgcagccccccctgcccctgcccggcttcgagagccccgccggccccgcccccagccccagcgccccccccgcccccccctggcagggcagaagcgtggccagcagcaagctgtggatgctggagttcagcgccttcctggagcagcagcaggaccccgacacctacaacaagcacctgttcgtgcacatcggccagagcagccccagctacagcgacccctacctggaggccgtggacatcagacagatctacgacaagttccccgagaagaagggcggcctgaaggacctgttcgagagaggccccagcaacgccttcttcctggtgaagttctgggccgacctgaacaccaacatcgaggacgagggcagcagcttctacggcgtgagcagccagtacgagagccccgagaacatgatcatcacctgcagcaccaaggtgtgcagcttcggcaagcaggtggtggagaaggtggagaccgagtacgccagatacgagaacggccactacagctacagaatccacagaagccccctgtgcgagtacatgatcaacttcatccacaagctgaagcacctgcccgagaagtacatgatgaacagcgtgctggagaacttcaccatcctgcaggtggtgaccaacagagacacccaggagaccctgctgtgcatcgcctacgtgttcgaggtgagcgccagcgagcacggcgcccagcaccacatctacagactggtgaaggagtag

SEQ ID NO: 102069 - DNA, 1305 bp, synthetic construct
  misc_feature 1..1305: note = Description of Artificial Sequence: Synthetic coding sequence
  source 1..1305: mol_type = other DNA
ctggagggcaccgccggcaccatcaccagcaacgagtggagcagccccaccagccccgagggcagcaccgccagcggcggcagccaggccctggacaagcccatcgacaacgacgccgagggcgtgtggagccccgacatcgagcagagcttccaggaggccctggccatctaccccccctgcggcagaagaaagatcatcctgagcgacgagggcaagatgtacggcagaaacgagctgatcgccagatacatcaagctgagaaccggcaagaccagaaccagaaagcaggtgagcagccacatccaggtgctggccagaagaaaggccagagagatccaggccaagctgaaggaccaggccgccaaggacaaggccctgcagagcatggccgccatgagcagcgcccagatcatcagcgccaccgccttccacagcagcatggccctggccagaggccccggcagacccgccgtgagcggcttctggcagggcgccctgcccggccaggccggcaccagccacgacgtgaagcccttcagccagcagacctacgccgtgcagccccccctgcccctgcccggcttcgagagccccgccggccccgcccccagccccagcgccccccccgcccccccctggcagggcagaagcgtggccagcagcaagctgtggatgctggagttcagcgccttcctggagcagcagcaggaccccgacacctacaacaagcacctgttcgtgcacatcggccagagcagccccagctacagcgacccctacctggaggccgtggacatcagacagatctacgacaagttccccgagaagaagggcggcctgaaggacctgttcgagagaggccccagcaacgccttcttcctggtgaagttctgggccgacctgaacaccaacatcgaggacgagggcagcagcttctacggcgtgagcagccagtacgagagccccgagaacatgatcatcacctgcagcaccaaggtgtgcagcttcggcaagcaggtggtggagaaggtggagaccgagtacgccagatacgagaacggccactacagctacagaatccacagaagccccctgtgcgagtacatgatcaacttcatccacaagctgaagcacctgcccgagaagtacatgatgaacagcgtgctggagaacttcaccatcctgcaggtggtgaccaacagagacacccaggagaccctgctgtgcatcgcctacgtgttcgaggtgagcgccagcgagcacggcgcccagcaccacatctacagactggtgaaggagtag

SEQ ID NO: 102070 - DNA, 918 bp, synthetic construct
  misc_feature 1..918: note = Description of Artificial Sequence: Synthetic coding sequence
  source 1..918: mol_type = other DNA
atggccgccatgagcagcgcccagatcatcagcgccaccgccttccacagcagcatggccctggccagaggccccggcagacccgccgtgagcggcttctggcagggcgccctgcccggccaggccggcaccagccacgacgtgaagcccttcagccagcagacctacgccgtgcagccccccctgcccctgcccggcttcgagagccccgccggccccgcccccagccccagcgccccccccgcccccccctggcagggcagaagcgtggccagcagcaagctgtggatgctggagttcagcgccttcctggagcagcagcaggaccccgacacctacaacaagcacctgttcgtgcacatcggccagagcagccccagctacagcgacccctacctggaggccgtggacatcagacagatctacgacaagttccccgagaagaagggcggcctgaaggacctgttcgagagaggccccagcaacgccttcttcctggtgaagttctgggccgacctgaacaccaacatcgaggacgagggcagcagcttctacggcgtgagcagccagtacgagagccccgagaacatgatcatcacctgcagcaccaaggtgtgcagcttcggcaagcaggtggtggagaaggtggagaccgagtacgccagatacgagaacggccactacagctacagaatccacagaagccccctgtgcgagtacatgatcaacttcatccacaagctgaagcacctgcccgagaagtacatgatgaacagcgtgctggagaacttcaccatcctgcaggtggtgaccaacagagacacccaggagaccctgctgtgcatcgcctacgtgttcgaggtgagcgccagcgagcacggcgcccagcaccacatctacagactggtgaaggagtag

SEQ ID NO: 102071 - DNA, 219 bp, synthetic construct
  misc_feature 1..219: note = Description of Artificial Sequence: Synthetic coding sequence
  source 1..219: mol_type = other DNA
ctggagggcaccgccggcaccatcaccagcaacgagtggagcagccccaccagccccgagggcagcaccgccagcggcggcagccaggccctggacaagcccatcgacaacgacgccgagggcgtgtggagccccgacatcgagcagagcttccaggaggccctggccatctaccccccctgcggcagaagaaagatcatcctgagcgacgagggctag

SEQ ID NO: 102072 - DNA, 69 bp, synthetic construct
  misc_feature 1..69: note = Description of Artificial Sequence: Synthetic coding sequence
  source 1..69: mol_type = other DNA
ctggagggcaccgccggcaccatcaccagcaacgagtggagcagccccaccagccccgagggcagctag

SEQ ID NO: 102073 - DNA, 528 bp, synthetic construct
  misc_feature 1..528: note = Description of Artificial Sequence: Synthetic coding sequence
  source 1..528: mol_type = other DNA
ctggagggcaccgccggcaccatcaccagcaacgagtggagcagccccaccagccccgagggcagcaccgccagcggcggcagccaggccctggacaagcccatcgacaacgacgccgagggcgtgtggagccccgacatcgagcagagcttccaggaggccctggccatctaccccccctgcggcagaagaaagatcatcctgagcgacgagggcaagatgtacggcagaaacgagctgatcgccagatacatcaagctgagaaccggcaagaccagaaccagaaagcaggtgagcagccacatccaggtgctggccagaagaaaggccagagagatccaggccaagctgaaggaccaggccgccaaggacaaggccctgcagagcatggccgccatgagcagcgcccagatcatcagcgccaccgccttccacagcagcatggccctggccagaggccccggcagacccgccgtgagcggcttctggcagggcgccctgcccggccaggccggcaccagccactag

SEQ ID NO: 102074 - DNA, 3099 bp, synthetic construct
  misc_feature 1..3099: note = Description of Artificial Sequence: Synthetic coding sequence
  source 1..3099: mol_type = other DNA
atgtgcaacgaggagaccgagatcaaggaggcccagagctaccagaacagccccgtgagcagcgccaccaaccaggacgccggctacggcagccccttcagcgagagcagcgaccagctggcccacttcaagggcagcagcagcagagaggagaaggaggacccccagtgccccgacagcgtgagctacccccaggacagcctggcccagatcaaggccgtgtacgccaacctgttcagcgagagctgctggagcagcctggccctggacctgaagaagagcggcagcaccaccagcaccaacgacgccagccagaaggagagcagcgcccccacccccaccccccccacctgccccgtgagcaccaccggccccaccaccagcacccccagcaccagctgcagcagcagcaccagccacagcagcaccaccagcaccagcagcagcagcggctacgactggcaccaggccgccctggccaagaccctgcagcagaccagcagctacggcctgctgcccgagcccagcctgttcagcaccgtgcagctgtacagacagaacaacaagctgtacggcagcgtgttcaccggcgccagcaagttcagatgcaaggactgcagcgccgcctacgacaccctggtggagctgaccgtgcacatgaacgagaccggccactacagagacgacaacagagacaaggacagcgagaagaccaagagatggagcaagcccagaaagagaagcctgatggagatggagggcaaggaggacgcccagaaggtgctgaagtgcatgtactgcggccacagcttcgagagcctgcaggacctgagcgtgcacatgatcaagaccaagcactaccagaaggtgcccctgaaggagcccgtgcccgccatcaccaagctggtgcccagcaccaagaagagagccctgcaggacctggcccccccctgcagccccgagcccgccggcatggccgccgaggtggccctgagcgagagcgccaaggaccagaaggccgccaacccctacgtgacccccaacaacagatacggctaccagaacggcgccagctacacctggcagttcgaggccagaaaggcccagatcctgaagtgcatggagtgcggcagcagccacgacaccctgcagcagctgaccgcccacatgatggtgaccggccacttcctgaaggtgaccaccagcgccagcaagaagggcaagcagctggtgctggaccccgtggtggaggagaagatccagagcatccccctgccccccaccacccacaccagactgcccgccagcagcatcaagaagcagcccgacagccccgccggcagcaccaccagcgaggagaagaaggagcccgagaaggagaagccccccgtggccggcgacgccgagaagatcaaggaggagagcgaggacagcctggagaagttcgagcccagcaccctgtacccctacctgagagaggaggacctggacgacagccccaagggcggcctggacatcctgaagagcctggagaacaccgtgagcaccgccatcagcaaggcccagaacggcgcccccagctggggcggctaccccagcatccacgccgcctaccagctgcccggcaccgtgaagcccctgcccgccgccgtgcagagcgtgcaggtgcagcccagctacgccggcggcgtgaagagcctgagcagcgccgagcacaacgccctgctgcacagccccggcagcctgaccccccccccccacaagagcaacgtgagcgccatggaggagctggtggagaaggtgaccggcaaggtgaacatcaagaaggaggagagaccccccgagaaggagaagagcagcctggccaaggccgccagccccatcgccaaggagaacaaggacttccccaagaccgaggaggtgagcggcaagccccagaagaagggccccgaggccgagaccggcaaggccaagaaggagggccccctggacgtgcacacccccaacggcaccgagcccctgaaggccaaggtgaccaacggctgcaacaacctgggcatcatcatggaccacagccccgagcccagcttcatcaaccccctgagcgccctgcagagcatcatgaacacccacctgggcaaggtgagcaagcccgtgagccccagcctggaccccctggccatgctgtacaagatcagcaacagcatgctggacaagcccgtgtaccccgccacccccgtgaagcaggccgacgccatcgacagatactactacgagaacagcgaccagcccatcgacctgaccaagagcaagaacaagcccctggtgagcagcgtggccgacagcgtggccagccccctgagagagagcgccctgatggacatcagcgacatggtgaagaacctgaccggcagactgacccccaagagcagcacccccagcaccgtgagcgagaagagcgacgccgacggcagcagcttcgaggaggccctggacgagctgagccccgtgcacaagagaaagggcagacagagcaactggaacccccagcacctgctgatcctgcaggcccagttcgccagcagcctgagagagaccaccgagggcaagtacatcatgagcgacctgggcccccaggagagagtgcacatcagcaagttcaccggcctgagcatgaccaccatcagccactggctggccaacgtgaagtaccagctgagaagaaccggcggcaccaagttcctgaagaacctggacaccggccaccccgtgttcttctgcaacgactgcgccagccagttcagaaccgccagcacctacatcagccacctggagacccacctgggcttcagcctgaaggacctgagcaagctgcccctgaaccagatccaggagcagcagaacgtgagcaaggtgctgaccaacaagaccctgggccccctgggcgccaccgaggaggacctgggcagcaccttccagtgcaagctgtgcaacagaaccttcgccagcaagcacgccgtgaagctgcacctgagcaagacccacggcaagagccccgaggaccacctgatctacgtgaccgagctggagaagcagtag

SEQ ID NO: 102075 - DNA, 237 bp, synthetic construct
  misc_feature 1..237: note = Description of Artificial Sequence: Synthetic coding sequence
  source 1..237: mol_type = other DNA
atgtgcaacgaggagaccgagatcaaggaggcccagagctaccagaacagccccgtgagcagcgccaccaaccaggacgccggctacggcagccccttcagcgagagcagcgaccagctggcccacttcaagggcagcagcagcagagaggagaaggaggacccccagtgccccgacagcgtgagctacccccaggacagcctggcccagatcaaggccgtgtacgccaacctgtag

SEQ ID NO: 102076 - DNA, 321 bp, synthetic construct
  misc_feature 1..321: note = Description of Artificial Sequence: Synthetic coding sequence
  source 1..321: mol_type = other DNA
atgtgcaacgaggagaccgagatcaaggaggcccagagctaccagaacagccccgtgagcagcgccaccaaccaggacgccggctacggcagccccttcagcgagagcagcgaccagctggcccacttcaagggcagcagcagcagagaggagaaggaggacccccagtgccccgacagcgtgagctacccccaggacagcctggcccagatcaaggccgtgtacgccaacctgttcagcgagagctgctggagcagcctggccctggacctgaagaagagcggcagcaccaccagcaccaacgacgccagccagaagtag

SEQ ID NO: 102077 - DNA, 3096 bp, synthetic construct
  misc_feature 1..3096: note = Description of Artificial Sequence: Synthetic coding sequence
  source 1..3096: mol_type = other DNA
atgatggccgccgccctgctgcactacaccggctacgcccaggaggagcagctgaaggaggaggaggagatcaaggaggaggaggaggaggaggacagcggcagcgtggcccagctgcagggcggcaacgacaccggcaccgacgaggagctggagaccggccccgagcagaagggctgcttcagctaccagaacagccccggcagccacctgagcaaccaggacgccgagaacgagagcctgctgagcgacgccagcgaccaggtgagcgacatcaagagcgtgtgcggcagagacgccagcgacaagaaggcccacacccacgtgagactgcccaacgaggcccacaactgcatggacaagatgaccgccgtgtacgccaacatcctgagcgacagctactggagcggcctgggcctgggcttcaagctgagcaacagcgagagaagaaactgcgacaccagaaacggcagcaacaagagcgacttcgactggcaccaggacgccctgagcaagagcctgcagcagaacctgcccagcagaagcgtgagcaagcccagcctgttcagcagcgtgcagctgtacagacagagcagcaagatgtgcggcaccgtgttcaccggcgccagcagattcagatgcagacagtgcagcgccgcctacgacaccctggtggagctgaccgtgcacatgaacgagaccggccactaccaggacgacaacagaaagaaggacaagctgagacccaccagctacagcaagcccagaaagagagccttccaggacatggacaaggaggacgcccagaaggtgctgaagtgcatgttctgcggcgacagcttcgacagcctgcaggacctgagcgtgcacatgatcaagaccaagcactaccagaaggtgcccctgaaggagcccgtgcccaccatcagcagcaagatggtgacccccgccaagaagagagtgttcgacgtgaacagaccctgcagccccgacagcaccaccggcagcttcgccgacagcttcagcagccagaagaacgccaacctgcagctgagcagcaacaacagatacggctaccagaacggcgccagctacacctggcagttcgaggcctgcaagagccagatcctgaagtgcatggagtgcggcagcagccacgacaccctgcagcagctgaccacccacatgatggtgaccggccacttcctgaaggtgaccagcagcgccagcaagaagggcaagcagctggtgctggaccccctggccgtggagaagatgcagagcctgagcgaggcccccaacagcgacagcctggcccccaagcccagcagcaacagcgccagcgactgcaccgccagcaccaccgagctgaagaaggagagcaagaaggagagacccgaggagaccagcaaggacgagaaggtggtgaagagcgaggactacgaggaccccctgcagaagcccctggaccccaccatcaagtaccagtacctgagagaggaggacctggaggacggcagcaagggcggcggcgacatcctgaagagcctggagaacaccgtgaccaccgccatcaacaaggcccagaacggcgcccccagctggagcgcctaccccagcatccacgccgcctaccagctgagcgagggcaccaagccccccctgcccatgggcagccaggtgctgcagatcagacccaacctgaccaacaagctgagacccatcgcccccaagtggaaggtgatgcccctggtgagcatgcccacccacctggccccctacacccaggtgaagaaggagagcgaggacaaggacgaggccgtgaaggagtgcggcaaggagagcccccacgaggaggccagcagcttcagccacagcgagggcgacagcttcagaaagagcgagaccccccccgaggccaagaagaccgagctgggccccctgaaggaggaggagaagctgatgaaggagggcagcgagaaggagaagccccagcccctggagcccaccagcgccctgagcaacggctgcgccctggccaaccacgcccccgccctgccctgcatcaaccccctgagcgccctgcagagcgtgctgaacaaccacctgggcaaggccaccgagcccctgagaagccccagctgcagcagccccagcagcagcaccatcagcatgttccacaagagcaacctgaacgtgatggacaagcccgtgctgagccccgccagcaccagaagcgccagcgtgagcagaagatacctgttcgagaacagcgaccagcccatcgacctgaccaagagcaagagcaagaaggccgagagcagccaggcccagagctgcatgagccccccccagaagcacgccctgagcgacatcgccgacatggtgaaggtgctgcccaaggccaccacccccaagcccgccagcagcagcagagtgccccccatgaagctggagatggacgtgagaagattcgaggacgtgagcagcgaggtgagcaccctgcacaagagaaagggcagacagagcaactggaacccccagcacctgctgatcctgcaggcccagttcgccagcagcctgttccagaccagcgagggcaagtacctgctgagcgacctgggcccccaggagagaatgcagatcagcaagttcaccggcctgagcatgaccaccatcagccactggctggccaacgtgaagtaccagctgagaaagaccggcggcaccaagttcctgaagaacatggacaagggccaccccatcttctactgcagcgactgcgccagccagttcagaacccccagcacctacatcagccacctggagagccacctgggcttccagatgaaggacatgaccagactgagcgtggaccagcagagcaaggtggagcaggagatcagcagagtgagcagcgcccagagaagccccgagaccatcgccgccgaggaggacaccgacagcaagttcaagtgcaagctgtgctgcagaaccttcgtgagcaagcacgccgtgaagctgcacctgagcaagacccacagcaagagccccgagcaccacagccagttcgtgaccgacgtggacgaggagtag

SEQ ID NO: 102078 - DNA, 3105 bp, synthetic construct
  misc_feature 1..3105: note = Description of Artificial Sequence: Synthetic coding sequence
  source 1..3105: mol_type = other DNA
atgcccagaagaaagcagcaggcccccaagagagccgccggctacgcccaggaggagcagctgaaggaggaggaggagatcaaggaggaggaggaggaggaggacagcggcagcgtggcccagctgcagggcggcaacgacaccggcaccgacgaggagctggagaccggccccgagcagaagggctgcttcagctaccagaacagccccggcagccacctgagcaaccaggacgccgagaacgagagcctgctgagcgacgccagcgaccaggtgagcgacatcaagagcgtgtgcggcagagacgccagcgacaagaaggcccacacccacgtgagactgcccaacgaggcccacaactgcatggacaagatgaccgccgtgtacgccaacatcctgagcgacagctactggagcggcctgggcctgggcttcaagctgagcaacagcgagagaagaaactgcgacaccagaaacggcagcaacaagagcgacttcgactggcaccaggacgccctgagcaagagcctgcagcagaacctgcccagcagaagcgtgagcaagcccagcctgttcagcagcgtgcagctgtacagacagagcagcaagatgtgcggcaccgtgttcaccggcgccagcagattcagatgcagacagtgcagcgccgcctacgacaccctggtggagctgaccgtgcacatgaacgagaccggccactaccaggacgacaacagaaagaaggacaagctgagacccaccagctacagcaagcccagaaagagagccttccaggacatggacaaggaggacgcccagaaggtgctgaagtgcatgttctgcggcgacagcttcgacagcctgcaggacctgagcgtgcacatgatcaagaccaagcactaccagaaggtgcccctgaaggagcccgtgcccaccatcagcagcaagatggtgacccccgccaagaagagagtgttcgacgtgaacagaccctgcagccccgacagcaccaccggcagcttcgccgacagcttcagcagccagaagaacgccaacctgcagctgagcagcaacaacagatacggctaccagaacggcgccagctacacctggcagttcgaggcctgcaagagccagatcctgaagtgcatggagtgcggcagcagccacgacaccctgcagcagctgaccacccacatgatggtgaccggccacttcctgaaggtgaccagcagcgccagcaagaagggcaagcagctggtgctggaccccctggccgtggagaagatgcagagcctgagcgaggcccccaacagcgacagcctggcccccaagcccagcagcaacagcgccagcgactgcaccgccagcaccaccgagctgaagaaggagagcaagaaggagagacccgaggagaccagcaaggacgagaaggtggtgaagagcgaggactacgaggaccccctgcagaagcccctggaccccaccatcaagtaccagtacctgagagaggaggacctggaggacggcagcaagggcggcggcgacatcctgaagagcctggagaacaccgtgaccaccgccatcaacaaggcccagaacggcgcccccagctggagcgcctaccccagcatccacgccgcctaccagctgagcgagggcaccaagccccccctgcccatgggcagccaggtgctgcagatcagacccaacctgaccaacaagctgagacccatcgcccccaagtggaaggtgatgcccctggtgagcatgcccacccacctggccccctacacccaggtgaagaaggagagcgaggacaaggacgaggccgtgaaggagtgcggcaaggagagcccccacgaggaggccagcagcttcagccacagcgagggcgacagcttcagaaagagcgagaccccccccgaggccaagaagaccgagctgggccccctgaaggaggaggagaagctgatgaaggagggcagcgagaaggagaagccccagcccctggagcccaccagcgccctgagcaacggctgcgccctggccaaccacgcccccgccctgccctgcatcaaccccctgagcgccctgcagagcgtgctgaacaaccacctgggcaaggccaccgagcccctgagaagccccagctgcagcagccccagcagcagcaccatcagcatgttccacaagagcaacctgaacgtgatggacaagcccgtgctgagccccgccagcaccagaagcgccagcgtgagcagaagatacctgttcgagaacagcgaccagcccatcgacctgaccaagagcaagagcaagaaggccgagagcagccaggcccagagctgcatgagccccccccagaagcacgccctgagcgacatcgccgacatggtgaaggtgctgcccaaggccaccacccccaagcccgccagcagcagcagagtgccccccatgaagctggagatggacgtgagaagattcgaggacgtgagcagcgaggtgagcaccctgcacaagagaaagggcagacagagcaactggaacccccagcacctgctgatcctgcaggcccagttcgccagcagcctgttccagaccagcgagggcaagtacctgctgagcgacctgggcccccaggagagaatgcagatcagcaagttcaccggcctgagcatgaccaccatcagccactggctggccaacgtgaagtaccagctgagaaagaccggcggcaccaagttcctgaagaacatggacaagggccaccccatcttctactgcagcgactgcgccagccagttcagaacccccagcacctacatcagccacctggagagccacctgggcttccagatgaaggacatgaccagactgagcgtggaccagcagagcaaggtggagcaggagatcagcagagtgagcagcgcccagagaagccccgagaccatcgccgccgaggaggacaccgacagcaagttcaagtgcaagctgtgctgcagaaccttcgtgagcaagcacgccgtgaagctgcacctgagcaagacccacagcaagagccccgagcaccacagccagttcgtgaccgacgtggacgaggagtag

SEQ ID NO: 102079 - DNA, 3246 bp, synthetic construct
  misc_feature 1..3246: note = Description of Artificial Sequence: Synthetic coding sequence
  source 1..3246: mol_type = other DNA
atgcccagaagaaagcagcaggcccccagaagagccgccgcctacgtgagcgaggagctgaaggccgccgccctggtggacgagggcctggaccccgaggagcacaccgccgacggcgagcccagcgccaagtacatgtgccccgagaaggagctggccagagcctgccccagctaccagaacagccccgccgccgagttcagctgccacgagatggacagcgagagccacatcagcgagaccagcgacagaatggccgacttcgagagcggcagcatcaagaacgaggaggagaccaaggaggtgaccgtgcccctggaggacaccaccgtgagcgacagcctggagcagatgaaggccgtgtacaacaacttcctgagcaacagctactggagcaacctgaacctgaacctgcaccagcccagcagcgagaagaacaacggcagcagcagcagcagcagcagcagcagcagcagctgcggcagcggcagcttcgactggcaccagagcgccatggccaagaccctgcagcaggtgagccagagcagaatgctgcccgagcccagcctgttcagcaccgtgcagctgtacagacagagcagcaagctgtacggcagcatcttcaccggcgccagcaagttcagatgcaaggactgcagcgccgcctacgacaccctggtggagctgaccgtgcacatgaacgagaccggccactacagagacgacaaccacgagaccgacaacaacaaccccaagagatggagcaagcccagaaagagaagcctgctggagatggagggcaaggaggacgcccagaaggtgctgaagtgcatgtactgcggccacagcttcgagagcctgcaggacctgagcgtgcacatgatcaagaccaagcactaccagaaggtgcccctgaaggagcccgtgacccccgtggccgccaagatcatccccgccaccagaaagaaggccagcctggagctggagctgcccagcagccccgacagcaccggcggcacccccaaggccaccatcagcgacaccaacgacgccctgcagaagaacagcaacccctacatcacccccaacaacagatacggccaccagaacggcgccagctacgcctggcacttcgaggccagaaagagccagatcctgaagtgcatggagtgcggcagcagccacgacaccctgcaggagctgaccgcccacatgatggtgaccggccacttcatcaaggtgaccaacagcgccatgaagaagggcaagcccatcgtggagacccccgtgacccccaccatcaccaccctgctggacgagaaggtgcagagcgtgcccctggccgccaccaccttcaccagccccagcaacacccccgccagcatcagccccaagctgaacgtggaggtgaagaaggaggtggacaaggagaaggccgtgaccgacgagaagcccaagcagaaggacaagcccggcgaggaggaggagaagtgcgacatcagcagcaagtaccactacctgaccgagaacgacctggaggagagccccaagggcggcctggacatcctgaagagcctggagaacaccgtgaccagcgccatcaacaaggcccagaacggcacccccagctggggcggctaccccagcatccacgccgcctaccagctgcccaacatgatgaagctgagcctgggcagcagcggcaagagcacccccctgaagcccatgttcggcaacagcgagatcgtgagccccaccaagaaccagaccctggtgagcccccccagcagccagaccagccccatgcccaagaccaacttccacgccatggaggagctggtgaagaaggtgaccgagaaggtggccaaggtggaggagaagatgaaggagcccgacggcaagctgagcccccccaagagagccacccccagcccctgcagcagcgaggtgggcgagcccatcaagatggaggccagcagcgacggcggcttcagaagccaggagaacagccccagcccccccagagacggctgcaaggacggcagccccctggccgagcccgtggagaacggcaaggagctggtgaagcccctggccagcagcctgagcggcagcaccgccatcatcaccgaccacccccccgagcagcccttcgtgaaccccctgagcgccctgcagagcgtgatgaacatccacctgggcaaggccgccaagcccagcctgcccgccctggaccccatgagcatgctgttcaagatgagcaacagcctggccgagaaggccgccgtggccacccccccccccctgcagagcaagaaggccgaccacctggacagatacttctaccacgtgaacaacgaccagcccatcgacctgaccaagggcaagagcgacaagggctgcagcctgggcagcgtgctgctgagccccaccagcaccgcccccgccaccagcagcagcaccgtgaccaccgccaagaccagcgccgtggtgagcttcatgagcaacagccccctgagagagaacgccctgagcgacatcagcgacatgctgaagaacctgaccgagagccacaccagcaagagcagcacccccagcagcatcagcgagaagagcgacatcgacggcgccaccctggaggaggccgaggagagcacccccgcccagaagagaaagggcagacagagcaactggaacccccagcacctgctgatcctgcaggcccagttcgccgccagcctgagacagaccagcgagggcaagtacatcatgagcgacctgagcccccaggagagaatgcacatcagcagattcaccggcctgagcatgaccaccatcagccactggctggccaacgtgaagtaccagctgagaagaaccggcggcaccaagttcctgaagaacctggacaccggccaccccgtgttcttctgcaacgactgcgccagccagatcagaacccccagcacctacatcagccacctggagagccacctgggcttcagactgagagacctgagcaagctgagcaccgagcagatcaacagccagatcgcccagaccaagagccccagcgagaagatggtgaccagcagccccgaggaggacctgggcaccagctaccagtgcaagctgtgcaacagaaccttcgccagcaagcacgccgtgaagctgcacctgagcaagacccacggcaagagccccgaggaccacctgctgtacgtgagcgagctggagaagcagtag

SEQ ID NO: 102080 - DNA, 1896 bp, synthetic construct
  misc_feature 1..1896: note = Description of Artificial Sequence: Synthetic coding sequence
  source 1..1896: mol_type = other DNA
atgaacttcaacaccatcctggaggagatcctgatcaagagaagccagcagaagaagaagaccagccccctgaactacaaggagagactgttcgtgctgaccaagagcatgctgacctactacgagggcagagccgagaagaagtacagaaagggcttcatcgacgtgagcaagatcaagtgcgtggagatcgtgaagaacgacgacggcgtgatcccctgccagaacaagtaccccttccaggtggtgcacgacgccaacaccctgtacatcttcgcccccagcccccagagcagagacctgtgggtgaagaagctgaaggaggagatcaagaacaacaacaacatcatgatcaagtaccaccccaagttctggaccgacggcagctaccagtgctgcagacagaccgagaagctggcccccggctgcgagaagtacaacctgttcgagagcagcatcagaaaggccctgccccccgcccccgagaccaagaagagaagaccccccccccccatccccctggaggaggaggacaacagcgaggagatcgtggtggccatgtacgacttccaggccgccgagggccacgacctgagactggagagaggccaggagtacctgatcctggagaagaacgacgtgcactggtggagagccagagacaagtacggcaacgagggctacatccccagcaactacgtgaccggcaagaagagcaacaacctggaccagtacgagtggtactgcagaaacatgaacagaagcaaggccgagcagctgctgagaagcgaggacaaggagggcggcttcatggtgagagacagcagccagcccggcctgtacaccgtgagcctgtacaccaagttcggcggcgagggcagcagcggcttcagacactaccacatcaaggagaccaccaccagccccaagaagtactacctggccgagaagcacgccttcggcagcatccccgagatcatcgagtaccacaagcacaacgccgccggcctggtgaccagactgagataccccgtgagcgtgaagggcaagaacgcccccaccaccgccggcttcagctacgagaagtgggagatcaaccccagcgagctgaccttcatgagagagctgggcagcggcctgttcggcgtggtgagactgggcaagtggagagcccagtacaaggtggccatcaaggccatcagagagggcgccatgtgcgaggaggacttcatcgaggaggccaaggtgatgatgaagctgacccaccccaagctggtgcagctgtacggcgtgtgcacccagcagaagcccatctacatcgtgaccgagttcatggagagaggctgcctgctgaacttcctgagacagagacagggccacttcagcagagacgtgctgctgagcatgtgccaggacgtgtgcgagggcatggagtacctggagagaaacagcttcatccacagagacctggccgccagaaactgcctggtgagcgaggccggcgtggtgaaggtgagcgacttcggcatggccagatacgtgctggacgaccagtacaccagcagcagcggcgccaagttccccgtgaagtggtgcccccccgaggtgttcaactacagcagattcagcagcaagagcgacgtgtggagcttcggcgtgctgatgtgggaggtgttcaccgagggcagaatgcccttcgagaagtacaccaactacgaggtggtgaccatggtgaccagaggccacagactgtaccagcccaagctggccagcaactacgtgtacgaggtgatgctgagatgctggcaggagaagcccgagggcagacccagcttcgaggacctgctgagaaccatcgacgagctggtggagtgcgaggagaccttcggcagatag

SEQ ID NO: 102081 - DNA, 2094 bp, synthetic construct
  misc_feature 1..2094: note = Description of Artificial Sequence: Synthetic coding sequence
  source 1..2094: mol_type = other DNA
atgggcttccagccccccgccgccctgctgctgagactgttcctgctgcagggcatcctgagactgctgtggggcgacctggccttcatcccccccttcatcagaatgagcggccccgccgtgagcgccagcctggtgggcgacaccgagggcgtgaccgtgagcctggccgtgctgcaggacgaggccggcatcctgcccatccccacctgcggcgtgctgaacaacgagaccgaggactggagcgtgaccgtgatccccggcgccaaggtgctggaggtgaccgtgagatggaagagaggcctggactggtgcagcagcaacgagaccgacagcttcagcgagagcccctgcatcctgcagaccctgctggtgagcgccagccacaacagcagctgcagcgcccacctgctgatccaggtggagatctacgccaacagcagcctgacccacaacgccagcgagaacgtgaccgtgatccccaaccaggtgtaccagcccctgggcccctgcccctgcaacctgaccgccggcgcctgcgacgtgagatgctgctgcgaccaggagtgcagcagcaacctgaccaccctgttcagaagaagctgcttcaccggcgtgttcggcggcgacgtgaacccccccttcgaccagctgtgcagcgccggcaccaccaccagaggcgtgcccgactggttccccttcctgtgcgtgcagagccccctggccaacacccccttcctgggctacttctaccacggcgccgtgagccccaagcaggacagcagcttcgaggtgtacgtggacaccgacgccaaggacttcgccgacttcggctacaagcagggcgaccccatcatgaccgtgaagaaggcctacttcaccatcccccaggtgagcctggccggccagtgcatgcagaacgcccccgtggccttcctgcacaacttcgacgtgaagtgcgtgaccaacctggagctgtaccaggagagagacggcatcatcaacgccaagatcaagaacgtggccctgggcggcatcgtgacccccaaggtgatctacgaggaggccaccgacctggacaagttcatcaccaacaccgagacccccctgaacaacggcagcacccccagaatcgtgaacgtggaggagcactacatcttcaagtggaacaacaacaccatcagcgagatcaacgtgaagatcttcagagccgagatcaacgcccaccagaagggcatcatgacccagagattcgtggtgaagttcctgagctacaacagcggcaacgaggaggagctgagcggcaaccccggctaccagctgggcaagcccgtgagagccctgaacatcaacagaatgaacaacgtgaccaccctgcacctgtggcagagcgccggcagaggcctgtgcaccagcgccaccttcaagcccatcctgttcggcgagaacgtgctgagcggctgcctgctggaggtgggcatcaacgagaactgcacccagctgagagagaacgccgtggagagactggacagcctgatccaggccacccacgtggccatgagaggcaacagcgactacgccgacctgagcgacggctggctggagatcatcagagtggacgcccccgaccccggcgccgaccccctggccagcagcgtgaacggcatgtgcctggacatccccgcccacctgagcatcagaatcctgatcagcgacgccggcgccgtggagggcatcacccagcaggagatcctgggcgtggagaccagattcagcagcgtgaactggcagtaccagtgcggcctgacctgcgagcacaaggccgacctgctgcccatcagcgccagcgtgcagttcatcaagatccccgcccagctgccccaccccctgaccagattccagatcaactacaccgagtacgactgcaacagaaacgaggtgtgctggccccagctgctgtacccctggacccagtactaccagggcgagctgcacagccagtgcgtggccaagggcctgctgctgctgctgttcctgaccctggccctgttcctgagcaacccctggaccagaatctgcaaggcctacagctag

SEQ ID NO: 102082 - DNA, 2091 bp, synthetic construct
  misc_feature 1..2091: note = Description of Artificial Sequence: Synthetic coding sequence
  source 1..2091: mol_type = other DNA
atgggcttccagccccccgccgccctgctgctgagactgttcctgctgcagggcatcctgagactgctgtggggcgacctggccttcatcccccccttcatcagaatgagcggccccgccgtgagcgccagcctggtgggcgacaccgagggcgtgaccgtgagcctggccgtgctgcaggacgaggccggcatcctgcccatccccacctgcggcgtgctgaacaacgagaccgaggactggagcgtgaccgtgatccccggcgccgtgctggaggtgaccgtgagatggaagagaggcctggactggtgcagcagcaacgagaccgacagcttcagcgagagcccctgcatcctgcagaccctgctggtgagcgccagccacaacagcagctgcagcgcccacctgctgatccaggtggagatctacgccaacagcagcctgacccacaacgccagcgagaacgtgaccgtgatccccaaccaggtgtaccagcccctgggcccctgcccctgcaacctgaccgccggcgcctgcgacgtgagatgctgctgcgaccaggagtgcagcagcaacctgaccaccctgttcagaagaagctgcttcaccggcgtgttcggcggcgacgtgaacccccccttcgaccagctgtgcagcgccggcaccaccaccagaggcgtgcccgactggttccccttcctgtgcgtgcagagccccctggccaacacccccttcctgggctacttctaccacggcgccgtgagccccaagcaggacagcagcttcgaggtgtacgtggacaccgacgccaaggacttcgccgacttcggctacaagcagggcgaccccatcatgaccgtgaagaaggcctacttcaccatcccccaggtgagcctggccggccagtgcatgcagaacgcccccgtggccttcctgcacaacttcgacgtgaagtgcgtgaccaacctggagctgtaccaggagagagacggcatcatcaacgccaagatcaagaacgtggccctgggcggcatcgtgacccccaaggtgatctacgaggaggccaccgacctggacaagttcatcaccaacaccgagacccccctgaacaacggcagcacccccagaatcgtgaacgtggaggagcactacatcttcaagtggaacaacaacaccatcagcgagatcaacgtgaagatcttcagagccgagatcaacgcccaccagaagggcatcatgacccagagattcgtggtgaagttcctgagctacaacagcggcaacgaggaggagctgagcggcaaccccggctaccagctgggcaagcccgtgagagccctgaacatcaacagaatgaacaacgtgaccaccctgcacctgtggcagagcgccggcagaggcctgtgcaccagcgccaccttcaagcccatcctgttcggcgagaacgtgctgagcggctgcctgctggaggtgggcatcaacgagaactgcacccagctgagagagaacgccgtggagagactggacagcctgatccaggccacccacgtggccatgagaggcaacagcgactacgccgacctgagcgacggctggctggagatcatcagagtggacgcccccgaccccggcgccgaccccctggccagcagcgtgaacggcatgtgcctggacatccccgcccacctgagcatcagaatcctgatcagcgacgccggcgccgtggagggcatcacccagcaggagatcctgggcgtggagaccagattcagcagcgtgaactggcagtaccagtgcggcctgacctgcgagcacaaggccgacctgctgcccatcagcgccagcgtgcagttcatcaagatccccgcccagctgccccaccccctgaccagattccagatcaactacaccgagtacgactgcaacagaaacgaggtgtgctggccccagctgctgtacccctggacccagtactaccagggcgagctgcacagccagtgcgtggccaagggcctgctgctgctgctgttcctgaccctggccctgttcctgagcaacccctggaccagaatctgcaaggcctacagctag

SEQ ID NO: 102083 - DNA, 1824 bp, synthetic construct
  misc_feature 1..1824: note = Description of Artificial Sequence: Synthetic coding sequence
  source 1..1824: mol_type = other DNA
atgagaaccccccagctggccctgctgcaggtgttcttcctggtgttccccgacggcgtgagaccccagcccagcagcagccccagcggcgccgtgcccaccagcctggagctgcagagaggcaccgacggcggcaccctgcagagccccagcgaggccaccgccaccagacccgccgtgcccggcctgcccaccgtggtgcccaccctggtgacccccagcgcccccggcaacagaaccgtggacctgttccccgtgctgcccatctgcgtgtgcgacctgacccccggcgcctgcgacatcaactgctgctgcgacagagactgctacctgctgcaccccagaaccgtgttcagcttctgcctgcccggcagcgtgagaagcagcagctgggtgtgcgtggacaacagcgtgatcttcagaagcaacagccccttccccagcagagtgttcatggacagcaacggcatcagacagttctgcgtgcacgtgaacaacagcaacctgaactacttccagaagctgcagaaggtgaacgccaccaacttccaggccctggccgccgagttcggcggcgagagcttcaccagcaccttccagacccagagcccccccagcttctacagagccggcgaccccatcctgacctacttccccaagtggagcgtgatcagcctgctgagacagcccgccggcgtgggcgccggcggcctgtgcgccgagagcaaccccgccggcttcctggagagcaagagcaccacctgcaccagattcttcaagaacctggccagcagctgcaccctggacagcgccctgaacgccgccagctactacaacttcaccgtgctgaaggtgcccagaagcatgaccgacccccagaacatggagttccaggtgcccgtgatcctgaccagccaggccaacgcccccctgctggccggcaacacctgccagaacgtggtgagccaggtgacctacgagatcgagaccaacggcaccttcggcatccagaaggtgagcgtgagcctgggccagaccaacctgaccgtggagcccggcgccagcctgcagcagcacttcatcctgagattcagagccttccagcagagcaccgccgccagcctgaccagccccagaagcggcaaccccggctacatcgtgggcaagcccctgctggccctgaccgacgacatcagctacagcatgaccctgctgcagagccagggcaacggcagctgcagcgtgaagagacacgaggtgcagttcggcgtgaacgccatcagcggctgcaagctgagactgaagaaggccgactgcagccacctgcagcaggagatctaccagaccctgcacggcagacccagacccgagtacgtggccatcttcggcaacgccgaccccgcccagaagggcggctggaccagaatcctgaacagacactgcagcatcagcgccatcaactgcaccagctgctgcctgatccccgtgagcctggagatccaggtgctgtgggcctacgtgggcctgctgagcaacccccaggcccacgtgagcggcgtgagattcctgtaccagtgccagagcatccaggacagccagcaggtgaccgaggtgagcctgaccaccctggtgaacttcgtggacatcacccagaagccccagccccccagaggccagcccaagatggactggaagtggcccttcgacttcttccccttcaaggtggccttcagcagaggcgtgttcagccagaagtgcagcgtgagccccatcctgatcctgtgcctgctgctgctgggcgtgctgaacctggagaccatgtag

SEQ ID NO: 102084 - DNA, 1290 bp, synthetic construct
  misc_feature 1..1290: note = Description of Artificial Sequence: Synthetic coding sequence
  source 1..1290: mol_type = other DNA
atggacagcaacggcatcagacagttctgcgtgcacgtgaacaacagcaacctgaactacttccagaagctgcagaaggtgaacgccaccaacttccaggccctggccgccgagttcggcggcgagagcttcaccagcaccttccagacccagagcccccccagcttctacagagccggcgaccccatcctgacctacttccccaagtggagcgtgatcagcctgctgagacagcccgccggcgtgggcgccggcggcctgtgcgccgagagcaaccccgccggcttcctggagagcaagagcaccacctgcaccagattcttcaagaacctggccagcagctgcaccctggacagcgccctgaacgccgccagctactacaacttcaccgtgctgaaggtgcccagaagcatgaccgacccccagaacatggaggtgacctacgagatcgagaccaacggcaccttcggcatccagaaggtgagcgtgagcctgggccagaccaacctgaccgtggagcccggcgccagcctgcagcagcacttcatcctgagattcagagccttccagcagagcaccgccgccagcctgaccagccccagaagcggcaaccccggctacatcgtgggcaagcccctgctggccctgaccgacgacatcagctacagcatgaccctgctgcagagccagggcaacggcagctgcagcgtgaagagacacgaggtgcagttcggcgtgaacgccatcagcggctgcaagctgagactgaagaaggccgactgcagccacctgcagcaggagatctaccagaccctgcacggcagacccagacccgagtacgtggccatcttcggcaacgccgaccccgcccagaagggcggctggaccagaatcctgaacagacactgcagcatcagcgccatcaactgcaccagctgctgcctgatccccgtgagcctggagatccaggtgctgtgggcctacgtgggcctgctgagcaacccccaggcccacgtgagcggcgtgagattcctgtaccagtgccagagcatccaggacagccagcaggtgaccgaggtgagcctgaccaccctggtgaacttcgtggacatcacccagaagccccagccccccagaggccagcccaagatggactggaagtggcccttcgacttcttccccttcaaggtggccttcagcagaggcgtgttcagccagaagtgcagcgtgagccccatcctgatcctgtgcctgctgctgctgggcgtgctgaacctggagaccatgtag

SEQ ID NO: 102085 - DNA, 1332 bp, synthetic construct
  misc_feature 1..1332: note = Description of Artificial Sequence: Synthetic coding sequence
  source 1..1332: mol_type = other DNA
atgagaaccccccagctggccctgctgcaggtgttcttcctggtgttccccgacggcgtgagaccccagcccagcagcagccccagcggcgccgtgcccaccagcctggagctgcagagaggcaccgacggcggcaccctgcagagccccagcgaggccaccgccaccagacccgccgtgcccggcctgcccaccgtggtgcccaccctggtgacccccagcgcccccggcaacagaaccgtggacctgttccccgtgctgcccatctgcgtgtgcgacctgacccccggcgcctgcgacatcaactgctgctgcgacagagactgctacctgctgcaccccagaaccgtgttcagcttctgcctgcccggcagcgtgagaagcagcagctgggtgtgcgtggacaacagcgtgatcttcagaagcaacagccccttccccagcagagtgttcatggacagcaacggcatcagacagttctgcgtgcacgtgaacaacagcaacctgaactacttccagaagctgcagaaggtgaacgccaccaacttccaggccctggccgccgagttcggcggcgagagcttcaccagcaccttccagacccagagcccccccagcttctacagagccggcgaccccatcctgacctacttccccaagtggagcgtgatcagcctgctgagacagcccgccggcgtgggcgccggcggcctgtgcgccgagagcaaccccgccggcttcctggagagcaagagcaccacctgcaccagattcttcaagaacctggccagcagctgcaccctggacagcgccctgaacgccgccagctactacaacttcaccgtgctgaaggtgcccagaagcatgaccgacccccagaacatggagttccaggtgcccgtgatcctgaccagccaggccaacgcccccctgctggccggcaacacctgccagaacgtggtgagccaggtgacctacgagatcgagaccaacggcaccttcggcatccagaaggtgagcgtgagcctgggccagaccaacctgaccgtggagcccggcgccagcctgcagcagcacttcatcctgagattcagagccttccagcagagcaccgccgccagcctgaccagccccagaagcggcaaccccggctacatcgtgggcaagcccctgctggccctgaccgacgacatcagctacagcgtgagcttcctggagctgggcggcctgctgcagcccaacgagaagagctgcaagggcttccagacctacgtgagactggccaagggcgaggagttcttcgtgcactacaacgaggtgctgatctactag

SEQ ID NO: 102086 - DNA, 1878 bp, synthetic construct
  misc_feature 1..1878: note = Description of Artificial Sequence: Synthetic coding sequence
  source 1..1878: mol_type = other DNA
atgagactggagaccgccgaggcctacgtgggccccggcggccccgagtgccccatgagaaccccccagctggccctgctgcaggtgttcttcctggtgttccccgacggcgtgagaccccagcccagcagcagccccagcggcgccgtgcccaccagcctggagctgcagagaggcaccgacggcggcaccctgcagagccccagcgaggccaccgccaccagacccgccgtgcccggcctgcccaccgtggtgcccaccctggtgacccccagcgcccccggcaacagaaccgtggacctgttccccgtgctgcccatctgcgtgtgcgacctgacccccggcgcctgcgacatcaactgctgctgcgacagagactgctacctgctgcaccccagaaccgtgttcagcttctgcctgcccggcagcgtgagaagcagcagctgggtgtgcgtggacaacagcgtgatcttcagaagcaacagccccttccccagcagagtgttcatggacagcaacggcatcagacagttctgcgtgcacgtgaacaacagcaacctgaactacttccagaagctgcagaaggtgaacgccaccaacttccaggccctggccgccgagttcggcggcgagagcttcaccagcaccttccagacccagagcccccccagcttctacagagccggcgaccccatcctgacctacttccccaagtggagcgtgatcagcctgctgagacagcccgccggcgtgggcgccggcggcctgtgcgccgagagcaaccccgccggcttcctggagagcaagagcaccacctgcaccagattcttcaagaacctggccagcagctgcaccctggacagcgccctgaacgccgccagctactacaacttcaccgtgctgaaggtgcccagaagcatgaccgacccccagaacatggagttccaggtgcccgtgatcctgaccagccaggccaacgcccccctgctggccggcaacacctgccagaacgtggtgagccaggtgacctacgagatcgagaccaacggcaccttcggcatccagaaggtgagcgtgagcctgggccagaccaacctgaccgtggagcccggcgccagcctgcagcagcacttcatcctgagattcagagccttccagcagagcaccgccgccagcctgaccagccccagaagcggcaaccccggctacatcgtgggcaagcccctgctggccctgaccgacgacatcagctacagcatgaccctgctgcagagccagggcaacggcagctgcagcgtgaagagacacgaggtgcagttcggcgtgaacgccatcagcggctgcaagctgagactgaagaaggccgactgcagccacctgcagcaggagatctaccagaccctgcacggcagacccagacccgagtacgtggccatcttcggcaacgccgaccccgcccagaagggcggctggaccagaatcctgaacagacactgcagcatcagcgccatcaactgcaccagctgctgcctgatccccgtgagcctggagatccaggtgctgtgggcctacgtgggcctgctgagcaacccccaggcccacgtgagcggcgtgagattcctgtaccagtgccagagcatccaggacagccagcaggtgaccgaggtgagcctgaccaccctggtgaacttcgtggacatcacccagaagccccagccccccagaggccagcccaagatggactggaagtggcccttcgacttcttccccttcaaggtggccttcagcagaggcgtgttcagccagaagtgcagcgtgagccccatcctgatcctgtgcctgctgctgctgggcgtgctgaacctggagaccatgtag

SEQ ID NO: 102087 - DNA, 1380 bp, synthetic construct
  misc_feature 1..1380: note = Description of Artificial Sequence: Synthetic coding sequence
  source 1..1380: mol_type = other DNA
atgagaaccccccagctggccctgctgcaggtgttcttcctggtgttccccgacggcgtgagaccccagcccagcagcagccccagcggcgccgtgcccaccagcctggagctgcagagaggcaccgacggcggcaccctgcagagccccagcgaggccaccgccaccagacccgccgtgcccggcctgcccaccgtggtgcccaccctggtgacccccagcgcccccggcaacagaaccgtggacctgttccccgtgctgcccatctgcgtgtgcgacctgacccccggcgcctgcgacatcaactgctgctgcgacagagactgctacctgctgcaccccagaaccgtgttcagcttctgcctgcccggcagcgtgagaagcagcagctgggtgtgcgtggacaacagcgtgatcttcagaagcaacagccccttccccagcagagtgttcatggacagcaacggcatcagacagttctgcgtgcacgtgaacaactgcttcctggagagcaagagcaccacctgcaccagattcttcaagaacctggccagcagctgcaccctggacagcgccctgaacgccgccagctactacaacttcaccgtgctgaaggtgcccagaagcatgaccgacccccagaacatggaggccttccagcagagcaccgccgccagcctgaccagccccagaagcggcaaccccggctacatcgtgggcaagcccctgctggccctgaccgacgacatcagctacagcatgaccctgctgcagagccagggcaacggcagctgcagcgtgaagagacacgaggtgcagttcggcgtgaacgccatcagcggctgcaagctgagactgaagaaggccgactgcagccacctgcagcaggagatctaccagaccctgcacggcagacccagacccgagtacgtggccatcttcggcaacgccgaccccgcccagaagggcggctggaccagaatcctgaacagacactgcagcatcagcgccatcaactgcaccagctgctgcctgatccccgtgagcctggagatccaggtgctgtgggcctacgtgggcctgctgagcaacccccaggcccacgtgagcggcgtgagattcctgtaccagtgccagagcatccaggacagccagcaggtgaccgaggtgagcctgaccaccctggtgaacttcgtggacatcacccagaagccccagccccccagaggccagcccaagatggactggaagtggcccttcgacttcttccccttcaaggtggccttcagcagaggcgtgttcagccagaagtgcagcgtgagccccatcctgatcctgtgcctgctgctgctgggcgtgctgaacctggagaccatgtag

SEQ ID NO: 102088 - DNA, 6468 bp, synthetic construct
  misc_feature 1..6468: note = Description of Artificial Sequence: Synthetic coding sequence
  source 1..6468: mol_type = other DNA
atgaactacagcagcttcctgagaatctgggtgagcttcatcttcgccctggtgcagcaccaggcccagcccagagagctgatgtaccccttctggcagaacgacaccaagacccccaaggtggacgacggcagcagcagcgagatcaagctggccatccccgtgttcttcttcggcgtgccctacagaaccgtgtacgtgaacaacaacggcgtggtgagcttcaacgtgctggtgagccagttcacccccgagagcttccccctgaccgacggcagagccttcgtggcccccttctgggccgacgtgcacaacggcatcagaggcgagatctactacagagagaccatggagcccgccatcctgaagagagccaccaaggacatcagaaagtacttcaaggacatggccaccttcagcgccacctgggtgttcatcgtgacctgggaggaggtgaccttctacggcggcagcagcaccacccccgtgaacaccttccaggccgtgctggtgagcgacggcagctacaccttcaccctgttcaactactacgagatcaactggaccaccggcaccgccagcggcggcgaccccctgaccggcctgggcggcgtgatggcccaggccggcttcaacggcggcaacctgaccaacttcttcagcctgcccggcagcagaacccccgagatcgtgaacatccaggagaccaccaacgtgaacgtgcccggcagatgggccttcaaggtggacggcaaggagatcgaccccgccaacggctgcaccagcagaggccagttcctgagaagaggcgaggtgttctgggacgacctgaactgcaccgtgaagtgcagatgcctggacttcaacaacgagatctactgccaggaggccagctgcagcccctacgaggtgtgcgagcccaagggcaagttcttctactgcagcgccgtggagaccagcacctgcgtggtgttcggcgagccccactaccacaccttcgacggcttcctgttccacttccagggcagctgcgcctacctgctggccagacagtgcctgcagaccagcagcctgcccttcttcagcgtggaggccaagaacgagcacagaagaggcagcgccgtgagctgggtgaaggagctgagcgtggaggtgaacggctacaagatcctgatccccaagggcagctacggcagagtgaaggtgaacgacctggtgaccagcctgcccgtgaccctggacctgggcaccgtgaagatctaccagagcggcatcagcaccgccgtggagaccgacttcggcctgctggtgaccttcgacggccagcactacgccagcatcagcgtgcccggcagctacatcaacagcacctgcggcctgtgcggcaactacaacaagaaccccctggacgacttcctgagacccgacggcagacccgccatgagcgtgctggacctgggcgagagctggagagtgtaccacgccgactggaagtgcgacagcggctgcgtggacaactgcacccagtgcgacgccgccaccgaggccctgtacttcggcagcgactactgcggcttcctgaacaagaccgacggccccctgtgggagtgcggcaccgtggtggaccccaccgccttcgtgcacagctgcgtgtacgacctgtgcagcgtgagagacaacggcaccctgctgtgccaggccatccaggcctacgccctggtgtgccaggccctgggcatccccatcggcgactggagaacccagaccggctgcgtgagcaccgtgcagtgccccagcttcagccactacagcgtgtgcaccagcagctgccccgacacctgcagcgacctgaccgccagcagaaactgcgccaccccctgcaccgagggctgcgagtgcaaccagggcttcgtgctgagcaccagccagtgcgtgcccctgcacaagtgcggctgcgacttcgacggccactactacaccatgggcgagttcttctgggccaccgccaactgcaccgtgcagtgcctgtgcgaggagggcggcgacgtgtactgcttcaacaagacctgcggcagcggcgaggtgtgcgccgtggaggacggctaccagggctgcttccccaagagagagaccgtgtgcctgctgagccagaaccaggtgctgcacaccttcgacggcgccagctacgccttccccagcgagttcagctacaccctgctgaagacctgccccgagagacccgagtacctggagatcgacatcaacaagaagaagcccgacgccggccccgcctggctgagaggcctgagaatcctggtggccgaccaggaggtgaagatcggcggcatcggcgccagcgaggtgaagctgaacggccaggaggtggagctgcccttcttccaccccagcggcaagctggagatctacagaaacaagaacagcaccaccgtggagagcaagggcgtggtgaccgtgcagtacagcgacatcggcctgctgtacatcagactgagcaccacctacttcaactgcaccggcggcctgtgcggcttctacaacgccaacgccagcgacgagttctgcctgcccaacggcaagtgcaccgacaacctggccgtgttcctggagagctggaccaccttcgaggagatctgcaacggcgagtgcggcgacctgctgaaggcctgcaacaacgacagcgagctgctgaagttctacagaagcagaagcagatgcggcatcatcaacgaccccagcaacagcagcttcctggagtgccacggcgtggtgaacgtgaccgcctactacagaacctgcctgttcagactgtgccagagcggcggcaacgagagcgagctgtgcgacagcgtggccagatacgccagcgcctgcaagaacgccgacgtggaggtgggcccctggagaacctacgacttctgccccctggagtgccccgagaacagccacttcgaggagtgcatcacctgcaccgagacctgcgagaccctgaccctgggccccatctgcgtggacagctgcagcgagggctgccagtgcgacgagggctacgccctgctgggcagccagtgcgtgaccagaagcgagtgcggctgcaacttcgagggccaccagctggccaccaacgagaccttctgggtggacctggactgccagatcttctgctactgcagcggcaccgacaacagagtgcactgcgagaccatcccctgcaaggacgacgagtactgcatggaggagggcggcctgtactactgccaggccagaaccgacgccagctgcatcgtgagcggctacggccactacctgaccttcgacggcttccccttcgacttccagaccagctgccccctgatcctgtgcaccaccggcagcagacccagcagcgacagcttccccaagttcgtggtgaccgccaagaacgaggacagagaccccagcctggccctgtgggtgaagcaggtggacgtgaccgtgttcggctacagcatcgtgatccacagagcctacaagcacaccgtgctggtgaacagcgagagactgtacctgcccctgaagctgggccagggcaagatcaacatcttcagcttcggcttccacgtggtggtggagaccgacttcggcctgaaggtggtgtacgactggaagaccttcctgagcatcaccgtgcccagaagcatgcagaacagcacctacggcctgtgcggcagatacaacggcaaccccgacgacgacctggagatgcccatgggcctgctggccagcagcgtgaacgagttcggccagagctgggtgaagagagacaccttctgccaggtgggctgcggcgacagatgccccagctgcgccaaggtggagggcttcagcaaggtgcagcagctgtgcagcctgatccccaaccagaacgccgccttcagcaagtgccacagcaaggtgaaccccaccttcttctacaagaactgcctgttcgacagctgcatcgacggcggcgccgtgcagaccgcctgcagctggctgcagaactacgccagcacctgccagacccagggcatcaccgtgaccggctggagaaactacaccagctgcaccgtgacctgcccccccaacagccactacgagagctgcgtgagcgtgtgccagcccagatgcgccgccatcagactgaagagcgactgcagccactactgcgtggagggctgccactgcgacgccggctacgtgctgaacggcaagagctgcatcctgccccacagctgcggctgctacagcgacggcaagtactacgagcccaagcagctgttctggaacagcgactgcaccagaagatgcagatgcttcagaagaaacgtgatccagtgcgaccccagacagtgcaagagcgacgaggagtgcgccctgagaaacggcgtgagaggctgcttcagcaccaagaccagctactgcctggccgccggcggcggcgtgttcagaaccttcgacggcgccttcctgagattccccgccaactgcgccttcgtgctgagcaccatctgccagaagctgcccgacatcagcttccagctgatcatcaacttcgacaagtggagcgcccccaacctgaccatcatcagccccgtgtacttctacatcaacgaggagcagatcctgatcaacgacagaaacaccgtgaaggtgaacggcacccaggtgaacgtgcccttcatcaccggcctggccaccaagatctacagcagcgagggcttcctggtgatcgacaccagccccgacatccagatctactacaacggcttcaacgtgatcaagatcagcatcagcgagagactgcagaacaaggtgtgcggcctgtgcggcaacttcaacggcgacctgaccgacgactacgtgaccctgagaggcaagcccgtggtgagcagcgtggtgctggcccagagctggaagaccaacggcatgcagaagagacccctggcccccagctgcaacgagctgcagttcagccagtacgccgccatgtgcgacaacgtgcacatccagaagatgcagggcgacggctactgcctgaagctgaccgacatgaagggcttcttccagccctgctacggcctgctggaccccctgcccttctacgagagctgctacctggacggctgctacagccacaagaagttccagctgtgcggcagcctggccgcctacggcgaggcctgcagaagcttcggcatcctgagcaccgagtggatcgagaaggagaactgcagcggcgtggtggaggacccctgcgtgggcgccgactgccccaacagaacctgcgagctgggcaacggcagagagctgtgcggctgcatcgagccccccccctacggcaacaacagccacgacatcatcgacgccgaggtgacctgcaaggccgcccagatggaggtgagcatcagcaagtgcaagctgttccagctgggcttcgagagagagggcgtgagaatcaacgacagacagtgcaccggcatcgagggcgaggacttcatcagcttccagatcaacaacaccaagggcaactgcggcaacatcgtgcagagcaacggcacccacatcatgtacaagaacaccctgtggatcgagagcgccaacaacaccggcaacatcatcaccagagacagaaccatcaacgtggagttcagctgcgcctacgagctggacatcaagatcagcctggacagcgtggtgaagcccatgctgagcgtgatcaacctgaccgtgcccacccaggagggcagcttcatcaccaagatggccctgtacaagaacgccagctacaagcacccctacagacagggcgaggtggtgctgaccaccagagacgtgctgtacgtgggcgtgttcgtggtgggcgccgacgccacccacctgatcctgaccctgaacaagtgctacgccacccccaccagagacagcaacgacaagctgagatacttcatcatcgagggcggctgccagaacctgaaggacaacaccatcggcatcgaggagaacgccgtgagcctgacctgcagattccacgtgaccgtgttcaagttcatcggcgactacgacgaggtgcacctgcactgcgccgtgagcctgtgcgacagcgagaagtacagctgcaagatcacctgcccccacaacagcagaatcgccaccgactacaccaaggagcccaaggagcagatcatcagcgtgggccccatcagaagaaagagactggactggtgcgaggacaacggcggctgcgagcagatctgcaccagcagagtggacggccccctgtgcagctgcgtgaccggcaccctgcaggaggacggcaagagctgcagagccagcaacagcagcatggagctgcaggtgtggaccctgctgctgatcatgatccagatcagcctgtggcacttcgtgtacaagagcggcaccaccagctag

SEQ ID NO: 102089 - DNA, 6468 bp, synthetic construct; identical to SEQ ID NO: 102088
  misc_feature 1..6468: note = Description of Artificial Sequence: Synthetic coding sequence
  source 1..6468: mol_type = other DNA

SEQ ID NO: 102090 - DNA, 1257 bp, synthetic construct
  misc_feature 1..1257: note = Description of Artificial Sequence: Synthetic coding sequence
  source 1..1257: mol_type = other DNA
atggccaagctgctgcagcccccccccaagttcctgcccagcgagtggcacatcgccaacaagaaccagtaccacagagccgacgcccagagaagcagaagcgagagactggtggccgagagccagagactggtggacgagatcgagaagaccaccagaaagagccagagcgacgtgaacaagaagctggagcagagactggaggaggtgcagttctggaagaaggagctggacgacaagctggagcagctggtgaacgtgaccgacgacctgctgatctacaagatcagactggagaaggccctggagaccctgaaggagcccctgcacatcaccgagacctgcctggcctacagagagaagagaatcggcatcgacctggtgcacgacaccgtggagcacgagctgatcaaggaggccgagatcatccagggcatcatggccctgctgaccagaaccctggaggaggccagcgagcagatcagaatgaacagaagcgccaagtacaacctggagaaggacctgaaggacaagttcgtggccctgaccatcgacgacatctgcttcagcctgaacaacaacagccccaacatcagatacagcgagaacgccgtgagaatcgagcccaacagcgtgagcctggaggactggctggacttcagcagcaccaacgtggagaaggccgacaagcagagaaacaacagcctgatgctgaaggccctggtggacagaatcctgagccagaccgccaacgacctgagaaagcagtgcgacgtggtggacaccgccttcaagaacggcctgaaggacaccaaggacgccagagacaagctggccgaccacctggccaaggtgatggaggagatcgccagccaggagaagaacatcaccgccctggagaaggccatcctggaccaggagggccccgccaaggtggcccacaccagactggagaccagaacccacagacccaacgtggagctgtgcagagacgtggcccagtacagactgatgaaggaggtgcaggagatcacccacaacgtggccagactgaaggagaccctggcccaggcccaggccgagctgaagggcctgcacagaagacagctggccctgcaggaggagatccaggtgaaggagaacaccatctacatcgacgaggtgctgtgcatgcagatgagaaagagcatccccctgagagacggcgaggaccacggcgtgtgggccggcggcctgagacccgacgccgtgtgctag

SEQ ID NO: 102091 - DNA, 819 bp, synthetic construct
  misc_feature 1..819: note = Description of Artificial Sequence: Synthetic coding sequence
  source 1..819: mol_type = other DNA
atggccctgctgaccagaaccctggaggaggccagcgagcagatcagaatgaacagaagcgccaagtacaacctggagaaggacctgaaggacaagttcgtggccctgaccatcgacgacatctgcttcagcctgaacaacaacagccccaacatcagatacagcgagaacgccgtgagaatcgagcccaacagcgtgagcctggaggactggctggacttcagcagcaccaacgtggagaaggccgacaagcagagaaacaacagcctgatgctgaaggccctggtggacagaatcctgagccagaccgccaacgacctgagaaagcagtgcgacgtggtggacaccgccttcaagaacggcctgaaggacaccaaggacgccagagacaagctggccgaccacctggccaaggtgatggaggagatcgccagccaggagaagaacatcaccgccctggagaaggccatcctggaccaggagggccccgccaaggtggcccacaccagactggagaccagaacccacagacccaacgtggagctgtgcagagacgtggcccagtacagactgatgaaggaggtgcaggagatcacccacaacgtggccagactgaaggagaccctggcccaggcccaggccgagctgaagggcctgcacagaagacagctggccctgcaggaggagatccaggtgaaggagaacaccatctacatcgacgaggtgctgtgcatgcagatgagaaagagcatccccctgagagacggcgaggaccacggcgtgtgggccggcggcctgagacccgacgccgtgtgctag

SEQ ID NO: 102092 - DNA, 1473 bp, synthetic construct
  misc_feature 1..1473: note = Description of Artificial Sequence: Synthetic coding sequence
  source 1..1473: mol_type = other DNA
atggagagagtgggctgcaccctgaccaccacctacgcccaccccagacccacccccaccaacttcctgcccgccatcagcaccatggccagcagctacagagacagattcccccacagcaacctgacccacagcctgagcctgccctggagacccagcacctactacaaggtggccagcaacagccccagcgtggccccctactgcaccagaagccagagagtgagcgagaacaccatgctgcccttcgtgagcaacagaaccaccttcttcaccagatacacccccgacgactggtacagaagcaacctgaccaactaccaggagagcaacaccagcagacacaacagcgagaagctgagagtggacaccagcagactgatccaggacaagtaccagcagaccagaaagacccaggccgacaccacccagaacctgggcgagagagtgaacgacatcggcttctggaagagcgagatcatccacgagctggacgagatgatcggcgagaccaacgccctgaccgacgtgaagaagagactggagagagccctgatggagaccgaggcccccctgcaggtggccagagagtgcctgttccacagagagaagagaatgggcatcgacctggtgcacgacgaggtggaggcccagctgctgaccgaggtggacaccatcctgtgctgccaggagagaatgaagctgcacctggacaaggccatcgcccagctggccgccaacagagccagccagcacgagctggagaaggacctgagcgacaagcagaccgcctacagaatcgacgacaagtgccaccacctgagaaacaccagcgacggcgtgggctacttcagaggcgtggagagagtggacgccaccgtgagcgtgcccgagagctgggccaagttcaccgacgacaacatcctgagaagccagagcgagagagccgccagcgccaagctgagagacgacatcgagaacctgctggtggtgaccgccaacgagatgtggaaccagttcaacaaggtgaacctgagcttcaccaacagaatcgccgagaccgccgacgccaagaacaagatccagacccacctggccaagaccctgcaggagatcttccagaccgagatgaccatcgagagcatcaagaaggccatcaaggacaagaccgccttcctgaaggtggcccagaccagactggacgagagaaccagaagacccaacatcgagctgtgcagagacatggcccagctgagactggtgaacgaggtgcacgaggtggacgacaccatccagaccctgcagcagagactgagagacgccgaggacaccctgcagagcctggtgcacatcaaggccaccctggagtacgacctggccgtgaaggccaacagcctgtacatcgaccaggagaagtgcatgagcatgagaaagagctaccccaacaccctgagactggtgggcttctgctag

SEQ ID NO: 102093 - DNA, 1473 bp, synthetic construct; identical to SEQ ID NO: 102092
  misc_feature 1..1473: note = Description of Artificial Sequence: Synthetic coding sequence
  source 1..1473: mol_type = other DNA

SEQ ID NO: 102094 - DNA, 444 bp, synthetic construct
  misc_feature 1..444: note = Description of Artificial Sequence: Synthetic coding sequence
  source 1..444: mol_type = other DNA
atggagagagtgggctgcaccctgaccaccacctacgcccaccccagacccacccccaccaacttcctgcccgccatcagcaccatggccagcagctacagagacagattcccccacagcaacctgacccacagcctgagcctgccctggagacccagcacctactacaaggtggccagcaacagccccagcgtggccccctactgcaccagaagccagagagtgagcgagaacaccatgctgcccttcgtgagcaacagaaccaccttcttcaccagatacacccccgacgactggtacagaagcaacctgaccaactaccaggagagcaacaccagcagacacaacagcgagaagctgagagtggacaccagcagactgatccaggacaagtaccagcagaccagaaagacccaggccgacaccacccagaacctgggctag

SEQ ID NO: 102095 - DNA, 423 bp, synthetic construct
  misc_feature 1..423: note = Description of Artificial Sequence: Synthetic coding sequence
  source 1..423: mol_type = other DNA
atggagagagtgggctgcaccctgaccaccacctacgcccaccccagacccacccccaccaacttcctgcccgccatcagcaccatggccagcagctacagagacagattcccccacagcaacctgacccacagcctgagcctgccctggagacccagcacctactacaaggtggccagcaacagccccagcgtggccccctactgcaccagaagccagagagtgagcgagaacaccatgctgcccttcgtgagcaacagaaccaccttcttcaccagatacacccccgacgactggtacagaagcaacctgaccaactaccaggagagcaacaccagcagacacaacagcgagaagctgagagtggacaccagcagactgatccaggacaagtaccagcagaccagaaagacccaggcctag

SEQ ID NO: 102096 - DNA, 249 bp, synthetic construct
  misc_feature 1..249: note = Description of Artificial Sequence: Synthetic coding sequence
  source 1..249: mol_type = other DNA
atggagagagtgggctgcaccctgaccaccacctacgcccaccccagacccacccccaccaacttcctgcccgccatcagcaccatggccagcagctacagagacagattcccccacagcaacctgacccacagcctgagcctgccctggagacccagcacctactacaaggtggccagcaacagccccagcgtggccccctactgcaccagaagccagagagtgagcgagaacaccatgctgccctag

SEQ ID NO: 102097 - DNA, 2514 bp, synthetic construct
  misc_feature 1..2514: note = Description of Artificial Sequence: Synthetic coding sequence
  source 1..2514: mol_type = other DNA
atggagcccgcccccagcgaggtgagactggccgtgagagaggccatccacgccctgagcagcagcgaggacggcggccacatcttctgcaccctggagagcctgaagagatacctgggcgagatggagccccccgccctgcccagagagaaggaggagttcgccagcgcccacttcagccccgtgctgagatgcctggccagcagactgagccccgcctggctggagctgctgccccacggcagactggaggagctgtgggccagcttcttcctggagggccccgccgaccaggccttcctggtgctgatggagaccatcgagggcgccgccggccccagcttcagactgatgaagatggccagactgctggccagattcctgagagagggcagactggccgtgctgatggaggcccagtgcagacagcagacccagcccggcttcatcctgctgagagagaccctgctgggcaaggtggtggccctgcccgaccacctgggcaacagactgcagcaggagaacctggccgagttcttcccccagaactacttcagactgctgggcgaggaggtggtgagagtgctgcaggccgtggtggacagcctgcagggcggcctggacagcagcgtgagcttcgtgagccaggtgctgggcaaggcctgcgtgcacggcagacagcaggagatcctgggcgtgctggtgcccagactggccgccctgacccagggcagctacctgcaccagagagtgtgctggagactggtggagcaggtgcccgacagagccatggaggccgtgctgaccggcctggtggaggccgccctgggccccgaggtgctgagcagactgctgggcaacctggtggtgaagaacaagaaggcccagttcgtgatgacccagaagctgctgttcctgcagagcagactgaccacccccatgctgcagagcctgctgggccacctggccatggacagccagagaagacccctgctgctgcaggtgctgaaggagctgctggagacctggggcagcagcagcgccatcagacacacccccctgccccagcagagacacgtgagcaaggccgtgctgatctgcctggcccagctgggcgagcccgagctgagagacagcagagacgagctgctggccagcatgatggccggcgtgaagtgcagactggacagcagcctgccccccgtgagaagactgggcatgatcgtggccgaggtggtgagcgccagaatccaccccgagggcccccccctgaagttccagtacgaggaggacgagctgagcctggagctgctggccctggccagcccccagcccgccggcgacggcgccagcgaggccggcaccagcctggtgcccgccaccgccgagccccccgccgagacccccgccgagatcgtggacggcggcgtgccccaggcccagctggccggcagcgacagcgacctggacagcgacgacgagttcgtgccctacgacatgagcggcgacagagagctgaagagcagcaaggcccccgcctacgtgagagactgcgtggaggccctgaccaccagcgaggacatcgagagatgggaggccgccctgagagccctggagggcctggtgtacagaagccccaccgccaccagagaggtgagcgtggagctggccaaggtgctgctgcacctggaggagaagacctgcgtggtgggcttcgccggcctgagacagagagccctggtggccgtgaccgtgaccgaccccgcccccgtggccgactacctgaccagccagttctacgccctgaactacagcctgagacagagaatggacatcctggacgtgctgaccctggccgcccaggagctgagcagacccggctgcctgggcagaaccccccagcccggcagccccagccccaacaccccctgcctgcccgaggccgccgtgagccagcccggcagcgccgtggccagcgactggagagtggtggtggaggagagaatcagaagcaagacccagagactgagcaagggcggccccagacagggccccgccggcagccccagcagattcaacagcgtggccggccacttcttcttccccctgctgcagagattcgacagacccctggtgaccttcgacctgctgggcgaggaccagctggtgctgggcagactggcccacaccctgggcgccctgatgtgcctggccgtgaacaccaccgtggccgtggccatgggcaaggccctgctggagttcgtgtgggccctgagattccacatcgacgcctacgtgagacagggcctgctgagcgccgtgagcagcgtgctgctgagcctgcccgccgccagactgctggaggacctgatggacgagctgctggaggccagaagctggctggccgacgtggccgagaaggaccccgacgaggactgcagaaccctggccctgagagccctgctgctgctgcagagactgaagaacagactgctgccccccgccagcccctag

SEQ ID NO: 102098 - DNA, 1083 bp, synthetic construct
  misc_feature 1..1083: note = Description of Artificial Sequence: Synthetic coding sequence
  source 1..1083: mol_type = other DNA
atgatggccggcgtgaagtgcagactggacagcagcctgccccccgtgagaagactgggcatgatcgtggccgaggtggtgagcgccagaatccaccccgagggcccccccctgaagttccagtacgaggaggacgagctgagcctggagctgctggccctggccagcccccagcccgccggcgacggcgccagcgaggccggcaccagcctggtgcccgccaccgccgagccccccgccgagacccccgccgagatcgtggacggcggcgtgccccaggcccagctggccggcagcgacagcgacctggacagcgacgacgagttcgtgccctacgacatgagcggcgacagagagctgaagagcagcaaggcccccgcctacgtgagagactgcgtggaggtgctggacgtgctgaccctggccgcccaggagctgagcagacccggctgcctgggcagaaccccccagcccggcagccccagccccaacaccccctgcctgcccgaggccgccgtgagccagcccggcagcgccgtggccagcgactggagagtggtggtggaggagagaatcagaagcaagacccagagactgagcaagggcggccccagacagggccccgccggcagccccagcagattcaacagcgtggccggccacttcttcttccccctgctgcagagattcgacagacccctggtgaccttcgacctgctgggcgaggaccagctggtgctgggcagactggcccacaccctgggcgccctgatgtgcctggccgtgaacaccaccgtggccgtggccatgggcaaggccctgctggagttcgtgtgggccctgagattccacatcgacgcctacgtgagacagggcctgctgagcgccgtgagcagcgtgctgctgagcctgcccgccgccagactgctggaggacctgatggacgagctgctggaggccagaagctggctggccgacgtggccgagaaggaccccgacgaggactgcagaaccctggccctgagagccctgctgctgctgcagagactgaagaacagactgctgccccccgccagcccctag

SEQ ID NO: 102099 - DNA, 3270 bp, synthetic construct
  misc_feature 1..3270: note = Description of Artificial Sequence: Synthetic coding sequence
  source 1..3270: mol_type = other DNA
atggccgtgttcgacacccccgaggaggccttcggcgtgctgagacccgtgtgcgtgcagctgaccaagacccagaccgtggagaacgtggagcacctgcagaccagactgcaggccgtgagcgacagcgccctgcaggagctgcagcagtacatcctgttccccctgagattcaccctgaagacccccggccccaagagagagagactgatccagagcgtggtggagtgcctgaccttcgtgctgagcagcacctgcgtgaaggagcaggagctgctgcaggagctgttcagcgagctgagcgcctgcctgtacagccccagcagccagaagcccgccgccgtgagcgaggagctgaagctggccgtgatccagggcctgagcaccctgatgcacagcgcctacggcgacatcatcctgaccttctacgagcccagcatcctgcccagactgggcttcgccgtgagcctgctgctgggcctggccgagcaggagaagagcaagcagatcaagatcgccgccctgaagtgcctgcaggtgctgctgctgcagtgcgactgccaggaccaccccagaagcctggacgagctggagcagaagcagctgggcgacctgttcgccagcttcctgcccggcatcagcaccgccctgaccagactgatcaccggcgacttcaagcagggccacagcatcgtggtgagcagcctgaagatcttctacaagaccgtgagcttcatcatggccgacgagcagctgaagagaatcagcaaggtgcaggccaagcccgccgtggagcacagagtggccgagctgatggtgtacagagaggccgactgggtgaagaagaccggcgacaagctgaccatcctgatcaagaagatcatcgagtgcgtgagcgtgcacccccactggaaggtgagactggagctggtggagctggtggaggacctgctgctgaagtgcagccagagcctggtggagtgcgccggccccctgctgaaggccctggtgggcctggtgaacgacgagagccccgagatccaggcccagtgcaacaaggtgctgagacacttcgccgaccagaaggtggtggtgggcaacaaggccctggccgacatcctgagcgagagcctgcacagcctggccaccagcctgcccagactgatgaacagccaggacgaccagggcaagttcagcaccctgagcctgctgctgggctacctgaagctgctgggccccaagatcaacttcgtgctgaacagcgtggcccacctgcagagactgagcaaggccctgatccaggtgctggagctggacgtggccgacatcaagatcgtggaggagagaagatggaacagcgacgacctgaacgccagccccaagaccagcgccacccagccctggaacagaatccagagaagatacttcagattcttcaccgacgagagaatcttcatgctgctgagacaggtgtgccagctgctgggctactacggcaacctgtacctgctggtggaccacttcatggagctgtaccaccagagcgtggtgtacagaaagcaggccgccatgatcctgaacgagctggtgaccggcgccgccggcctggaggtggaggacctgcacgagaagcacatcaagaccaaccccgaggagctgagagagatcgtgaccagcatcctggaggagtacaccagccaggagaactggtacctggtgacctgcctggagaccgaggagatgggcgaggagctgatgatggagcaccccggcctgcaggccatcaccagcggcgagcacacctgccaggtgaccagcttcctggccttcagcaagcccagccccaccatctgcagcatgaacagcaacatctggcagatctgcatccagctggagggcatcggccagttcgcctacgccctgggcaaggacttctgcctgctgctgatgagcgccctgtaccccgtgctggagaaggccggcgaccagaccctgctgatcagccaggtggccaccagcaccatgatggacgtgtgcagagcctgcggctacgacagcctgcagcacctgatcaaccagaacagcgactacctggtgaacggcatcagcctgaacctgagacacctggccctgcacccccacacccccaaggtgctggaggtgatgctgagaaacagcgacgccaacctgctgcccctggtggccgacgtggtgcaggacgtgctggccaccctggaccagttctacgacaagagagccgccagcttcgtgagcgtgctgcacgccctgatggccgccctggcccagtggttccccgacaccggcaacctgggccacctgcaggagcagagcctgggcgaggagggcagccacctgaaccagagacccgccgccctggagaagagcaccaccaccgccgaggacatcgagcagttcctgctgaactacctgaaggagaaggacgtggccgacggcaacgtgagcgacttcgacaacgaggaggaggagcagagcgtgccccccaaggtggacgagaacgacaccagacccgacgtggagccccccctgcccctgcagatccagatcgccatggacgtgatggagagatgcatccacctgctgagcgacaagaacctgcagatcagactgaaggtgctggacgtgctggacctgtgcgtggtggtgctgcagagccacaagaaccagctgctgcccctggcccaccaggcctggcccagcctggtgcacagactgaccagagacgcccccctggccgtgctgagagccttcaaggtgctgagaaccctgggcagcaagtgcggcgacttcctgagaagcagattctgcaaggacgtgctgcccaagctggccggcagcctggtgacccaggcccccatcagcgccagagccggccccgtgtacagccacaccctggccttcaagctgcagctggccgtgctgcagggcctgggccccctgtgcgagagactggacctgggcgagggcgacctgaacaaggtggccgacgcctgcctgatctacctgagcgtgaagcagcccgtgaagctgcaggaggccgccagaagcgtgttcctgcacctgatgaaggtggaccccgacagcacctggttcctgctgaacgagctgtactgccccgtgcagttcacccccccccaccccagcctgcaccccgtgcagctgcacggcgccagcggccagcagaacccctacaccaccaacgtgctgcagctgctgaaggagctgcagtag

SEQ ID NO: 102100 - DNA, 3270 bp, synthetic construct; identical to SEQ ID NO: 102099
  misc_feature 1..3270: note = Description of Artificial Sequence: Synthetic coding sequence
  source 1..3270: mol_type = other DNA

SEQ ID NO: 102101 - DNA, 3270 bp, synthetic construct; identical to SEQ ID NO: 102099
  misc_feature 1..3270: note = Description of Artificial Sequence: Synthetic coding sequence
  source 1..3270: mol_type = other DNA

SEQ ID NO: 102102 - DNA, 1527 bp, synthetic construct
  misc_feature 1..1527: note = Description of Artificial Sequence: Synthetic coding sequence
  source 1..1527: mol_type = other DNA
atggagctggacagcgccctggaggcccccagccaggaggacagcaacctgagcgaggagctgagccacagcgccttcggccaggccttcagcaagatcctgcactgcctggccagacccgaggccagaagaggcaacgtgaaggacgccgtgctgaaggacctgggcgacctgatcgaggccaccgagttcgacagactgttcgagggcaccggcgccagactgagaggcatgcccgagaccctgggccaggtggccaaggccctggagaagtacgccgcccccagcaaggaggaggagggcggcggcgacggccacagcgaggccgccgagaaggccgcccaggtgggcctgctgttcctgaagctgctgggcaaggtggagaccgccaagaacagcctggtgggccccgcctggcagaccggcctgcaccacctggccggccccgtgtacatcttcgccatcacccacagcctggagcagccctggaccacccccagaagcagagaggtggccagagaggtgctgaccagcctgctgcaggtgaccgagtgcggcagcgtggccggcttcctgcacggcgagaacgaggacgagaagggcagactgagcgtgatcctgggcctgctgaagcccgacctgtacaaggagagctggaagaacaaccccgccatcaagcacgtgttcagctggaccctgcagcaggtgaccagaccctggctgagccagcacctggagagagtgctgcccgccagcctggtgatcagcgacgactaccagaccgagaacaagatcctgggcgtgcactgcctgcaccacatcgtgctgaacgtgcccgccgccgacctgctgcagtacaacagagcccaggtgctgtaccacgccatcagcaaccacctgtacacccccgagcaccacctgatccaggccgtgctgctgtgcctgctggacctgttccccatcctggagaagaccctgcactggaagggcgacggcgccagacccaccacccactgcgacgaggtgctgagactgatcctgacccacatggagcccgagcacagactgctgctgagaagaacctacgccagaaacctgcccgccttcgtgaacagactgggcatcctgaccgtgagacacctgaagagactggagagagtgatcatcggctacctggaggtgtacgacggccccgaggaggaggccagactgaagatcctggagaccctgaagctgctgatgcagcacacctggcccagagtgagctgcagactggtggtgctgctgaaggccctgctgaagctgatctgcgacgtggccagagaccccaacctgacccccgagagcgtgaagagcgccctgctgcaggaggccaccgactgcctgatcctgctggacagatgcagccagggcagagtgaagggcctgctggccaagatcccccagagctgcgaggacagaaaggtggtgaactacatcagaaaggtgcagcaggtgagcgagggcgccccctacaacggcacctag

SEQ ID NO: 102103 - DNA, 1527 bp, synthetic construct; identical to SEQ ID NO: 102102
  misc_feature 1..1527: note = Description of Artificial Sequence: Synthetic coding sequence
  source 1..1527: mol_type = other DNA

SEQ ID NO: 102104 - DNA, 1494 bp, synthetic construct
  misc_feature 1..1494: note = Description of Artificial Sequence: Synthetic coding sequence
  source 1..1494: mol_type = other DNA
atggagctggacagcgccctggaggcccccagccaggaggacagcaacctgagcgaggagctgagccacagcgccttcggccaggccttcagcaagatcctgcactgcctggccagacccgaggccagaagaggcaacgtgaaggacgccgtgctgaaggacctgggcgacctgatcgaggccaccgagttcgacagactgttcgagggcaccggcgccagactgagaggcatgcccgagaccctgggccaggtggccaaggccctggagaagtacgccgcccccagcaaggaggaggagggcggcggcgacggccacagcgaggccgccgagaaggccgcccaggtgggcctgctgttcctgaagctgctgggcaaggtggagaccgccaagaacagcctggtgggccccgcctggcagaccggcctgcaccacctggccggccccgtgtacatcttcgccatcacccacagcctggagcagccctggaccacccccagaagcagagaggtggccagagaggtgctgaccagcctgctgcaggtgaccgagtgcggcagcgtggccggcttcctgcacggcgagaacgaggacgagaagggcagactgagcgtgatcctgggcctgctgaagcccgacctgtacaaggagagctggaagaacaaccccgccatcaagcacgtgttcagctggaccctgcagcaggtgaccagaccctggctgagccagcacctggagagagtgctgcccgccagcctggtgatcagcgacgactaccagaccgagaacaagatcctgggcgtgcactgcctgcaccacatcgtgctgaacgtgcccgccgccgacctgctgcagtacaacagagcccaggtgctgtaccacgccatcagcaaccacctgtacacccccgagcaccacctgatccaggccgtgctgctgtgcctgctggacctgttccccatcctggagaagaccctgcactggaagggcgacggcgccagacccaccacccactgcgacgaggtgctgagactgatcctgacccacatggagcccgagcacagactgctgctgagaagaacctacgccagaaacctgcccgccttcgtgaacagactggagagagtgatcatcggctacctggaggtgtacgacggccccgaggaggaggccagactgaagatcctggagaccctgaagctgctgatgcagcacacctggcccagagtgagctgcagactggtggtgctgctgaaggccctgctgaagctgatctgcgacgtggccagagaccccaacctgacccccgagagcgtgaagagcgccctgctgcaggaggccaccgactgcctgatcctgctggacagatgcagccagggcagagtgaagggcctgctggccaagatcccccagagctgcgaggacagaaaggtggtgaactacatcagaaaggtgcagcaggtgagcgagggcgccccctacaacggcacctag

SEQ ID NO: 102105 - DNA, 306 bp, synthetic construct
  misc_feature 1..306: note = Description of Artificial Sequence: Synthetic coding sequence
  source 1..306: mol_type = other DNA
atggagctggacagcgccctggaggcccccagccaggaggacagcaacctgagcgaggagctgagccacagcgccttcggccaggccttcagcaagatcctgcactgcctggccagacccgaggccagaagaggcaacgtgaaggacgccgtgctgaaggacctgggcgacctgatcgaggccaccgagttcgacagactgttcgagggcaccggcgccagactgagaggcatgcccgagaccctgggccaggtggccaaggccctggagaagtacgccgcccccagcaaggaggaggagggctag

SEQ ID NO: 102106 - DNA, 2424 bp, synthetic construct
  misc_feature 1..2424: note = Description of Artificial Sequence: Synthetic coding sequence
  source 1..2424: mol_type = other DNA
atgcccagagcccccagatgcagagccgtgagaagcctgctgagaagccactacagagaggtgctgcccctggccaccttcgtgagaagactgggcccccagggctggagactggtgcagagaggcgaccccgccgccttcagagccctggtggcccagtgcctggtgtgcgtgccctgggacgccagacccccccccgccgcccccagcttcagacaggtgagctgcctgaaggagctggtggccagagtgctgcagagactgtgcgagagaggcgccaagaacgtgctggccttcggcttcgccctgctggacggcgccagaggcggcccccccgaggccttcaccaccagcgtgagaagctacctgcccaacaccgtgaccgacgccctgagaggcagcggcgcctggggcctgctgctgagaagagtgggcgacgacgtgctggtgcacctgctggccagatgcgccctgttcgtgctggtggcccccagctgcgcctaccaggtgtgcggcccccccctgtaccagctgggcgccgccacccaggccagaccccccccccacgccagcggccccagaagaagactgggctgcgagagagcctggaaccacagcgtgagagaggccggcgtgcccctgggcctgcccgcccccggcgccagaagaagaggcggcagcgccagcagaagcctgcccctgcccaagagacccagaagaggcgccgcccccgagcccgagagaacccccgtgggccagggcagctgggcccaccccggcagaaccagaggccccagcgacagaggcttctgcgtggtgagccccgccagacccgccgaggaggccaccagcctggagggcgccctgagcggcaccagacacagccaccccagcgtgggcagacagcaccacgccggcccccccagcaccagcagaccccccagaccctgggacaccccctgcccccccgtgtacgccgagaccaagcacttcctgtacagcagcggcgacaaggagcagctgagacccagcttcctgctgagcagcctgagacccagcctgaccggcgccagaagactggtggagaccatcttcctgggcagcagaccctggatgcccggcacccccagaagactgcccagactgccccagagatactggcagatgagacccctgttcctggagctgctgggcaaccacgcccagtgcccctacggcgtgctgctgaagacccactgccccctgagagccgccgtgacccccgccgccggcgtgtgcgccagagagaagccccagggcagcgtggccgcccccgaggaggaggacaccgaccccagaagactggtgcagctgctgagacagcacagcagcccctggcaggtgtacggcttcgtgagagcctgcctgagaagactggtgccccccggcctgtggggcagcagacacaacgagagaagattcctgagaaacaccaagaagttcatcagcctgggcaagcacgccaagctgagcctgcaggagctgacctggaagatgagcgtgagagactgcgcctggctgagaagaagccccggcgtgggctgcgtgcccgccgccgagcacagactgagagaggagatcctggccaagttcctgcactggctgatgagcgtgtacgtggtggagctgctgagaagcttcttctacgtgaccgagaccaccttccagaagaacagactgttcttctacagaaagagcgtgtggagcaagctgcagagcatcggcatcagacagcacctgaagagagtgcagctgagagagctgagcgaggccgaggtgagacagcacagagaggccagacccgccctgctgaccagcagactgagattcatccccaagcccgacggcctgagacccatcgtgaacatggactacgtggtgggcgccagaaccttcagaagagagaagagagccgagagactgaccagcagagtgaaggccctgttcagcgtgctgaactacgagagagccagaagacccggcctgctgggcgccagcgtgctgggcctggacgacatccacagagcctggagaaccttcgtgctgagagtgagagcccaggaccccccccccgagctgtacttcgtgaaggtggacgtgaccggcgcctacgacaccatcccccaggacagactgaccgaggtgatcgccagcatcatcaagccccagaacacctactgcgtgagaagatacgccgtggtgcagaaggccgcccacggccacgtgagaaaggccttcaagagccacgtgctgagacccgtgcccggcgaccccgccggcctgcaccccctgcacgccgccctgcagcccgtgctgagaagacacggcgagcaggccgtgtgcggcgacagcgccggcagagccgcccccgccttcggcggctag

SEQ ID NO: 102107 - DNA, 3399 bp, synthetic construct
  misc_feature 1..3399: note = Description of Artificial Sequence: Synthetic coding sequence
  source 1..3399: mol_type = other DNA
atgcccagagcccccagatgcagagccgtgagaagcctgctgagaagccactacagagaggtgctgcccctggccaccttcgtgagaagactgggcccccagggctggagactggtgcagagaggcgaccccgccgccttcagagccctggtggcccagtgcctggtgtgcgtgccctgggacgccagacccccccccgccgcccccagcttcagacaggtgagctgcctgaaggagctggtggccagagtgctgcagagactgtgcgagagaggcgccaagaacgtgctggccttcggcttcgccctgctggacggcgccagaggcggcccccccgaggccttcaccaccagcgtgagaagctacctgcccaacaccgtgaccgacgccctgagaggcagcggcgcctggggcctgctgctgagaagagtgggcgacgacgtgctggtgcacctgctggccagatgcgccctgttcgtgctggtggcccccagctgcgcctaccaggtgtgcggcccccccctgtaccagctgggcgccgccacccaggccagaccccccccccacgccagcggccccagaagaagactgggctgcgagagagcctggaaccacagcgtgagagaggccggcgtgcccctgggcctgcccgcccccggcgccagaagaagaggcggcagcgccagcagaagcctgcccctgcccaagagacccagaagaggcgccgcccccgagcccgagagaacccccgtgggccagggcagctgggcccaccccggcagaaccagaggccccagcgacagaggcttctgcgtggtgagccccgccagacccgccgaggaggccaccagcctggagggcgccctgagcggcaccagacacagccaccccagcgtgggcagacagcaccacgccggcccccccagcaccagcagaccccccagaccctgggacaccccctgcccccccgtgtacgccgagaccaagcacttcctgtacagcagcggcgacaaggagcagctgagacccagcttcctgctgagcagcctgagacccagcctgaccggcgccagaagactggtggagaccatcttcctgggcagcagaccctggatgcccggcacccccagaagactgcccagactgccccagagatactggcagatgagacccctgttcctggagctgctgggcaaccacgcccagtgcccctacggcgtgctgctgaagacccactgccccctgagagccgccgtgacccccgccgccggcgtgtgcgccagagagaagccccagggcagcgtggccgcccccgaggaggaggacaccgaccccagaagactggtgcagctgctgagacagcacagcagcccctggcaggtgtacggcttcgtgagagcctgcctgagaagactggtgccccccggcctgtggggcagcagacacaacgagagaagattcctgagaaacaccaagaagttcatcagcctgggcaagcacgccaagctgagcctgcaggagctgacctggaagatgagcgtgagagactgcgcctggctgagaagaagccccggcgtgggctgcgtgcccgccgccgagcacagactgagagaggagatcctggccaagttcctgcactggctgatgagcgtgtacgtggtggagctgctgagaagcttcttctacgtgaccgagaccaccttccagaagaacagactgttcttctacagaaagagcgtgtggagcaagctgcagagcatcggcatcagacagcacctgaagagagtgcagctgagagagctgagcgaggccgaggtgagacagcacagagaggccagacccgccctgctgaccagcagactgagattcatccccaagcccgacggcctgagacccatcgtgaacatggactacgtggtgggcgccagaaccttcagaagagagaagagagccgagagactgaccagcagagtgaaggccctgttcagcgtgctgaactacgagagagccagaagacccggcctgctgggcgccagcgtgctgggcctggacgacatccacagagcctggagaaccttcgtgctgagagtgagagcccaggaccccccccccgagctgtacttcgtgaaggtggacgtgaccggcgcctacgacaccatcccccaggacagactgaccgaggtgatcgccagcatcatcaagccccagaacacctactgcgtgagaagatacgccgtggtgcagaaggccgcccacggccacgtgagaaaggccttcaagagccacgtgagcaccctgaccgacctgcagccctacatgagacagttcgtggcccacctgcaggagaccagccccctgagagacgccgtggtgatcgagcagagcagcagcctgaacgaggccagcagcggcctgttcgacgtgttcctgagattcatgtgccaccacgccgtgagaatcagaggcaagagctacgtgcagtgccagggcatcccccagggcagcatcctgagcaccctgctgtgcagcctgtgctacggcgacatggagaacaagctgttcgccggcatcagaagagacggcctgctgctgagactggtggacgacttcctgctggtgaccccccacctgacccacgccaagaccttcctgagaaccctggtgagaggcgtgcccgagtacggctgcgtggtgaacctgagaaagaccgtggtgaacttccccgtggaggacgaggccctgggcggcaccgccttcgtgcagatgcccgcccacggcctgttcccctggtgcggcctgctgctggacaccagaaccctggaggtgcagagcgactacagcagctacgccagaaccagcatcagagccagcctgaccttcaacagaggcttcaaggccggcagaaacatgagaagaaagctgttcggcgtgctgagactgaagtgccacagcctgttcctggacctgcaggtgaacagcctgcagaccgtgtgcaccaacatctacaagatcctgctgctgcaggcctacagattccacgcctgcgtgctgcagctgcccttccaccagcaggtgtggaagaaccccaccttcttcctgagagtgatcagcgacaccgccagcctgtgctacagcatcctgaaggccaagaacgccggcatgagcctgggcgccaagggcgccgccggccccctgcccagcgaggccgtgcagtggctgtgccaccaggccttcctgctgaagctgaccagacacagagtgacctacgtgcccctgctgggcagcctgagaaccgcccagacccagctgagcagaaagctgcccggcaccaccctgaccgccctggaggccgccgccaaccccgccctgcccagcgacttcaagaccatcctggactag

SEQ ID NO: 102108 - DNA, 3210 bp, synthetic construct
  misc_feature 1..3210: note = Description of Artificial Sequence: Synthetic coding sequence
  source 1..3210: mol_type = other DNA
atgcccagagcccccagatgcagagccgtgagaagcctgctgagaagccactacagagaggtgctgcccctggccaccttcgtgagaagactgggcccccagggctggagactggtgcagagaggcgaccccgccgccttcagagccctggtggcccagtgcctggtgtgcgtgccctgggacgccagacccccccccgccgcccccagcttcagacaggtgagctgcctgaaggagctggtggccagagtgctgcagagactgtgcgagagaggcgccaagaacgtgctggccttcggcttcgccctgctggacggcgccagaggcggcccccccgaggccttcaccaccagcgtgagaagctacctgcccaacaccgtgaccgacgccctgagaggcagcggcgcctggggcctgctgctgagaagagtgggcgacgacgtgctggtgcacctgctggccagatgcgccctgttcgtgctggtggcccccagctgcgcctaccaggtgtgcggcccccccctgtaccagctgggcgccgccacccaggccagaccccccccccacgccagcggccccagaagaagactgggctgcgagagagcctggaaccacagcgtgagagaggccggcgtgcccctgggcctgcccgcccccggcgccagaagaagaggcggcagcgccagcagaagcctgcccctgcccaagagacccagaagaggcgccgcccccgagcccgagagaacccccgtgggccagggcagctgggcccaccccggcagaaccagaggccccagcgacagaggcttctgcgtggtgagccccgccagacccgccgaggaggccaccagcctggagggcgccctgagcggcaccagacacagccaccccagcgtgggcagacagcaccacgccggcccccccagcaccagcagaccccccagaccctgggacaccccctgcccccccgtgtacgccgagaccaagcacttcctgtacagcagcggcgacaaggagcagctgagacccagcttcctgctgagcagcctgagacccagcctgaccggcgccagaagactggtggagaccatcttcctgggcagcagaccctggatgcccggcacccccagaagactgcccagactgccccagagatactggcagatgagacccctgttcctggagctgctgggcaaccacgcccagtgcccctacggcgtgctgctgaagacccactgccccctgagagccgccgtgacccccgccgccggcgtgtgcgccagagagaagccccagggcagcgtggccgcccccgaggaggaggacaccgaccccagaagactggtgcagctgctgagacagcacagcagcccctggcaggtgtacggcttcgtgagagcctgcctgagaagactggtgccccccggcctgtggggcagcagacacaacgagagaagattcctgagaaacaccaagaagttcatcagcctgggcaagcacgccaagctgagcctgcaggagctgacctggaagatgagcgtgagagactgcgcctggctgagaagaagccccggcgtgggctgcgtgcccgccgccgagcacagactgagagaggagatcctggccaagttcctgcactggctgatgagcgtgtacgtggtggagctgctgagaagcttcttctacgtgaccgagaccaccttccagaagaacagactgttcttctacagaaagagcgtgtggagcaagctgcagagcatcggcatcagacagcacctgaagagagtgcagctgagagagctgagcgaggccgaggtgagacagcacagagaggccagacccgccctgctgaccagcagactgagattcatccccaagcccgacggcctgagacccatcgtgaacatggactacgtggtgggcgccagaaccttcagaagagagaagagagccgagagactgaccagcagagtgaaggccctgttcagcgtgctgaactacgagagagccagaagacccggcctgctgggcgccagcgtgctgggcctggacgacatccacagagcctggagaaccttcgtgctgagagtgagagcccaggaccccccccccgagctgtacttcgtgaaggtggacgtgaccggcgcctacgacaccatcccccaggacagactgaccgaggtgatcgccagcatcatcaagccccagaacacctactgcgtgagaagatacgccgtggtgcagaaggccgcccacggccacgtgagaaaggccttcaagagccacgtgagcaccctgaccgacctgcagccctacatgagacagttcgtggcccacctgcaggagaccagccccctgagagacgccgtggtgatcgagcagagcagcagcctgaacgaggccagcagcggcctgttcgacgtgttcctgagattcatgtgccaccacgccgtgagaatcagaggcaagagctacgtgcagtgccagggcatcccccagggcagcatcctgagcaccctgctgtgcagcctgtgctacggcgacatggagaacaagctgttcgccggcatcagaagagacggcctgctgctgagactggtggacgacttcctgctggtgaccccccacctgacccacgccaagaccttcctgagctacgccagaaccagcatcagagccagcctgaccttcaacagaggcttcaaggccggcagaaacatgagaagaaagctgttcggcgtgctgagactgaagtgccacagcctgttcctggacctgcaggtgaacagcctgcagaccgtgtgcaccaacatctacaagatcctgctgctgcaggcctacagattccacgcctgcgtgctgcagctgcccttccaccagcaggtgtggaagaaccccaccttcttcctgagagtgatcagcgacaccgccagcctgtgctacagcatcctgaaggccaagaacgccggcatgagcctgggcgccaagggcgccgccggccccctgcccagcgaggccgtgcagtggctgtgccaccaggccttcctgctgaagctgaccagacacagagtgacctacgtgcccctgctgggcagcctgagaaccgcccagacccagctgagcagaaagctgcccggcaccaccctgaccgccctggaggccgccgccaaccccgccctgcccagcgacttcaagaccatcctggactag

SEQ ID NO: 102109 - DNA, 2424 bp, synthetic construct; identical to SEQ ID NO: 102106
  misc_feature 1..2424: note = Description of Artificial Sequence: Synthetic coding sequence
  source 1..2424: mol_type = other DNA

SEQ ID NO: 102110 - DNA, 372 bp, synthetic construct
  misc_feature 1..372: note = Description of Artificial Sequence: Synthetic coding sequence
  source 1..372: mol_type = other DNA
atgatgctgcccaagcccggcacctactacctgccctgggaggtgagcgccggccaggtgcccgacggcagcaccctgagaaccttcggcagactgtgcctgtacgacatgatccagagcagagtgaccctgatggcccagcacggcagcgaccagcaccaggtgctggtgtgcaccaagctggtggagcccttccacgcccaggtgggcagcctgtacatcgtgctgggcgagctgcagcaccagcaggacagaggcagcgtggtgaaggccagagtgctgacctgcgtggagggcatgaacctgcccctgctggagcaggccatcagagagcagagactgtacaagcaggagagaggcggcagccagtag

SEQ ID NO: 102111 - DNA, 369 bp, synthetic construct
  misc_feature 1..369: note = Description of Artificial Sequence: Synthetic coding sequence
  source 1..369: mol_type = other DNA
atgctgcccaagcccggcacctactacctgccctgggaggtgagcgccggccaggtgcccgacggcagcaccctgagaaccttcggcagactgtgcctgtacgacatgatccagagcagagtgaccctgatggcccagcacggcagcgaccagcaccaggtgctggtgtgcaccaagctggtggagcccttccacgcccaggtgggcagcctgtacatcgtgctgggcgagctgcagcaccagcaggacagaggcagcgtggtgaaggccagagtgctgacctgcgtggagggcatgaacctgcccctgctggagcaggccatcagagagcagagactgtacaagcaggagagaggcggcagccagtag

SEQ ID NO: 102112 - DNA, 5514 bp, synthetic construct
  misc_feature 1..5514: note = Description of Artificial Sequence: Synthetic coding sequence
  source 1..5514: mol_type = other DNA
atgggcgccatgacccagctgctggccggcgtgttcctggccttcctggccctggccaccgagggcggcgtgctgaagaaggtgatcagacacaagagacagagcggcgtgaacgccaccctgcccgaggagaaccagcccgtggtgttcaaccacgtgtacaacatcaagctgcccgtgggcagccagtgcagcgtggacctggagagcgccagcggcgagaaggacctggccccccccagcgagcccagcgagagcttccaggagcacaccgtggacggcgagaaccagatcgtgttcacccacagaatcaacatccccagaagagcctgcggctgcgccgccgcccccgacgtgaaggagctgctgagcagactggaggagctggagaacctggtgagcagcctgagagagcagtgcaccgccggcgccggctgctgcctgcagcccgccaccggcagactggacaccagacccttctgcagcggcagaggcaacttcagcaccgagggctgcggctgcgtgtgcgagcccggctggaagggccccaactgcagcgagcccgagtgccccggcaactgccacctgagaggcagatgcatcgacggccagtgcatctgcgacgacggcttcaccggcgaggactgcagccagctggcctgccccagcgactgcaacgaccagggcaagtgcgtgaacggcgtgtgcatctgcttcgagggctacgccggcgccgactgcagcagagagatctgccccgtgccctgcagcgaggagcacggcacctgcgtggacggcctgtgcgtgtgccacgacggcttcgccggcgacgactgcaacaagcccctgtgcctgaacaactgctacaacagaggcagatgcgtggagaacgagtgcgtgtgcgacgagggcttcaccggcgaggactgcagcgagctgatctgccccaacgactgcttcgacagaggcagatgcatcaacggcacctgctactgcgaggagggcttcaccggcgaggactgcggcaagcccacctgcccccacgcctgccacacccagggcagatgcgaggagggccagtgcgtgtgcgacgagggcttcgccggcgtggactgcagcgagaagagatgccccgccgactgccacaacagaggcagatgcgtggacggcagatgcgagtgcgacgacggcttcaccggcgccgactgcggcgagctgaagtgccccaacggctgcagcggccacggcagatgcgtgaacggccagtgcgtgtgcgacgagggctacaccggcgaggactgcagccagctgagatgccccaacgactgccacagcagaggcagatgcgtggagggcaagtgcgtgtgcgagcagggcttcaagggctacgactgcagcgacatgagctgccccaacgactgccaccagcacggcagatgcgtgaacggcatgtgcgtgtgcgacgacggctacaccggcgaggactgcagagacagacagtgccccagagactgcagcaacagaggcctgtgcgtggacggccagtgcgtgtgcgaggacggcttcaccggccccgactgcgccgagctgagctgccccaacgactgccacggccagggcagatgcgtgaacggccagtgcgtgtgccacgagggcttcatgggcaaggactgcaaggagcagagatgccccagcgactgccacggccagggcagatgcgtggacggccagtgcatctgccacgagggcttcaccggcctggactgcggccagcacagctgccccagcgactgcaacaacctgggccagtgcgtgagcggcagatgcatctgcaacgagggctacagcggcgaggactgcagcgaggtgagcccccccaaggacctggtggtgaccgaggtgaccgaggagaccgtgaacctggcctgggacaacgagatgagagtgaccgagtacctggtggtgtacacccccacccacgagggcggcctggagatgcagttcagagtgcccggcgaccagaccagcaccatcatccaggagctggagcccggcgtggagtacttcatcagagtgttcgccatcctggagaacaagaagagcatccccgtgagcgccagagtggccacctacctgcccgcccccgagggcctgaagttcaagagcatcaaggagaccagcgtggaggtggagtgggaccccctggacatcgccttcgagacctgggagatcatcttcagaaacatgaacaaggaggacgagggcgagatcaccaagagcctgagaagacccgagaccagctacagacagaccggcctggcccccggccaggagtacgagatcagcctgcacatcgtgaagaacaacaccagaggccccggcctgaagagagtgaccaccaccagactggacgcccccagccagatcgaggtgaaggacgtgaccgacaccaccgccctgatcacctggttcaagcccctggccgagatcgacggcatcgagctgacctacggcatcaaggacgtgcccggcgacagaaccaccatcgacctgaccgaggacgagaaccagtacagcatcggcaacctgaagcccgacaccgagtacgaggtgagcctgatcagcagaagaggcgacatgagcagcaaccccgccaaggagaccttcaccaccggcctggacgcccccagaaacctgagaagagtgagccagaccgacaacagcatcaccctggagtggagaaacggcaaggccgccatcgacagctacagaatcaagtacgcccccatcagcggcggcgaccacgccgaggtggacgtgcccaagagccagcaggccaccaccaagaccaccctgaccggcctgagacccggcaccgagtacggcatcggcgtgagcgccgtgaaggaggacaaggagagcaaccccgccaccatcaacgccgccaccgagctggacacccccaaggacctgcaggtgagcgagaccgccgagaccagcctgaccctgctgtggaagacccccctggccaagttcgacagatacagactgaactacagcctgcccaccggccagtgggtgggcgtgcagctgcccagaaacaccaccagctacgtgctgagaggcctggagcccggccaggagtacaacgtgctgctgaccgccgagaagggcagacacaagagcaagcccgccagagtgaaggccagcaccgccaaggagcccgagatcggcaacctgaacgtgagcgacatcacccccgagagcttcaacctgagctggatggccaccgacggcatcttcgagaccttcaccatcgagatcatcgacagcaacagactgctggagaccgtggagtacaacatcagcggcgccgagagaaccgcccacatcagcggcctgccccccagcaccgacttcatcgtgtacctgagcggcctggcccccagcatcagaaccaagaccatcagcgccaccgccaccaccgaggccctgcccctgctggagaacctgaccatcagcgacatcaacccctacggcttcaccgtgagctggatggccagcgagaacgccttcgacagcttcctggtgaccgtggtggacagcggcaagctgctggacccccaggagttcaccctgagcggcacccagagaaagctggagctgagaggcctgatcaccggcatcggctacgaggtgatggtgagcggcttcacccagggccaccagaccaagcccctgagagccgagatcgtgaccgaggccgagcccgaggtggacaacctgctggtgagcgacgccacccccgacggcttcagactgagctggaccgccgacgagggcgtgttcgacaacttcgtgctgaagatcagagacaccaagaagcagagcgagcccctggagatcaccctgctggcccccgagagaaccagagacatcaccggcctgagagaggccaccgagtacgagatcgagctgtacggcatcagcaagggcagaagaagccagaccgtgagcgccatcgccaccaccgccatgggcagccccaaggaggtgatcttcagcgacatcaccgagaacagcgccaccgtgagctggagagcccccaccgcccaggtggagagcttcagaatcacctacgtgcccatcaccggcggcacccccagcatggtgaccgtggacggcaccaagacccagaccagactggtgaagctgatccccggcgtggagtacctggtgagcatcatcgccatgaagggcttcgaggagagcgagcccgtgagcggcagcttcaccaccgccctggacggccccagcggcctggtgaccgccaacatcaccgacagcgaggccctggccagatggcagcccgccatcgccaccgtggacagctacgtgatcagctacaccggcgagaaggtgcccgagatcaccagaaccgtgagcggcaacaccgtggagtacgccctgaccgacctggagcccgccaccgagtacaccctgagaatcttcgccgagaagggcccccagaagagcagcaccatcaccgccaagttcaccaccgacctggacagccccagagacctgaccgccaccgaggtgcagagcgagaccgccctgctgacctggagaccccccagagccagcgtgaccggctacctgctggtgtacgagagcgtggacggcaccgtgaaggaggtgatcgtgggccccgacaccaccagctacagcctggccgacctgagccccagcacccactacaccgccaagatccaggccctgaacggccccctgagaagcaacatgatccagaccatcttcaccaccatcggcctgctgtaccccttccccaaggactgcagccaggccatgctgaacggcgacaccaccagcggcctgtacaccatctacctgaacggcgacaaggccgaggccctggaggtgttctgcgacatgaccagcgacggcggcggctggatcgtgttcctgagaagaaagaacggcagagagaacttctaccagaactggaaggcctacgccgccggcttcggcgacagaagagaggagttctggctgggcctggacaacctgaacaagatcaccgcccagggccagtacgagctgagagtggacctgagagaccacggcgagaccgccttcgccgtgtacgacaagttcagcgtgggcgacgccaagaccagatacaagctgaaggtggagggctacagcggcaccgccggcgacagcatggcctaccacaacggcagaagcttcagcaccttcgacaaggacaccgacagcgccatcaccaactgcgccctgagctacaagggcgccttctggtacagaaactgccacagagtgaacctgatgggcagatacggcgacaacaaccacagccagggcgtgaactggttccactggaagggccacgagcacagcatccagttcgccgagatgaagctgagacccagcaacttcagaaacctggagggcagaagaaagagagcctag

SEQ ID NO: 102113 - DNA, 4695 bp, synthetic construct
  misc_feature 1..4695: note = Description of Artificial Sequence: Synthetic coding sequence
  source 1..4695: mol_type = other DNA
atgggcgccatgacccagctgctggccggcgtgttcctggccttcctggccctggccaccgagggcggcgtgctgaagaaggtgatcagacacaagagacagagcggcgtgaacgccaccctgcccgaggagaaccagcccgtggtgttcaaccacgtgtacaacatcaagctgcccgtgggcagccagtgcagcgtggacctggagagcgccagcggcgagaaggacctggccccccccagcgagcccagcgagagcttccaggagcacaccgtggacggcgagaaccagatcgtgttcacccacagaatcaacatccccagaagagcctgcggctgcgccgccgcccccgacgtgaaggagctgctgagcagactggaggagctggagaacctggtgagcagcctgagagagcagtgcaccgccggcgccggctgctgcctgcagcccgccaccggcagactggacaccagacccttctgcagcggcagaggcaacttcagcaccgagggctgcggctgcgtgtgcgagcccggctggaagggccccaactgcagcgagcccgagtgccccggcaactgccacctgagaggcagatgcatcgacggccagtgcatctgcgacgacggcttcaccggcgaggactgcagccagctggcctgccccagcgactgcaacgaccagggcaagtgcgtgaacggcgtgtgcatctgcttcgagggctacgccggcgccgactgcagcagagagatctgccccgtgccctgcagcgaggagcacggcacctgcgtggacggcctgtgcgtgtgccacgacggcttcgccggcgacgactgcaacaagcccctgtgcctgaacaactgctacaacagaggcagatgcgtggagaacgagtgcgtgtgcgacgagggcttcaccggcgaggactgcagcgagctgatctgccccaacgactgcttcgacagaggcagatgcatcaacggcacctgctactgcgaggagggcttcaccggcgaggactgcggcaagcccacctgcccccacgcctgccacacccagggcagatgcgaggagggccagtgcgtgtgcgacgagggcttcgccggcgtggactgcagcgagaagagatgccccgccgactgccacaacagaggcagatgcgtggacggcagatgcgagtgcgacgacggcttcaccggcgccgactgcggcgagctgaagtgccccaacggctgcagcggccacggcagatgcgtgaacggccagtgcgtgtgcgacgagggctacaccggcgaggactgcagccagctgagatgccccaacgactgccacagcagaggcagatgcgtggagggcaagtgcgtgtgcgagcagggcttcaagggctacgactgcagcgacatgagctgccccaacgactgccaccagcacggcagatgcgtgaacggcatgtgcgtgtgcgacgacggctacaccggcgaggactgcagagacagacagtgccccagagactgcagcaacagaggcctgtgcgtggacggccagtgcgtgtgcgaggacggcttcaccggccccgactgcgccgagctgagctgccccaacgactgccacggccagggcagatgcgtgaacggccagtgcgtgtgccacgagggcttcatgggcaaggactgcaaggagcagagatgccccagcgactgccacggccagggcagatgcgtggacggccagtgcatctgccacgagggcttcaccggcctggactgcggccagcacagctgccccagcgactgcaacaacctgggccagtgcgtgagcggcagatgcatctgcaacgagggctacagcggcgaggactgcagcgaggtgagcccccccaaggacctggtggtgaccgaggtgaccgaggagaccgtgaacctggcctgggacaacgagatgagagtgaccgagtacctggtggtgtacacccccacccacgagggcggcctggagatgcagttcagagtgcccggcgaccagaccagcaccatcatccaggagctggagcccggcgtggagtacttcatcagagtgttcgccatcctggagaacaagaagagcatccccgtgagcgccagagtggccacctacctgcccgcccccgagggcctgaagttcaagagcatcaaggagaccagcgtggaggtggagtgggaccccctggacatcgccttcgagacctgggagatcatcttcagaaacatgaacaaggaggacgagggcgagatcaccaagagcctgagaagacccgagaccagctacagacagaccggcctggcccccggccaggagtacgagatcagcctgcacatcgtgaagaacaacaccagaggccccggcctgaagagagtgaccaccaccagactggacgcccccagccagatcgaggtgaaggacgtgaccgacaccaccgccctgatcacctggttcaagcccctggccgagatcgacggcatcgagctgacctacggcatcaaggacgtgcccggcgacagaaccaccatcgacctgaccgaggacgagaaccagtacagcatcggcaacctgaagcccgacaccgagtacgaggtgagcctgatcagcagaagaggcgacatgagcagcaaccccgccaaggagaccttcaccaccggcctggacgcccccagaaacctgagaagagtgagccagaccgacaacagcatcaccctggagtggagaaacggcaaggccgccatcgacagctacagaatcaagtacgcccccatcagcggcggcgaccacgccgaggtggacgtgcccaagagccagcaggccaccaccaagaccaccctgaccggcctgagacccggcaccgagtacggcatcggcgtgagcgccgtgaaggaggacaaggagagcaaccccgccaccatcaacgccgccaccgagctggacacccccaaggacctgcaggtgagcgagaccgccgagaccagcctgaccctgctgtggaagacccccctggccaagttcgacagatacagactgaactacagcctgcccaccggccagtgggtgggcgtgcagctgcccagaaacaccaccagctacgtgctgagaggcctggagcccggccaggagtacaacgtgctgctgaccgccgagaagggcagacacaagagcaagcccgccagagtgaaggccagcaccgccatgggcagccccaaggaggtgatcttcagcgacatcaccgagaacagcgccaccgtgagctggagagcccccaccgcccaggtggagagcttcagaatcacctacgtgcccatcaccggcggcacccccagcatggtgaccgtggacggcaccaagacccagaccagactggtgaagctgatccccggcgtggagtacctggtgagcatcatcgccatgaagggcttcgaggagagcgagcccgtgagcggcagcttcaccaccgccctggacggccccagcggcctggtgaccgccaacatcaccgacagcgaggccctggccagatggcagcccgccatcgccaccgtggacagctacgtgatcagctacaccggcgagaaggtgcccgagatcaccagaaccgtgagcggcaacaccgtggagtacgccctgaccgacctggagcccgccaccgagtacaccctgagaatcttcgccgagaagggcccccagaagagcagcaccatcaccgccaagttcaccaccgacctggacagccccagagacctgaccgccaccgaggtgcagagcgagaccgccctgctgacctggagaccccccagagccagcgtgaccggctacctgctggtgtacgagagcgtggacggcaccgtgaaggaggtgatcgtgggccccgacaccaccagctacagcctggccgacctgagccccagcacccactacaccgccaagatccaggccctgaacggccccctgagaagcaacatgatccagaccatcttcaccaccatcggcctgctgtaccccttccccaaggactgcagccaggccatgctgaacggcgacaccaccagcggcctgtacaccatctacctgaacggcgacaaggccgaggccctggaggtgttctgcgacatgaccagcgacggcggcggctggatcgtgttcctgagaagaaagaacggcagagagaacttctaccagaactggaaggcctacgccgccggcttcggcgacagaagagaggagttctggctgggcctggacaacctgaacaagatcaccgcccagggccagtacgagctgagagtggacctgagagaccacggcgagaccgccttcgccgtgtacgacaagttcagcgtgggcgacgccaagaccagatacaagctgaaggtggagggctacagcggcaccgccggcgacagcatggcctaccacaacggcagaagcttcagcaccttcgacaaggacaccgacagcgccatcaccaactgcgccctgagctacaagggcgccttctggtacagaaactgccacagagtgaacctgatgggcagatacggcgacaacaaccacagccagggcgtgaactggttccactggaagggccacgagcacagcatccagttcgccgagatgaagctgagacccagcaacttcagaaacctggagggcagaagaaagagagcctag

SEQ ID NO: 102114 - DNA, 4968 bp, synthetic construct
  misc_feature 1..4968: note = Description of Artificial Sequence: Synthetic coding sequence
  source 1..4968: mol_type = other DNA
atgggcgccatgacccagctgctggccggcgtgttcctggccttcctggccctggccaccgagggcggcgtgctgaagaaggtgatcagacacaagagacagagcggcgtgaacgccaccctgcccgaggagaaccagcccgtggtgttcaaccacgtgtacaacatcaagctgcccgtgggcagccagtgcagcgtggacctggagagcgccagcggcgagaaggacctggccccccccagcgagcccagcgagagcttccaggagcacaccgtggacggcgagaaccagatcgtgttcacccacagaatcaacatccccagaagagcctgcggctgcgccgccgcccccgacgtgaaggagctgctgagcagactggaggagctggagaacctggtgagcagcctgagagagcagtgcaccgccggcgccggctgctgcctgcagcccgccaccggcagactggacaccagacccttctgcagcggcagaggcaacttcagcaccgagggctgcggctgcgtgtgcgagcccggctggaagggccccaactgcagcgagcccgagtgccccggcaactgccacctgagaggcagatgcatcgacggccagtgcatctgcgacgacggcttcaccggcgaggactgcagccagctggcctgccccagcgactgcaacgaccagggcaagtgcgtgaacggcgtgtgcatctgcttcgagggctacgccggcgccgactgcagcagagagatctgccccgtgccctgcagcgaggagcacggcacctgcgtggacggcctgtgcgtgtgccacgacggcttcgccggcgacgactgcaacaagcccctgtgcctgaacaactgctacaacagaggcagatgcgtggagaacgagtgcgtgtgcgacgagggcttcaccggcgaggactgcagcgagctgatctgccccaacgactgcttcgacagaggcagatgcatcaacggcacctgctactgcgaggagggcttcaccggcgaggactgcggcaagcccacctgcccccacgcctgccacacccagggcagatgcgaggagggccagtgcgtgtgcgacgagggcttcgccggcgtggactgcagcgagaagagatgccccgccgactgccacaacagaggcagatgcgtggacggcagatgcgagtgcgacgacggcttcaccggcgccgactgcggcgagctgaagtgccccaacggctgcagcggccacggcagatgcgtgaacggccagtgcgtgtgcgacgagggctacaccggcgaggactgcagccagctgagatgccccaacgactgccacagcagaggcagatgcgtggagggcaagtgcgtgtgcgagcagggcttcaagggctacgactgcagcgacatgagctgccccaacgactgccaccagcacggcagatgcgtgaacggcatgtgcgtgtgcgacgacggctacaccggcgaggactgcagagacagacagtgccccagagactgcagcaacagaggcctgtgcgtggacggccagtgcgtgtgcgaggacggcttcaccggccccgactgcgccgagctgagctgccccaacgactgccacggccagggcagatgcgtgaacggccagtgcgtgtgccacgagggcttcatgggcaaggactgcaaggagcagagatgccccagcgactgccacggccagggcagatgcgtggacggccagtgcatctgccacgagggcttcaccggcctggactgcggccagcacagctgccccagcgactgcaacaacctgggccagtgcgtgagcggcagatgcatctgcaacgagggctacagcggcgaggactgcagcgaggtgagcccccccaaggacctggtggtgaccgaggtgaccgaggagaccgtgaacctggcctgggacaacgagatgagagtgaccgagtacctggtggtgtacacccccacccacgagggcggcctggagatgcagttcagagtgcccggcgaccagaccagcaccatcatccaggagctggagcccggcgtggagtacttcatcagagtgttcgccatcctggagaacaagaagagcatccccgtgagcgccagagtggccacctacctgcccgcccccgagggcctgaagttcaagagcatcaaggagaccagcgtggaggtggagtgggaccccctggacatcgccttcgagacctgggagatcatcttcagaaacatgaacaaggaggacgagggcgagatcaccaagagcctgagaagacccgagaccagctacagacagaccggcctggcccccggccaggagtacgagatcagcctgcacatcgtgaagaacaacaccagaggccccggcctgaagagagtgaccaccaccagactggacgcccccagccagatcgaggtgaaggacgtgaccgacaccaccgccctgatcacctggttcaagcccctggccgagatcgacggcatcgagctgacctacggcatcaaggacgtgcccggcgacagaaccaccatcgacctgaccgaggacgagaaccagtacagcatcggcaacctgaagcccgacaccgagtacgaggtgagcctgatcagcagaagaggcgacatgagcagcaaccccgccaaggagaccttcaccaccggcctggacgcccccagaaacctgagaagagtgagccagaccgacaacagcatcaccctggagtggagaaacggcaaggccgccatcgacagctacagaatcaagtacgcccccatcagcggcggcgaccacgccgaggtggacgtgcccaagagccagcaggccaccaccaagaccaccctgaccggcctgagacccggcaccgagtacggcatcggcgtgagcgccgtgaaggaggacaaggagagcaaccccgccaccatcaacgccgccaccgagctggacacccccaaggacctgcaggtgagcgagaccgccgagaccagcctgaccctgctgtggaagacccccctggccaagttcgacagatacagactgaactacagcctgcccaccggccagtgggtgggcgtgcagctgcccagaaacaccaccagctacgtgctgagaggcctggagcccggccaggagtacaacgtgctgctgaccgccgagaagggcagacacaagagcaagcccgccagagtgaaggccagcaccgaggccgagcccgaggtggacaacctgctggtgagcgacgccacccccgacggcttcagactgagctggaccgccgacgagggcgtgttcgacaacttcgtgctgaagatcagagacaccaagaagcagagcgagcccctggagatcaccctgctggcccccgagagaaccagagacatcaccggcctgagagaggccaccgagtacgagatcgagctgtacggcatcagcaagggcagaagaagccagaccgtgagcgccatcgccaccaccgccatgggcagccccaaggaggtgatcttcagcgacatcaccgagaacagcgccaccgtgagctggagagcccccaccgcccaggtggagagcttcagaatcacctacgtgcccatcaccggcggcacccccagcatggtgaccgtggacggcaccaagacccagaccagactggtgaagctgatccccggcgtggagtacctggtgagcatcatcgccatgaagggcttcgaggagagcgagcccgtgagcggcagcttcaccaccgccctggacggccccagcggcctggtgaccgccaacatcaccgacagcgaggccctggccagatggcagcccgccatcgccaccgtggacagctacgtgatcagctacaccggcgagaaggtgcccgagatcaccagaaccgtgagcggcaacaccgtggagtacgccctgaccgacctggagcccgccaccgagtacaccctgagaatcttcgccgagaagggcccccagaagagcagcaccatcaccgccaagttcaccaccgacctggacagccccagagacctgaccgccaccgaggtgcagagcgagaccgccctgctgacctggagaccccccagagccagcgtgaccggctacctgctggtgtacgagagcgtggacggcaccgtgaaggaggtgatcgtgggccccgacaccaccagctacagcctggccgacctgagccccagcacccactacaccgccaagatccaggccctgaacggccccctgagaagcaacatgatccagaccatcttcaccaccatcggcctgctgtaccccttccccaaggactgcagccaggccatgctgaacggcgacaccaccagcggcctgtacaccatctacctgaacggcgacaaggccgaggccctggaggtgttctgcgacatgaccagcgacggcggcggctggatcgtgttcctgagaagaaagaacggcagagagaacttctaccagaactggaaggcctacgccgccggcttcggcgacagaagagaggagttctggctgggcctggacaacctgaacaagatcaccgcccagggccagtacgagctgagagtggacctgagagaccacggcgagaccgccttcgccgtgtacgacaagttcagcgtgggcgacgccaagaccagatacaagctgaaggtggagggctacagcggcaccgccggcgacagcatggcctaccacaacggcagaagcttcagcaccttcgacaaggacaccgacagcgccatcaccaactgcgccctgagctacaagggcgccttctggtacagaaactgccacagagtgaacctgatgggcagatacggcgacaacaaccacagccagggcgtgaactggttccactggaagggccacgagcacagcatccagttcgccgagatgaagctgagacccagcaacttcagaaacctggagggcagaagaaagagagcctag

SEQ ID NO: 102115 - DNA, 6606 bp, synthetic construct
  misc_feature 1..6606: note = Description of Artificial Sequence: Synthetic coding sequence
  source 1..6606: mol_type = other DNA
atgggcgccatgacccagctgctggccggcgtgttcctggccttcctggccctggccaccgagggcggcgtgctgaagaaggtgatcagacacaagagacagagcggcgtgaacgccaccctgcccgaggagaaccagcccgtggtgttcaaccacgtgtacaacatcaagctgcccgtgggcagccagtgcagcgtggacctggagagcgccagcggcgagaaggacctggccccccccagcgagcccagcgagagcttccaggagcacaccgtggacggcgagaaccagatcgtgttcacccacagaatcaacatccccagaagagcctgcggctgcgccgccgcccccgacgtgaaggagctgctgagcagactggaggagctggagaacctggtgagcagcctgagagagcagtgcaccgccggcgccggctgctgcctgcagcccgccaccggcagactggacaccagacccttctgcagcggcagaggcaacttcagcaccgagggctgcggctgcgtgtgcgagcccggctggaagggccccaactgcagcgagcccgagtgccccggcaactgccacctgagaggcagatgcatcgacggccagtgcatctgcgacgacggcttcaccggcgaggactgcagccagctggcctgccccagcgactgcaacgaccagggcaagtgcgtgaacggcgtgtgcatctgcttcgagggctacgccggcgccgactgcagcagagagatctgccccgtgccctgcagcgaggagcacggcacctgcgtggacggcctgtgcgtgtgccacgacggcttcgccggcgacgactgcaacaagcccctgtgcctgaacaactgctacaacagaggcagatgcgtggagaacgagtgcgtgtgcgacgagggcttcaccggcgaggactgcagcgagctgatctgccccaacgactgcttcgacagaggcagatgcatcaacggcacctgctactgcgaggagggcttcaccggcgaggactgcggcaagcccacctgcccccacgcctgccacacccagggcagatgcgaggagggccagtgcgtgtgcgacgagggcttcgccggcgtggactgcagcgagaagagatgccccgccgactgccacaacagaggcagatgcgtggacggcagatgcgagtgcgacgacggcttcaccggcgccgactgcggcgagctgaagtgccccaacggctgcagcggccacggcagatgcgtgaacggccagtgcgtgtgcgacgagggctacaccggcgaggactgcagccagctgagatgccccaacgactgccacagcagaggcagatgcgtggagggcaagtgcgtgtgcgagcagggcttcaagggctacgactgcagcgacatgagctgccccaacgactgccaccagcacggcagatgcgtgaacggcatgtgcgtgtgcgacgacggctacaccggcgaggactgcagagacagacagtgccccagagactgcagcaacagaggcctgtgcgtggacggccagtgcgtgtgcgaggacggcttcaccggccccgactgcgccgagctgagctgccccaacgactgccacggccagggcagatgcgtgaacggccagtgcgtgtgccacgagggcttcatgggcaaggactgcaaggagcagagatgccccagcgactgccacggccagggcagatgcgtggacggccagtgcatctgccacgagggcttcaccggcctggactgcggccagcacagctgccccagcgactgcaacaacctgggccagtgcgtgagcggcagatgcatctgcaacgagggctacagcggcgaggactgcagcgaggtgagcccccccaaggacctggtggtgaccgaggtgaccgaggagaccgtgaacctggcctgggacaacgagatgagagtgaccgagtacctggtggtgtacacccccacccacgagggcggcctggagatgcagttcagagtgcccggcgaccagaccagcaccatcatccaggagctggagcccggcgtggagtacttcatcagagtgttcgccatcctggagaacaagaagagcatccccgtgagcgccagagtggccacctacctgcccgcccccgagggcctgaagttcaagagcatcaaggagaccagcgtggaggtggagtgggaccccctggacatcgccttcgagacctgggagatcatcttcagaaacatgaacaaggaggacgagggcgagatcaccaagagcctgagaagacccgagaccagctacagacagaccggcctggcccccggccaggagtacgagatcagcctgcacatcgtgaagaacaacaccagaggccccggcctgaagagagtgaccaccaccagactggacgcccccagccagatcgaggtgaaggacgtgaccgacaccaccgccctgatcacctggttcaagcccctggccgagatcgacggcatcgagctgacctacggcatcaaggacgtgcccggcgacagaaccaccatcgacctgaccgaggacgagaaccagtacagcatcggcaacctgaagcccgacaccgagtacgaggtgagcctgatcagcagaagaggcgacatgagcagcaaccccgccaaggagaccttcaccaccggcctggacgcccccagaaacctgagaagagtgagccagaccgacaacagcatcaccctggagtggagaaacggcaaggccgccatcgacagctacagaatcaagtacgcccccatcagcggcggcgaccacgccgaggtggacgtgcccaagagccagcaggccaccaccaagaccaccctgaccggcctgagacccggcaccgagtacggcatcggcgtgagcgccgtgaaggaggacaaggagagcaaccccgccaccatcaacgccgccaccgagctggacacccccaaggacctgcaggtgagcgagaccgccgagaccagcctgaccctgctgtggaagacccccctggccaagttcgacagatacagactgaactacagcctgcccaccggccagtgggtgggcgtgcagctgcccagaaacaccaccagctacgtgctgagaggcctggagcccggccaggagtacaacgtgctgctgaccgccgagaagggcagacacaagagcaagcccgccagagtgaaggccagcaccgagcaggcccccgagctggagaacctgaccgtgaccgaggtgggctgggacggcctgagactgaactggaccgccgccgaccaggcctacgagcacttcatcatccaggtgcaggaggccaacaaggtggaggccgccagaaacctgaccgtgcccggcagcctgagagccgtggacatccccggcctgaaggccgccaccccctacaccgtgagcatctacggcgtgatccagggctacagaacccccgtgctgagcgccgaggccagcaccggcgagacccccaacctgggcgaggtggtggtggccgaggtgggctgggacgccctgaagctgaactggaccgcccccgagggcgcctacgagtacttcttcatccaggtgcaggaggccgacaccgtggaggccgcccagaacctgaccgtgcccggcggcctgagaagcaccgacctgcccggcctgaaggccgccacccactacaccatcaccatcagaggcgtgacccaggacttcagcaccacccccctgagcgtggaggtgctgaccgaggaggtgcccgacatgggcaacctgaccgtgaccgaggtgagctgggacgccctgagactgaactggaccacccccgacggcacctacgaccagttcaccatccaggtgcaggaggccgaccaggtggaggaggcccacaacctgaccgtgcccggcagcctgagaagcatggagatccccggcctgagagccggcaccccctacaccgtgaccctgcacggcgaggtgagaggccacagcaccagacccctggccgtggaggtggtgaccgaggacctgccccagctgggcgacctggccgtgagcgaggtgggctgggacggcctgagactgaactggaccgccgccgacaacgcctacgagcacttcgtgatccaggtgcaggaggtgaacaaggtggaggccgcccagaacctgaccctgcccggcagcctgagagccgtggacatccccggcctggaggccgccaccccctacagagtgagcatctacggcgtgatcagaggctacagaacccccgtgctgagcgccgaggccagcaccgccaaggagcccgagatcggcaacctgaacgtgagcgacatcacccccgagagcttcaacctgagctggatggccaccgacggcatcttcgagaccttcaccatcgagatcatcgacagcaacagactgctggagaccgtggagtacaacatcagcggcgccgagagaaccgcccacatcagcggcctgccccccagcaccgacttcatcgtgtacctgagcggcctggcccccagcatcagaaccaagaccatcagcgccaccgccaccaccgaggccctgcccctgctggagaacctgaccatcagcgacatcaacccctacggcttcaccgtgagctggatggccagcgagaacgccttcgacagcttcctggtgaccgtggtggacagcggcaagctgctggacccccaggagttcaccctgagcggcacccagagaaagctggagctgagaggcctgatcaccggcatcggctacgaggtgatggtgagcggcttcacccagggccaccagaccaagcccctgagagccgagatcgtgaccgaggccgagcccgaggtggacaacctgctggtgagcgacgccacccccgacggcttcagactgagctggaccgccgacgagggcgtgttcgacaacttcgtgctgaagatcagagacaccaagaagcagagcgagcccctggagatcaccctgctggcccccgagagaaccagagacatcaccggcctgagagaggccaccgagtacgagatcgagctgtacggcatcagcaagggcagaagaagccagaccgtgagcgccatcgccaccaccgccatgggcagccccaaggaggtgatcttcagcgacatcaccgagaacagcgccaccgtgagctggagagcccccaccgcccaggtggagagcttcagaatcacctacgtgcccatcaccggcggcacccccagcatggtgaccgtggacggcaccaagacccagaccagactggtgaagctgatccccggcgtggagtacctggtgagcatcatcgccatgaagggcttcgaggagagcgagcccgtgagcggcagcttcaccaccgccctggacggccccagcggcctggtgaccgccaacatcaccgacagcgaggccctggccagatggcagcccgccatcgccaccgtggacagctacgtgatcagctacaccggcgagaaggtgcccgagatcaccagaaccgtgagcggcaacaccgtggagtacgccctgaccgacctggagcccgccaccgagtacaccctgagaatcttcgccgagaagggcccccagaagagcagcaccatcaccgccaagttcaccaccgacctggacagccccagagacctgaccgccaccgaggtgcagagcgagaccgccctgctgacctggagaccccccagagccagcgtgaccggctacctgctggtgtacgagagcgtggacggcaccgtgaaggaggtgatcgtgggccccgacaccaccagctacagcctggccgacctgagccccagcacccactacaccgccaagatccaggccctgaacggccccctgagaagcaacatgatccagaccatcttcaccaccatcggcctgctgtaccccttccccaaggactgcagccaggccatgctgaacggcgacaccaccagcggcctgtacaccatctacctgaacggcgacaaggccgaggccctggaggtgttctgcgacatgaccagcgacggcggcggctggatcgtgttcctgagaagaaagaacggcagagagaacttctaccagaactggaaggcctacgccgccggcttcggcgacagaagagaggagttctggctgggcctggacaacctgaacaagatcaccgcccagggccagtacgagctgagagtggacctgagagaccacggcgagaccgccttcgccgtgtacgacaagttcagcgtgggcgacgccaagaccagatacaagctgaaggtggagggctacagcggcaccgccggcgacagcatggcctaccacaacggcagaagcttcagcaccttcgacaaggacaccgacagcgccatcaccaactgcgccctgagctacaagggcgccttctggtacagaaactgccacagagtgaacctgatgggcagatacggcgacaacaaccacagccagggcgtgaactggttccactggaagggccacgagcacagcatccagttcgccgagatgaagctgagacccagcaacttcagaaacctggagggcagaagaaagagagcctag

SEQ ID NO: 102116 - DNA, 3240 bp, synthetic construct
  misc_feature 1..3240: note = Description of Artificial Sequence: Synthetic coding sequence
  source 1..3240: mol_type = other DNA
atgggcgccatgacccagctgctggccggcgtgttcctggccttcctggccctggccaccgagggcggcgtgctgaagaaggtgatcagacacaagagacagagcggcgtgaacgccaccctgcccgaggagaaccagcccgtggtgttcaaccacgtgtacaacatcaagctgcccgtgggcagccagtgcagcgtggacctggagagcgccagcggcgagaaggacctggccccccccagcgagcccagcgagagcttccaggagcacaccgtggacggcgagaaccagatcgtgttcacccacagaatcaacatccccagaagagcctgcggctgcgccgccgcccccgacgtgaaggagctgctgagcagactggaggagctggagaacctggtgagcagcctgagagagcagtgcaccgccggcgccggctgctgcctgcagcccgccaccggcagactggacaccagacccttctgcagcggcagaggcaacttcagcaccgagggctgcggctgcgtgtgcgagcccggctggaagggccccaactgcagcgagcccgagtgccccggcaactgccacctgagaggcagatgcatcgacggccagtgcatctgcgacgacggcttcaccggcgaggactgcagccagctggcctgccccagcgactgcaacgaccagggcaagtgcgtgaacggcgtgtgcatctgcttcgagggctacgccggcgccgactgcagcagagagatctgccccgtgccctgcagcgaggagcacggcacctgcgtggacggcctgtgcgtgtgccacgacggcttcgccggcgacgactgcaacaagcccctgtgcctgaacaactgctacaacagaggcagatgcgtggagaacgagtgcgtgtgcgacgagggcttcaccggcgaggactgcagcgagctgatctgccccaacgactgcttcgacagaggcagatgcatcaacggcacctgctactgcgaggagggcttcaccggcgaggactgcggcaagcccacctgcccccacgcctgccacacccagggcagatgcgaggagggccagtgcgtgtgcgacgagggcttcgccggcgtggactgcagcgagaagagatgccccgccgactgccacaacagaggcagatgcgtggacggcagatgcgagtgcgacgacggcttcaccggcgccgactgcggcgagctgaagtgccccaacggctgcagcggccacggcagatgcgtgaacggccagtgcgtgtgcgacgagggctacaccggcgaggactgcagccagctgagatgccccaacgactgccacagcagaggcagatgcgtggagggcaagtgcgtgtgcgagcagggcttcaagggctacgactgcagcgacatgagctgccccaacgactgccaccagcacggcagatgcgtgaacggcatgtgcgtgtgcgacgacggctacaccggcgaggactgcagagacagacagtgccccagagactgcagcaacagaggcctgtgcgtggacggccagtgcgtgtgcgaggacggcttcaccggccccgactgcgccgagctgagctgccccaacgactgccacggccagggcagatgcgtgaacggccagtgcgtgtgccacgagggcttcatgggcaaggactgcaaggagcagagatgccccagcgactgccacggccagggcagatgcgtggacggccagtgcatctgccacgagggcttcaccggcctggactgcggccagcacagctgccccagcgactgcaacaacctgggccagtgcgtgagcggcagatgcatctgcaacgagggctacagcggcgaggactgcagcgaggtgagcccccccaaggacctggtggtgaccgaggtgaccgaggagaccgtgaacctggcctgggacaacgagatgagagtgaccgagtacctggtggtgtacacccccacccacgagggcggcctggagatgcagttcagagtgcccggcgaccagaccagcaccatcatccaggagctggagcccggcgtggagtacttcatcagagtgttcgccatcctggagaacaagaagagcatccccgtgagcgccagagtggccacctacctgcccgcccccgagggcctgaagttcaagagcatcaaggagaccagcgtggaggtggagtgggaccccctggacatcgccttcgagacctgggagatcatcttcagaaacatgaacaaggaggacgagggcgagatcaccaagagcctgagaagacccgagaccagctacagacagaccggcctggcccccggccaggagtacgagatcagcctgcacatcgtgaagaacaacaccagaggccccggcctgaagagagtgaccaccaccagactggacgcccccagccagatcgaggtgaaggacgtgaccgacaccaccgccctgatcacctggttcaagcccctggccgagatcgacggcatcgagctgacctacggcatcaaggacgtgcccggcgacagaaccaccatcgacctgaccgaggacgagaaccagtacagcatcggcaacctgaagcccgacaccgagtacgaggtgagcctgatcagcagaagaggcgacatgagcagcaaccccgccaaggagaccttcaccaccggcctggacgcccccagaaacctgagaagagtgagccagaccgacaacagcatcaccctggagtggagaaacggcaaggccgccatcgacagctacagaatcaagtacgcccccatcagcggcggcgaccacgccgaggtggacgtgcccaagagccagcaggccaccaccaagaccatcaccgccaagttcaccaccgacctggacagccccagagacctgaccgccaccgaggtgcagagcgagaccgccctgctgacctggagaccccccagagccagcgtgaccggctacctgctggtgtacgagagcgtggacggcaccgtgaaggaggtgatcgtgggccccgacaccaccagctacagcctggccgacctgagcccccccagcctgttcctgcacttcatccagcagaagcccgagaagcagtactgcttccacttcaaggacatgatcaacatcatcaacatcatcatgatgatgatgatgatgaagaccaaggacttcagcagagacctgagcttccagaacatcagcggccagtacctgatcgtgttcttcttctag

SEQ ID NO: 102117 - DNA, 279 bp, synthetic construct
  misc_feature 1..279: note = Description of Artificial Sequence: Synthetic coding sequence
  source 1..279: mol_type = other DNA
atgggcgccatgacccagctgctggccggcgtgttcctggccttcctggccctggccaccgagggcggcgtgctgaagaaggtgatcagacacaagagacagagcggcgtgaacgccaccctgcccgaggagaaccagcccgtggtgttcaaccacgtgtacaacatcaagctgcccgtgggcagccagtgcagcgtggacctggagagcgccagcggcgagaaggacctggccccccccagcgagcccagcgagagcttccaggagcacaccgtgtag

SEQ ID NO: 102118 - DNA, 5241 bp, synthetic construct
  misc_feature 1..5241: note = Description of Artificial Sequence: Synthetic coding sequence
  source 1..5241: mol_type = other DNA
atgggcgccatgacccagctgctggccggcgtgttcctggccttcctggccctggccaccgagggcggcgtgctgaagaaggtgatcagacacaagagacagagcggcgtgaacgccaccctgcccgaggagaaccagcccgtggtgttcaaccacgtgtacaacatcaagctgcccgtgggcagccagtgcagcgtggacctggagagcgccagcggcgagaaggacctggccccccccagcgagcccagcgagagcttccaggagcacaccgtggacggcgagaaccagatcgtgttcacccacagaatcaacatccccagaagagcctgcggctgcgccgccgcccccgacgtgaaggagctgctgagcagactggaggagctggagaacctggtgagcagcctgagagagcagtgcaccgccggcgccggctgctgcctgcagcccgccaccggcagactggacaccagacccttctgcagcggcagaggcaacttcagcaccgagggctgcggctgcgtgtgcgagcccggctggaagggccccaactgcagcgagcccgagtgccccggcaactgccacctgagaggcagatgcatcgacggccagtgcatctgcgacgacggcttcaccggcgaggactgcagccagctggcctgccccagcgactgcaacgaccagggcaagtgcgtgaacggcgtgtgcatctgcttcgagggctacgccggcgccgactgcagcagagagatctgccccgtgccctgcagcgaggagcacggcacctgcgtggacggcctgtgcgtgtgccacgacggcttcgccggcgacgactgcaacaagcccctgtgcctgaacaactgctacaacagaggcagatgcgtggagaacgagtgcgtgtgcgacgagggcttcaccggcgaggactgcagcgagctgatctgccccaacgactgcttcgacagaggcagatgcatcaacggcacctgctactgcgaggagggcttcaccggcgaggactgcggcaagcccacctgcccccacgcctgccacacccagggcagatgcgaggagggccagtgcgtgtgcgacgagggcttcgccggcgtggactgcagcgagaagagatgccccgccgactgccacaacagaggcagatgcgtggacggcagatgcgagtgcgacgacggcttcaccggcgccgactgcggcgagctgaagtgccccaacggctgcagcggccacggcagatgcgtgaacggccagtgcgtgtgcgacgagggctacaccggcgaggactgcagccagctgagatgccccaacgactgccacagcagaggcagatgcgtggagggcaagtgcgtgtgcgagcagggcttcaagggctacgactgcagcgacatgagctgccccaacgactgccaccagcacggcagatgcgtgaacggcatgtgcgtgtgcgacgacggctacaccggcgaggactgcagagacagacagtgccccagagactgcagcaacagaggcctgtgcgtggacggccagtgcgtgtgcgaggacggcttcaccggccccgactgcgccgagctgagctgccccaacgactgccacggccagggcagatgcgtgaacggccagtgcgtgtgccacgagggcttcatgggcaaggactgcaaggagcagagatgccccagcgactgccacggccagggcagatgcgtggacggccagtgcatctgccacgagggcttcaccggcctggactgcggccagcacagctgccccagcgactgcaacaacctgggccagtgcgtgagcggcagatgcatctgcaacgagggctacagcggcgaggactgcagcgaggtgagcccccccaaggacctggtggtgaccgaggtgaccgaggagaccgtgaacctggcctgggacaacgagatgagagtgaccgagtacctggtggtgtacacccccacccacgagggcggcctggagatgcagttcagagtgcccggcgaccagaccagcaccatcatccaggagctggagcccggcgtggagtacttcatcagagtgttcgccatcctggagaacaagaagagcatccccgtgagcgccagagtggccacctacctgcccgcccccgagggcctgaagttcaagagcatcaaggagaccagcgtggaggtggagtgggaccccctggacatcgccttcgagacctgggagatcatcttcagaaacatgaacaaggaggacgagggcgagatcaccaagagcctgagaagacccgagaccagctacagacagaccggcctggcccccggccaggagtacgagatcagcctgcacatcgtgaagaacaacaccagaggccccggcctgaagagagtgaccaccaccagactggacgcccccagccagatcgaggtgaaggacgtgaccgacaccaccgccctgatcacctggttcaagcccctggccgagatcgacggcatcgagctgacctacggcatcaaggacgtgcccggcgacagaaccaccatcgacctgaccgaggacgagaaccagtacagcatcggcaacctgaagcccgacaccgagtacgaggtgagcctgatcagcagaagaggcgacatgagcagcaaccccgccaaggagaccttcaccaccggcctggacgcccccagaaacctgagaagagtgagccagaccgacaacagcatcaccctggagtggagaaacggcaaggccgccatcgacagctacagaatcaagtacgcccccatcagcggcggcgaccacgccgaggtggacgtgcccaagagccagcaggccaccaccaagaccaccctgaccggcctgagacccggcaccgagtacggcatcggcgtgagcgccgtgaaggaggacaaggagagcaaccccgccaccatcaacgccgccaccgagctggacacccccaaggacctgcaggtgagcgagaccgccgagaccagcctgaccctgctgtggaagacccccctggccaagttcgacagatacagactgaactacagcctgcccaccggccagtgggtgggcgtgcagctgcccagaaacaccaccagctacgtgctgagaggcctggagcccggccaggagtacaacgtgctgctgaccgccgagaagggcagacacaagagcaagcccgccagagtgaaggccagcaccgccaaggagcccgagatcggcaacctgaacgtgagcgacatcacccccgagagcttcaacctgagctggatggccaccgacggcatcttcgagaccttcaccatcgagatcatcgacagcaacagactgctggagaccgtggagtacaacatcagcggcgccgagagaaccgcccacatcagcggcctgccccccagcaccgacttcatcgtgtacctgagcggcctggcccccagcatcagaaccaagaccatcagcgccaccgccaccaccgaggccgagcccgaggtggacaacctgctggtgagcgacgccacccccgacggcttcagactgagctggaccgccgacgagggcgtgttcgacaacttcgtgctgaagatcagagacaccaagaagcagagcgagcccctggagatcaccctgctggcccccgagagaaccagagacatcaccggcctgagagaggccaccgagtacgagatcgagctgtacggcatcagcaagggcagaagaagccagaccgtgagcgccatcgccaccaccgccatgggcagccccaaggaggtgatcttcagcgacatcaccgagaacagcgccaccgtgagctggagagcccccaccgcccaggtggagagcttcagaatcacctacgtgcccatcaccggcggcacccccagcatggtgaccgtggacggcaccaagacccagaccagactggtgaagctgatccccggcgtggagtacctggtgagcatcatcgccatgaagggcttcgaggagagcgagcccgtgagcggcagcttcaccaccgccctggacggccccagcggcctggtgaccgccaacatcaccgacagcgaggccctggccagatggcagcccgccatcgccaccgtggacagctacgtgatcagctacaccggcgagaaggtgcccgagatcaccagaaccgtgagcggcaacaccgtggagtacgccctgaccgacctggagcccgccaccgagtacaccctgagaatcttcgccgagaagggcccccagaagagcagcaccatcaccgccaagttcaccaccgacctggacagccccagagacctgaccgccaccgaggtgcagagcgagaccgccctgctgacctggagaccccccagagccagcgtgaccggctacctgctggtgtacgagagcgtggacggcaccgtgaaggaggtgatcgtgggccccgacaccaccagctacagcctggccgacctgagccccagcacccactacaccgccaagatccaggccctgaacggccccctgagaagcaacatgatccagaccatcttcaccaccatcggcctgctgtaccccttccccaaggactgcagccaggccatgctgaacggcgacaccaccagcggcctgtacaccatctacctgaacggcgacaaggccgaggccctggaggtgttctgcgacatgaccagcgacggcggcggctggatcgtgttcctgagaagaaagaacggcagagagaacttctaccagaactggaaggcctacgccgccggcttcggcgacagaagagaggagttctggctgggcctggacaacctgaacaagatcaccgcccagggccagtacgagctgagagtggacctgagagaccacggcgagaccgccttcgccgtgtacgacaagttcagcgtgggcgacgccaagaccagatacaagctgaaggtggagggctacagcggcaccgccggcgacagcatggcctaccacaacggcagaagcttcagcaccttcgacaaggacaccgacagcgccatcaccaactgcgccctgagctacaagggcgccttctggtacagaaactgccacagagtgaacctgatgggcagatacggcgacaacaaccacagccagggcgtgaactggttccactggaagggccacgagcacagcatccagttcgccgagatgaagctgagacccagcaacttcagaaacctggagggcagaagaaagagagcctag

SEQ ID NO: 102119 - DNA, 5517 bp, synthetic construct
  misc_feature 1..5517: note = Description of Artificial Sequence: Synthetic coding sequence
  source 1..5517: mol_type = other DNA
atgggcgccatgacccagctgctggccggcgtgttcctggccttcctggccctggccaccgagggcggcgtgctgaagaaggtgatcagacacaagagacagagcggcgtgaacgccaccctgcccgaggagaaccagcccgtggtgttcaaccacgtgtacaacatcaagctgcccgtgggcagccagtgcagcgtggacctggagagcgccagcggcgagaaggacctggccccccccagcgagcccagcgagagcttccaggagcacaccgtggacggcgagaaccagatcgtgttcacccacagaatcaacatccccagaagagcctgcggctgcgccgccgcccccgacgtgaaggagctgctgagcagactggaggagctggagaacctggtgagcagcctgagagagcagtgcaccgccggcgccggctgctgcctgcagcccgccaccggcagactggacaccagacccttctgcagcggcagaggcaacttcagcaccgagggctgcggctgcgtgtgcgagcccggctggaagggccccaactgcagcgagcccgagtgccccggcaactgccacctgagaggcagatgcatcgacggccagtgcatctgcgacgacggcttcaccggcgaggactgcagccagctggcctgccccagcgactgcaacgaccagggcaagtgcgtgaacggcgtgtgcatctgcttcgagggctacgccggcgccgactgcagcagagagatctgccccgtgccctgcagcgaggagcacggcacctgcgtggacggcctgtgcgtgtgccacgacggcttcgccggcgacgactgcaacaagcccctgtgcctgaacaactgctacaacagaggcagatgcgtggagaacgagtgcgtgtgcgacgagggcttcaccggcgaggactgcagcgagctgatctgccccaacgactgcttcgacagaggcagatgcatcaacggcacctgctactgcgaggagggcttcaccggcgaggactgcggcaagcccacctgcccccacgcctgccacacccagggcagatgcgaggagggccagtgcgtgtgcgacgagggcttcgccggcgtggactgcagcgagaagagatgccccgccgactgccacaacagaggcagatgcgtggacggcagatgcgagtgcgacgacggcttcaccggcgccgactgcggcgagctgaagtgccccaacggctgcagcggccacggcagatgcgtgaacggccagtgcgtgtgcgacgagggctacaccggcgaggactgcagccagctgagatgccccaacgactgccacagcagaggcagatgcgtggagggcaagtgcgtgtgcgagcagggcttcaagggctacgactgcagcgacatgagctgccccaacgactgccaccagcacggcagatgcgtgaacggcatgtgcgtgtgcgacgacggctacaccggcgaggactgcagagacagacagtgccccagagactgcagcaacagaggcctgtgcgtggacggccagtgcgtgtgcgaggacggcttcaccggccccgactgcgccgagctgagctgccccaacgactgccacggccagggcagatgcgtgaacggccagtgcgtgtgccacgagggcttcatgggcaaggactgcaaggagcagagatgccccagcgactgccacggccagggcagatgcgtggacggccagtgcatctgccacgagggcttcaccggcctggactgcggccagcacagctgccccagcgactgcaacaacctgggccagtgcgtgagcggcagatgcatctgcaacgagggctacagcggcgaggactgcagcgaggtgagcccccccaaggacctggtggtgaccgaggtgaccgaggagaccgtgaacctggcctgggacaacgagatgagagtgaccgagtacctggtggtgtacacccccacccacgagggcggcctggagatgcagttcagagtgcccggcgaccagaccagcaccatcatccaggagctggagcccggcgtggagtacttcatcagagtgttcgccatcctggagaacaagaagagcatccccgtgagcgccagagtggccacctacctgcccgcccccgagggcctgaagttcaagagcatcaaggagaccagcgtggaggtggagtgggaccccctggacatcgccttcgagacctgggagatcatcttcagaaacatgaacaaggaggacgagggcgagatcaccaagagcctgagaagacccgagaccagctacagacagaccggcctggcccccggccaggagtacgagatcagcctgcacatcgtgaagaacaacaccagaggccccggcctgaagagagtgaccaccaccagactggacgcccccagccagatcgaggtgaaggacgtgaccgacaccaccgccctgatcacctggttcaagcccctggccgagatcgacggcatcgagctgacctacggcatcaaggacgtgcccggcgacagaaccaccatcgacctgaccgaggacgagaaccagtacagcatcggcaacctgaagcccgacaccgagtacgaggtgagcctgatcagcagaagaggcgacatgagcagcaaccccgccaaggagaccttcaccaccggcctggacgcccccagaaacctgagaagagtgagccagaccgacaacagcatcaccctggagtggagaaacggcaaggccgccatcgacagctacagaatcaagtacgcccccatcagcggcggcgaccacgccgaggtggacgtgcccaagagccagcaggccaccaccaagaccaccctgaccggcctgagacccggcaccgagtacggcatcggcgtgagcgccgtgaaggaggacaaggagagcaaccccgccaccatcaacgccgccaccgagctggacacccccaaggacctgcaggtgagcgagaccgccgagaccagcctgaccctgctgtggaagacccccctggccaagttcgacagatacagactgaactacagcctgcccaccggccagtgggtgggcgtgcagctgcccagaaacaccaccagctacgtgctgagaggcctggagcccggccaggagtacaacgtgctgctgaccgccgagaagggcagacacaagagcaagcccgccagagtgaaggccagcaccgccaaggagcccgagatcggcaacctgaacgtgagcgacatcacccccgagagcttcaacctgagctggatggccaccgacggcatcttcgagaccttcaccatcgagatcatcgacagcaacagactgctggagaccgtggagtacaacatcagcggcgccgagagaaccgcccacatcagcggcctgccccccagcaccgacttcatcgtgtacctgagcggcctggcccccagcatcagaaccaagaccatcagcgccaccgccaccaccgagcccaagccccagctgggcaccctgatcttcagcaacatcacccccaagagcttcaacatgagctggaccacccaggccggcctgttcgccaagatcgtgatcaacgtgagcgacgcccacagcctgcacgagagccagcagttcaccgtgagcggcgacgccaagcaggcccacatcaccggcctggtggagaacaccggctacgacgtgagcgtggccggcaccaccctggccggcgaccccaccagacccctgaccgccttcgtgatcaccgaggccgagcccgaggtggacaacctgctggtgagcgacgccacccccgacggcttcagactgagctggaccgccgacgagggcgtgttcgacaacttcgtgctgaagatcagagacaccaagaagcagagcgagcccctggagatcaccctgctggcccccgagagaaccagagacatcaccggcctgagagaggccaccgagtacgagatcgagctgtacggcatcagcaagggcagaagaagccagaccgtgagcgccatcgccaccaccgccatgggcagccccaaggaggtgatcttcagcgacatcaccgagaacagcgccaccgtgagctggagagcccccaccgcccaggtggagagcttcagaatcacctacgtgcccatcaccggcggcacccccagcatggtgaccgtggacggcaccaagacccagaccagactggtgaagctgatccccggcgtggagtacctggtgagcatcatcgccatgaagggcttcgaggagagcgagcccgtgagcggcagcttcaccaccgccctggacggccccagcggcctggtgaccgccaacatcaccgacagcgaggccctggccagatggcagcccgccatcgccaccgtggacagctacgtgatcagctacaccggcgagaaggtgcccgagatcaccagaaccgtgagcggcaacaccgtggagtacgccctgaccgacctggagcccgccaccgagtacaccctgagaatcttcgccgagaagggcccccagaagagcagcaccatcaccgccaagttcaccaccgacctggacagccccagagacctgaccgccaccgaggtgcagagcgagaccgccctgctgacctggagaccccccagagccagcgtgaccggctacctgctggtgtacgagagcgtggacggcaccgtgaaggaggtgatcgtgggccccgacaccaccagctacagcctggccgacctgagccccagcacccactacaccgccaagatccaggccctgaacggccccctgagaagcaacatgatccagaccatcttcaccaccatcggcctgctgtaccccttccccaaggactgcagccaggccatgctgaacggcgacaccaccagcggcctgtacaccatctacctgaacggcgacaaggccgaggccctggaggtgttctgcgacatgaccagcgacggcggcggctggatcgtgttcctgagaagaaagaacggcagagagaacttctaccagaactggaaggcctacgccgccggcttcggcgacagaagagaggagttctggctgggcctggacaacctgaacaagatcaccgcccagggccagtacgagctgagagtggacctgagagaccacggcgagaccgccttcgccgtgtacgacaagttcagcgtgggcgacgccaagaccagatacaagctgaaggtggagggctacagcggcaccgccggcgacagcatggcctaccacaacggcagaagcttcagcaccttcgacaaggacaccgacagcgccatcaccaactgcgccctgagctacaagggcgccttctggtacagaaactgccacagagtgaacctgatgggcagatacggcgacaacaaccacagccagggcgtgaactggttccactggaagggccacgagcacagcatccagttcgccgagatgaagctgagacccagcaacttcagaaacctggagggcagaagaaagagagcctag

SEQ ID NO: 102120 - DNA, 4077 bp, synthetic construct
  misc_feature 1..4077: note = Description of Artificial Sequence: Synthetic coding sequence
  source 1..4077: mol_type = other DNA
atgggcgccgacggcgagaccgtggtgctgaagaacatgctgatcggcatcaacctgatcctgctgggcagcatgatcaagcccagcgagtgccagctggaggtgaccaccgagagagtgcagagacagagcgtggaggaggagggcggcatcgccaactacaacaccagcagcaaggagcagcccgtggtgttcaaccacgtgtacaacatcaacgtgcccctggacaacctgtgcagcagcggcctggaggccagcgccgagcaggaggtgagcgccgaggacgagaccctggccgagtacatgggccagaccagcgaccacgagagccaggtgaccttcacccacagaatcaacttccccaagaaggcctgcccctgcgccagcagcgcccaggtgctgcaggagctgctgagcagaatcgagatgctggagagagaggtgagcgtgctgagagaccagtgcaacgccaactgctgccaggagagcgccgccaccggccagctggactacatcccccactgcagcggccacggcaacttcagcttcgagagctgcggctgcatctgcaacgagggctggttcggcaagaactgcagcgagccctactgccccctgggctgcagcagcagaggcgtgtgcgtggacggccagtgcatctgcgacagcgagtacagcggcgacgactgcagcgagctgagatgccccaccgactgcagcagcagaggcctgtgcgtggacggcgagtgcgtgtgcgaggagccctacaccggcgaggactgcagagagctgagatgccccggcgactgcagcggcaagggcagatgcgccaacggcacctgcctgtgcgaggagggctacgtgggcgaggactgcggccagagacagtgcctgaacgcctgcagcggcagaggccagtgcgaggagggcctgtgcgtgtgcgaggagggctaccagggccccgactgcagcgccgtggccccccccgaggacctgagagtggccggcatcagcgacagaagcatcgagctggagtgggacggccccatggccgtgaccgagtacgtgatcagctaccagcccaccgccctgggcggcctgcagctgcagcagagagtgcccggcgactggagcggcgtgaccatcaccgagctggagcccggcctgacctacaacatcagcgtgtacgccgtgatcagcaacatcctgagcctgcccatcaccgccaaggtggccacccacctgagcaccccccagggcctgcagttcaagaccatcaccgagaccaccgtggaggtgcagtgggagcccttcagcttcagcttcgacggctgggagatcagcttcatccccaagaacaacgagggcggcgtgatcgcccaggtgcccagcgacgtgaccagcttcaaccagaccggcctgaagcccggcgaggagtacatcgtgaacgtggtggccctgaaggagcaggccagaagcccccccaccagcgccagcgtgagcaccgtgatcgacggccccacccagatcctggtgagagacgtgagcgacaccgtggccttcgtggagtggatcccccccagagccaaggtggacttcatcctgctgaagtacggcctggtgggcggcgagggcggcagaaccaccttcagactgcagccccccctgagccagtacagcgtgcaggccctgagacccggcagcagatacgaggtgagcgtgagcgccgtgagaggcaccaacgagagcgacagcgccaccacccagttcaccaccgagatcgacgcccccaagaacctgagagtgggcagcagaaccgccaccagcctggacctggagtgggacaacagcgaggccgaggtgcaggagtacaaggtggtgtacagcaccctggccggcgagcagtaccacgaggtgctggtgcccagaggcatcggccccaccaccagagccaccctgaccgacctggtgcccggcaccgagtacggcgtgggcatcagcgccgtgatgaacagccagcagagcgtgcccgccaccatgaacgccagaaccgagctggacagccccagagacctgatggtgaccgccagcagcgagaccagcatcagcctgatctggaccaaggccagcggccccatcgaccactacagaatcaccttcacccccagcagcggcatcgccagcgaggtgaccgtgcccaaggacagaaccagctacaccctgaccgacctggagcccggcgccgagtacatcatcagcgtgaccgccgagagaggcagacagcagagcctggagagcaccgtggacgccttcaccggcttcagacccatcagccacctgcacttcagccacgtgaccagcagcagcgtgaacatcacctggagcgaccccagcccccccgccgacagactgatcctgaactacagccccagagacgaggaggaggagatgatggaggtgagcctggacgccaccaagagacacgccgtgctgatgggcctgcagcccgccaccgagtacatcgtgaacctggtggccgtgcacggcaccgtgaccagcgagcccatcgtgggcagcatcaccaccggcatcgacccccccaaggacatcaccatcagcaacgtgaccaaggacagcgtgatggtgagctggagcccccccgtggccagcttcgactactacagagtgagctacagacccacccaggtgggcagactggacagcagcgtggtgcccaacaccgtgaccgagttcaccatcaccagactgaaccccgccaccgagtacgagatcagcctgaacagcgtgagaggcagagaggagagcgagagaatctgcaccctggtgcacaccgccatggacaaccccgtggacctgatcgccaccaacatcacccccaccgaggccctgctgcagtggaaggcccccgtgggcgaggtggagaactacgtgatcgtgctgacccacttcgccgtggccggcgagaccatcctggtggacggcgtgagcgaggagttcagactggtggacctgctgcccagcacccactacaccgccaccatgtacgccaccaacggccccctgaccagcggcaccatcagcaccaacttcagcaccctgctggacccccccgccaacctgaccgccagcgaggtgaccagacagagcgccctgatcagctggcagccccccagagccgagatcgagaactacgtgctgacctacaagagcaccgacggcagcagaaaggagctgatcgtggacgccgaggacacctggatcagactggagggcctgctggagaacaccgactacaccgtgctgctgcaggccgcccaggacaccacctggagcagcatcaccagcaccgccttcaccaccggcggcagagtgttcccccacccccaggactgcgcccagcacctgatgaacggcgacaccctgagcggcgtgtaccccatcttcctgaacggcgagctgagccagaagctgcaggtgtactgcgacatgaccaccgacggcggcggctggatcgtgttccagagaagacagaacggccagaccgacttcttcagaaagtgggccgactacagagtgggcttcggcaacgtggaggacgagttctggctgggcctggacaacatccacagaatcaccagccagggcagatacgagctgagagtggacatgagagacggccaggaggccgccttcgccagctacgacagattcagcgtggaggacagcagaaacctgtacaagctgagaatcggcagctacaacggcaccgccggcgacagcctgagctaccaccagggcagacccttcagcaccgaggacagagacaacgacgtggccgtgaccaactgcgccatgagctacaagggcgcctggtggtacaagaactgccacagaaccaacctgaacggcaagtacggcgagagcagacacagccagggcatcaactggtaccactggaagggccacgagttcagcatccccttcgtggagatgaagatgagaccctacaaccacagactgatggccggcagaaagagacagagcctgcagttctag

SEQ ID NO: 102121 - DNA, 3807 bp, synthetic construct
  misc_feature 1..3807: note = Description of Artificial Sequence: Synthetic coding sequence
  source 1..3807: mol_type = other DNA
atgggcgccgacggcgagaccgtggtgctgaagaacatgctgatcggcatcaacctgatcctgctgggcagcatgatcaagcccagcgagtgccagctggaggtgaccaccgagagagtgcagagacagagcgtggaggaggagggcggcatcgccaactacaacaccagcagcaaggagcagcccgtggtgttcaaccacgtgtacaacatcaacgtgcccctggacaacctgtgcagcagcggcctggaggccagcgccgagcaggaggtgagcgccgaggacgagaccctggccgagtacatgggccagaccagcgaccacgagagccaggtgaccttcacccacagaatcaacttccccaagaaggcctgcccctgcgccagcagcgcccaggtgctgcaggagctgctgagcagaatcgagatgctggagagagaggtgagcgtgctgagagaccagtgcaacgccaactgctgccaggagagcgccgccaccggccagctggactacatcccccactgcagcggccacggcaacttcagcttcgagagctgcggctgcatctgcaacgagggctggttcggcaagaactgcagcgagccctactgccccctgggctgcagcagcagaggcgtgtgcgtggacggccagtgcatctgcgacagcgagtacagcggcgacgactgcagcgagctgagatgccccaccgactgcagcagcagaggcctgtgcgtggacggcgagtgcgtgtgcgaggagccctacaccggcgaggactgcagagagctgagatgccccggcgactgcagcggcaagggcagatgcgccaacggcacctgcctgtgcgaggagggctacgtgggcgaggactgcggccagagacagtgcctgaacgcctgcagcggcagaggccagtgcgaggagggcctgtgcgtgtgcgaggagggctaccagggccccgactgcagcgccgtggccccccccgaggacctgagagtggccggcatcagcgacagaagcatcgagctggagtgggacggccccatggccgtgaccgagtacgtgatcagctaccagcccaccgccctgggcggcctgcagctgcagcagagagtgcccggcgactggagcggcgtgaccatcaccgagctggagcccggcctgacctacaacatcagcgtgtacgccgtgatcagcaacatcctgagcctgcccatcaccgccaaggtggccacccacctgagcaccccccagggcctgcagttcaagaccatcaccgagaccaccgtggaggtgcagtgggagcccttcagcttcagcttcgacggctgggagatcagcttcatccccaagaacaacgagggcggcgtgatcgcccaggtgcccagcgacgtgaccagcttcaaccagaccggcctgaagcccggcgaggagtacatcgtgaacgtggtggccctgaaggagcaggccagaagcccccccaccagcgccagcgtgagcaccgtgatcgacggccccacccagatcctggtgagagacgtgagcgacaccgtggccttcgtggagtggatcccccccagagccaaggtggacttcatcctgctgaagtacggcctggtgggcggcgagggcggcagaaccaccttcagactgcagccccccctgagccagtacagcgtgcaggccctgagacccggcagcagatacgaggtgagcgtgagcgccgtgagaggcaccaacgagagcgacagcgccaccacccagttcaccaccgagatcgacgcccccaagaacctgagagtgggcagcagaaccgccaccagcctggacctggagtgggacaacagcgaggccgaggtgcaggagtacaaggtggtgtacagcaccctggccggcgagcagtaccacgaggtgctggtgcccagaggcatcggccccaccaccagagccaccctgaccgacctggtgcccggcaccgagtacggcgtgggcatcagcgccgtgatgaacagccagcagagcgtgcccgccaccatgaacgccagaaccgagctggacagccccagagacctgatggtgaccgccagcagcgagaccagcatcagcctgatctggaccaaggccagcggccccatcgaccactacagaatcaccttcacccccagcagcggcatcgccagcgaggtgaccgtgcccaaggacagaaccagctacaccctgaccgacctggagcccggcgccgagtacatcatcagcgtgaccgccgagagaggcagacagcagagcctggagagcaccgtggacgccttcaccggcatcgacccccccaaggacatcaccatcagcaacgtgaccaaggacagcgtgatggtgagctggagcccccccgtggccagcttcgactactacagagtgagctacagacccacccaggtgggcagactggacagcagcgtggtgcccaacaccgtgaccgagttcaccatcaccagactgaaccccgccaccgagtacgagatcagcctgaacagcgtgagaggcagagaggagagcgagagaatctgcaccctggtgcacaccgccatggacaaccccgtggacctgatcgccaccaacatcacccccaccgaggccctgctgcagtggaaggcccccgtgggcgaggtggagaactacgtgatcgtgctgacccacttcgccgtggccggcgagaccatcctggtggacggcgtgagcgaggagttcagactggtggacctgctgcccagcacccactacaccgccaccatgtacgccaccaacggccccctgaccagcggcaccatcagcaccaacttcagcaccctgctggacccccccgccaacctgaccgccagcgaggtgaccagacagagcgccctgatcagctggcagccccccagagccgagatcgagaactacgtgctgacctacaagagcaccgacggcagcagaaaggagctgatcgtggacgccgaggacacctggatcagactggagggcctgctggagaacaccgactacaccgtgctgctgcaggccgcccaggacaccacctggagcagcatcaccagcaccgccttcaccaccggcggcagagtgttcccccacccccaggactgcgcccagcacctgatgaacggcgacaccctgagcggcgtgtaccccatcttcctgaacggcgagctgagccagaagctgcaggtgtactgcgacatgaccaccgacggcggcggctggatcgtgttccagagaagacagaacggccagaccgacttcttcagaaagtgggccgactacagagtgggcttcggcaacgtggaggacgagttctggctgggcctggacaacatccacagaatcaccagccagggcagatacgagctgagagtggacatgagagacggccaggaggccgccttcgccagctacgacagattcagcgtggaggacagcagaaacctgtacaagctgagaatcggcagctacaacggcaccgccggcgacagcctgagctaccaccagggcagacccttcagcaccgaggacagagacaacgacgtggccgtgaccaactgcgccatgagctacaagggcgcctggtggtacaagaactgccacagaaccaacctgaacggcaagtacggcgagagcagacacagccagggcatcaactggtaccactggaagggccacgagttcagcatccccttcgtggagatgaagatgagaccctacaaccacagactgatggccggcagaaagagacagagcctgcagttctag

SEQ ID NO: 102122 - DNA, 4077 bp, synthetic construct; identical to SEQ ID NO: 102120
  misc_feature 1..4077: note = Description of Artificial Sequence: Synthetic coding sequence
  source 1..4077: mol_type = other DNA

SEQ ID NO: 102123 - DNA, 534 bp, synthetic construct
  misc_feature 1..534: note = Description of Artificial Sequence: Synthetic coding sequence
  source 1..534: mol_type = other DNA
tgaatcaacttccccaagaaggcctgcccctgcgccagcagcgcccaggtgctgcaggagctgctgagcagaatcgagatgctggagagagaggtgagcgtgctgagagaccagtgcaacgccaactgctgccaggagagcgccgccaccgtggccccccccgaggacctgagagtggccggcatcagcgacagaagcatcgagctggagtgggacggccccatggccgtgaccgagtacgtgatcagctaccagcccaccgccctgggcggcctgcagctgcagcagagagtgcccggcgactggagcggcgtgaccatcaccgagctggagcccggcctgacctacaacatcagcgtgtacgccgtgatcagcaacatcctgagcctgcccatcaccgccaaggtggccacccacctgagcaccccccagggcctgcagttcaagaccatcaccgagaccaccgtggaggtgcagtgggagcccttcagcttcagcttcgacggctgggagatcagcttcatccccaagtag

SEQ ID NO: 102124 - DNA, 12669 bp, synthetic construct
  misc_feature 1..12669: note = Description of Artificial Sequence: Synthetic coding sequence
  source 1..12669: mol_type = other DNA
atgatgcccgcccagtacgccctgaccagcagcctggtgctgctggtgctgctgagcaccgccagagccggccccttcagcagcagaagcaacgtgaccctgcccgcccccagaccccccccccagcccggcggccacaccgtgggcgccggcgtgggcagccccagcagccagctgtacgagcacaccgtggagggcggcgagaagcaggtggtgttcacccacagaatcaacctgccccccagcaccggctgcggctgcccccccggcaccgagccccccgtgctggccagcgaggtgcaggccctgagagtgagactggagatcctggaggagctggtgaagggcctgaaggagcagtgcaccggcggctgctgccccgccagcgcccaggccggcaccggccagaccgacgtgagaaccctgtgcagcctgcacggcgtgttcgacctgagcagatgcacctgcagctgcgagcccggctggggcggccccacctgcagcgaccccaccgacgccgagatcccccccagcagcccccccagcgccagcggcagctgccccgacgactgcaacgaccagggcagatgcgtgagaggcagatgcgtgtgcttccccggctacaccggccccagctgcggctggcccagctgccccggcgactgccagggcagaggcagatgcgtgcagggcgtgtgcgtgtgcagagccggcttcagcggccccgactgcagccagagaagctgccccagaggctgcagccagagaggcagatgcgagggcggcagatgcgtgtgcgaccccggctacaccggcgacgactgcggcatgagaagctgccccagaggctgcagccagagaggcagatgcgagaacggcagatgcgtgtgcaaccccggctacgccggcgaggactgcggcgtgagaagctgccccagaggctgcagccagagaggcagatgcaaggacggcagatgcgtgtgcgaccccggctacaccggcgaggactgcggcaccagaagctgcccctgggactgcggcgagggcggcagatgcgtggacggcagatgcgtgtgctggcccggctacaccggcgaggactgcagcaccagaacctgccccagagactgcagaggcagaggcagatgcgaggacggcgagtgcatctgcgacaccggctacagcggcgacgactgcggcgtgagaagctgccccggcgactgcaaccagagaggcagatgcgaggacggcagatgcgtgtgctggcccggctacaccggcaccgactgcggcagcagagcctgccccagagactgcagaggcagaggcagatgcgagaacggcgtgtgcgtgtgcaacgccggctacagcggcgaggactgcggcgtgagaagctgccccggcgactgcagaggcagaggcagatgcgagagcggcagatgcatgtgctggcccggctacaccggcagagactgcggcaccagagcctgccccggcgactgcagaggcagaggcagatgcgtggacggcagatgcgtgtgcaaccccggcttcaccggcgaggactgcggcagcagaagatgccccggcgactgcagaggccacggcctgtgcgaggacggcgtgtgcgtgtgcgacgccggctacagcggcgaggactgcagcaccagaagctgccccggcggctgcagaggcagaggccagtgcctggacggcagatgcgtgtgcgaggacggctacagcggcgaggactgcggcgtgagacagtgccccaacgactgcagccagcacggcgtgtgccaggacggcgtgtgcatctgctgggagggctacgtgagcgaggactgcagcatcagaacctgccccagcaactgccacggcagaggcagatgcgaggagggcagatgcctgtgcgaccccggctacaccggccccacctgcgccaccagaatgtgccccgccgactgcagaggcagaggcagatgcgtgcagggcgtgtgcctgtgccacgtgggctacggcggcgaggactgcggccaggaggagccccccgccagcgcctgccccggcggctgcggccccagagagctgtgcagagccggccagtgcgtgtgcgtggagggcttcagaggccccgactgcgccatccagacctgccccggcgactgcagaggcagaggcgagtgccacgacggcagctgcgtgtgcaaggacggctacgccggcgaggactgcggcgaggaggtgcccaccatcgagggcatgagaatgcacctgctggaggagaccaccgtgagaaccgagtggacccccgcccccggccccgtggacgcctacgagatccagttcatccccaccaccgagggcgccagcccccccttcaccgccagagtgcccagcagcgccagcgcctacgaccagagaggcctggcccccggccaggagtaccaggtgaccgtgagagccctgagaggcaccagctggggcctgcccgccagcaagaccatcaccaccatgatcgacggcccccaggacctgagagtggtggccgtgacccccaccaccctggagctgggctggctgagaccccaggccgaggtggacagattcgtggtgagctacgtgagcgccggcaaccagagagtgagactggaggtgccccccgaggccgacggcaccctgctgaccgacctgatgcccggcgtggagtacgtggtgaccgtgaccgccgagagaggcagagccgtgagctaccccgccagcgtgagagccaacaccggcagcagccccctgggcctgctgggcaccaccgacgagcccccccccagcggccccagcaccacccagggcgcccaggcccccctgctgcagcagagaccccaggagctgggcgagctgagagtgctgggcagagacgagaccggcagactgagagtggtgtggaccgcccagcccgacaccttcgcctacttccagctgagaatgagagtgcccgagggccccggcgcccacgaggaggtgctgcccggcgacgtgagacaggccctggtgcccccccccccccccggcaccccctacgagctgagcctgcacggcgtgccccccggcggcaagcccagcgaccccatcatctaccagggcatcatggacaaggacgaggagaagcccggcaagagcagcggcccccccagactgggcgagctgaccgtgaccgacagaaccagcgacagcctgctgctgagatggaccgtgcccgagggcgagttcgacagcttcgtgatccagtacaaggacagagacggccagccccaggtggtgcccgtggagggcccccagagaagcgccgtgatcaccagcctggaccccggcagaaagtacaagttcgtgctgtacggcttcgtgggcaagaagagacacggccccctggtggccgaggccaagatcctgccccagagcgaccccagccccggcacccccccccacctgggcaacctgtgggtgaccgaccccacccccgacagcctgcacctgagctggaccgtgcccgagggccagttcgacaccttcatggtgcagtacagagacagagacggcagaccccaggtggtgcccgtggagggccccgagagaagcttcgtggtgagcagcctggaccccgaccacaagtacagattcaccctgttcggcatcgccaacaagaagagatacggccccctgaccgccgacggcaccaccgcccccgagagaaaggaggagccccccagacccgagttcctggagcagcccctgctgggcgagctgaccgtgaccggcgtgacccccgacagcctgagactgagctggaccgtggcccagggccccttcgacagcttcatggtgcagtacaaggacgcccagggccagccccaggccgtgcccgtggccggcgacgagaacgaggtgaccgtgcccggcctggaccccgacagaaagtacaagatgaacctgtacggcctgagaggcagacagagagtgggccccgagagcgtggtggccaagaccgccccccaggaggacgtggacgagacccccagccccaccgagctgggcaccgaggcccccgagagccccgaggagcccctgctgggcgagctgaccgtgaccggcagcagccccgacagcctgagcctgttctggaccgtgccccagggcagcttcgacagcttcaccgtgcagtacaaggacagagacggcagacccagagccgtgagagtgggcggcaaggagagcgaggtgaccgtgggcggcctggagcccggccacaagtacaagatgcacctgtacggcctgcacgagggccagagagtgggccccgtgagcgccgtgggcgtgaccgccccccagcaggaggagaccccccccgccaccgagagccccctggagcccagactgggcgagctgaccgtgaccgacgtgacccccaacagcgtgggcctgagctggaccgtgcccgagggccagttcgacagcttcatcgtgcagtacaaggacaaggacggccagccccaggtggtgcccgtggccgccgaccagagagaggtgaccgtgtacaacctggagcccgagagaaagtacaagatgaacatgtacggcctgcacgacggccagagaatgggccccctgagcgtggtgatcgtgaccgcccccctgccccccgcccccgccaccgaggccagcaagccccccctggagcccagactgggcgagctgaccgtgaccgacatcacccccgacagcgtgggcctgagctggaccgtgcccgagggcgagttcgacagcttcgtggtgcagtacaaggacagagacggccagccccaggtggtgcccgtggccgccgaccagagagaggtgaccatccccgacctggagcccagcagaaagtacaagttcctgctgttcggcatccaggacggcaagagaagaagccccgtgagcgtggaggccaagaccgtggccagaggcgacgccagccccggcgccccccccagactgggcgagctgtgggtgaccgaccccacccccgacagcctgagactgagctggaccgtgcccgagggccagttcgacagcttcgtggtgcagttcaaggacaaggacggcccccaggtggtgcccgtggagggccacgagagaagcgtgaccgtgacccccctggacgccggcagaaagtacagattcctgctgtacggcctgctgggcaagaagagacacggccccctgaccgccgacggcaccaccgaggccagaagcgccatggacgacaccggcaccaagagaccccccaagcccagactgggcgaggagctgcaggtgaccaccgtgacccagaacagcgtgggcctgagctggaccgtgcccgagggccagttcgacagcttcgtggtgcagtacaaggacagagacggccagccccaggtggtgcccgtggagggcagcctgagagaggtgagcgtgcccggcctggaccccgcccacagatacaagctgctgctgtacggcctgcaccacggcaagagagtgggccccatcagcgccgtggccatcaccgccggcagagaggagaccgagaccgagaccaccgcccccaccccccccgcccccgagccccacctgggcgagctgaccgtggaggaggccaccagccacaccctgcacctgagctggatggtgaccgagggcgagttcgacagcttcgagatccagtacaccgacagagacggccagctgcagatggtgagaatcggcggcgacagaaacgacatcaccctgagcggcctggagagcgaccacagatacctggtgaccctgtacggcttcagcgacggcaagcacgtgggccccgtgcacgtggaggccctgaccgtgcccgaggaggagaagcccagcgagccccccaccgccacccccgagccccccatcaagcccagactgggcgagctgaccgtgaccgacgccacccccgacagcctgagcctgagctggaccgtgcccgagggccagttcgaccacttcctggtgcagtacagaaacggcgacggccagcccaaggccgtgagagtgcccggccacgaggagggcgtgaccatcagcggcctggagcccgaccacaagtacaagatgaacctgtacggcttccacggcggccagagaatgggccccgtgagcgtggtgggcgtgaccgccgccgaggaggagacccccagccccaccgagcccagcatggaggcccccgagcccgccgaggagcccctgctgggcgagctgaccgtgaccggcagcagccccgacagcctgagcctgagctggaccgtgccccagggcagattcgacagcttcaccgtgcagtacaaggacagagacggcagaccccaggtggtgagagtgggcggcgaggagagcgaggtgaccgtgggcggcctggagcccggcagaaagtacaagatgcacctgtacggcctgcacgagggcagaagagtgggccccgtgagcgccgtgggcgtgaccgcccccgaggaggagagccccgacgcccccctggccaagctgagactgggccagatgaccgtgagagacatcaccagcgacagcctgagcctgagctggaccgtgcccgagggccagttcgaccacttcctggtgcagttcaagaacggcgacggccagcccaaggccgtgagagtgcccggccacgaggacggcgtgaccatcagcggcctggagcccgaccacaagtacaagatgaacctgtacggcttccacggcggccagagagtgggccccgtgagcgccgtgggcctgaccgcccccggcaaggacgaggagatggcccccgccagcaccgagccccccacccccgagccccccatcaagcccagactggaggagctgaccgtgaccgacgccacccccgacagcctgagcctgagctggaccgtgcccgagggccagttcgaccacttcctggtgcagtacaagaacggcgacggccagcccaaggccaccagagtgcccggccacgaggacagagtgaccatcagcggcctggagcccgacaacaagtacaagatgaacctgtacggcttccacggcggccagagagtgggccccgtgagcgccatcggcgtgaccgccgccgaggaggagacccccagccccaccgagcccagcatggaggcccccgagccccccgaggagcccctgctgggcgagctgaccgtgaccggcagcagccccgacagcctgagcctgagctggaccgtgccccagggcagattcgacagcttcaccgtgcagtacaaggacagagacggcagaccccaggtggtgagagtgggcggcgaggagagcgaggtgaccgtgggcggcctggagcccggcagaaagtacaagatgcacctgtacggcctgcacgagggcagaagagtgggccccgtgagcaccgtgggcgtgaccgccccccaggaggacgtggacgagacccccagccccaccgagcccggcaccgaggcccccgagccccccgaggagcccctgctgggcgagctgaccgtgaccggcagcagccccgacagcctgagcctgagctggaccgtgccccagggcagattcgacagcttcaccgtgcagtacaaggacagagacggcagaccccaggccgtgagagtgggcggccaggagagcaaggtgaccgtgagaggcctggagcccggcagaaagtacaagatgcacctgtacggcctgcacgagggcagaagactgggccccgtgagcgccgtgggcgtgaccgaggacgaggccgagaccacccaggccgtgcccaccatgacccccgagccccccatcaagcccagactgggcgagctgaccatgaccgacgccacccccgacagcctgagcctgagctggaccgtgcccgagggccagttcgaccacttcctggtgcagtacagaaacggcgacggccagcccaaggccgtgagagtgcccggccacgaggacggcgtgaccatcagcggcctggagcccgaccacaagtacaagatgaacctgtacggcttccacggcggccagagagtgggccccatcagcgtgatcggcgtgaccgccgccgaggaggagacccccagccccaccgagctgagcaccgaggcccccgagccccccgaggagcccctgctgggcgagctgaccgtgaccggcagcagccccgacagcctgagcctgagctggaccatcccccagggccacttcgacagcttcaccgtgcagtacaaggacagagacggcagaccccaggtgatgagagtgagaggcgaggagagcgaggtgaccgtgggcggcctggagcccggcagaaagtacaagatgcacctgtacggcctgcacgagggcagaagagtgggccccgtgagcaccgtgggcgtgaccgtgcccaccaccacccccgagccccccaacaagcccagactgggcgagctgaccgtgaccgacgccacccccgacagcctgagcctgagctggatggtgcccgagggccagttcgaccacttcctggtgcagtacagaaacggcgacggccagcccaaggtggtgagagtgcccggccacgaggacggcgtgaccatcagcggcctggagcccgaccacaagtacaagatgaacctgtacggcttccacggcggccagagagtgggccccatcagcgtgatcggcgtgaccgccgccgaggaggagacccccgcccccaccgagcccagcaccgaggcccccgagccccccgaggagcccctgctgggcgagctgaccgtgaccggcagcagccccgacagcctgagcctgagctggaccatcccccagggcagattcgacagcttcaccgtgcagtacaaggacagagacggcagaccccaggtggtgagagtgagaggcgaggagagcgaggtgaccgtgggcggcctggagcccggctgcaagtacaagatgcacctgtacggcctgcacgagggccagagagtgggccccgtgagcgccgtgggcgtgaccgtgcccaccatgacccccgagccccccatcaagcccagactgggcgagctgaccgtgaccgacgccacccccgacagcctgagcctgagctggatggtgcccgagggccagttcgaccacttcctggtgcagtacagaaacggcgacggccagcccaaggccgtgagagtgcccggccacgaggacggcgtgaccatcagcggcctggagcccgaccacaagtacaagatgaacctgtacggcttccacggcggccagagagtgggccccgtgagcgccatcggcgtgaccgaggaggagacccccagccccaccgagcccagcaccgaggcccccgaggcccccgaggagcccctgctgggcgagctgaccgtgaccggcagcagccccgacagcctgagcctgagctggaccgtgccccagggcagattcgacagcttcaccgtgcagtacaaggacagagacggccagccccaggtggtgagagtgagaggcgaggagagcgaggtgaccgtgggcggcctggagcccggcagaaagtacaagatgcacctgtacggcctgcacgagggccagagagtgggccccgtgagcaccgtgggcatcaccgcccccctgcccacccccctgcccgtggagcccagactgggcgagctggccgtggccgccgtgaccagcgacagcgtgggcctgagctggaccgtggcccagggccccttcgacagcttcctggtgcagtacagagacgcccagggccagccccaggccgtgcccgtgagcggcgacctgagagccgtggccgtgagcggcctggaccccgccagaaagtacaagttcctgctgttcggcctgcagaacggcaagagacacggccccgtgcccgtggaggccagaaccgcccccgacaccaagcccagccccagactgggcgagctgaccgtgaccgacgccacccccgacagcgtgggcctgagctggaccgtgcccgagggcgagttcgacagcttcgtggtgcagtacaaggacaaggacggcagactgcaggtggtgcccgtggccgccaaccagagagaggtgaccgtgcagggcctggagcccagcagaaagtacagattcctgctgtacggcctgagcggcagaaagagactgggccccatcagcgccgacagcaccaccgcccccctggagaaggagctgcccccccacctgggcgagctgaccgtggccgaggagaccagcagcagcctgagactgagctggaccgtggcccagggccccttcgacagcttcgtggtgcagtacagagacaccgacggccagcccagagccgtgcccgtggccgccgaccagagaaccgtgaccgtggaggacctggagcccggcaagaagtacaagttcctgctgtacggcctgctgggcggcaagagactgggccccgtgagcgccctgggcatgaccgcccccgaggaggacacccccgcccccgagctggcccccgaggcccccgagccccccgaggagcccagactgggcgtgctgaccgtgaccgacaccacccccgacagcatgagactgagctggagcgtggcccagggccccttcgacagcttcgtggtgcagtacgaggacaccaacggccagccccaggccctgctggtggacggcgaccagagcaagatcctgatcagcggcctggagcccagcaccccctacagattcctgctgtacggcctgcacgagggcaagagactgggccccctgagcgccgagggcaccaccggcctggcccccgccggccagaccagcgaggagagcagacccagactgagccagctgagcgtgaccgacgtgaccaccagcagcctgagactgaactgggaggccccccccggcgccttcgacagcttcctgctgagattcggcgtgcccagccccagcaccctggagccccaccccagacccctgctgcagagagagctgatggtgcccggcaccagacacagcgccgtgctgagagacctgagaagcggcaccctgtacagcctgaccctgtacggcctgagaggcccccacaaggccgacagcatccagggcaccgccagaaccctgagccccgtgctggagagccccagagacctgcagttcagcgagatcagagagaccagcgccaaggtgaactggatgcccccccccagcagagccgacagcttcaaggtgagctaccagctggccgacggcggcgagccccagagcgtgcaggtggacggccaggccagaacccagaagctgcagggcctgatccccggcgccagatacgaggtgaccgtggtgagcgtgagaggcttcgaggagagcgagcccctgaccggcttcctgaccaccgtgcccgacggccccacccagctgagagccctgaacctgaccgagggcttcgccgtgctgcactggaagcccccccagaaccccgtggacacctacgacgtgcaggtgaccgcccccggcgccccccccctgcaggccgagacccccggcagcgccgtggactaccccctgcacgacctggtgctgcacaccaactacaccgccaccgtgagaggcctgagaggccccaacctgaccagccccgccagcatcaccttcaccaccggcctggaggcccccagagacctggaggccaaggaggtgacccccagaaccgccctgctgacctggaccgagccccccgtgagacccgccggctacctgctgagcttccacacccccggcggccagaaccaggagatcctgctgcccggcggcatcaccagccaccagctgctgggcctgttccccagcaccagctacaacgccagactgcaggccatgtggggccagagcctgctgccccccgtgagcaccagcttcaccaccggcggcctgagaatccccttccccagagactgcggcgaggagatgcagaacggcgccggcgccagcagaaccagcaccatcttcctgaacggcaacagagagagacccctgaacgtgttctgcgacatggagaccgacggcggcggctggctggtgttccagagaagaatggacggccagaccgacttctggagagactgggaggactacgcccacggcttcggcaacatcagcggcgagttctggctgggcaacgaggccctgcacagcctgacccaggccggcgactacagcatgagagtggacctgagagccggcgacgaggccgtgttcgcccagtacgacagcttccacgtggacagcgccgccgagtactacagactgcacctggagggctaccacggcaccgccggcgacagcatgagctaccacagcggcagcgtgttcagcgccagagacagagaccccaacagcctgctgatcagctgcgccgtgagctacagaggcgcctggtggtacagaaactgccactacgccaacctgaacggcctgtacggcagcaccgtggaccaccagggcgtgagctggtaccactggaagggcttcgagttcagcgtgcccttcaccgagatgaagctgagacccagaaacttcagaagccccgccggcggcggctag

SEQ ID NO: 102125 - DNA, 6450 bp, synthetic construct
  misc_feature 1..6450: note = Description of Artificial Sequence: Synthetic coding sequence
  source 1..6450: mol_type = other DNA
tgagccgaggaggagacccccagccccaccgagcccagcatggaggcccccgagcccgccgaggagcccctgctgggcgagctgaccgtgaccggcagcagccccgacagcctgagcctgagctggaccgtgccccagggcagattcgacagcttcaccgtgcagtacaaggacagagacggcagaccccaggtggtgagagtgggcggcgaggagagcgaggtgaccgtgggcggcctggagcccggcagaaagtacaagatgcacctgtacggcctgcacgagggcagaagagtgggccccgtgagcgccgtgggcgtgaccgcccccgaggaggagagccccgacgcccccctggccaagctgagactgggccagatgaccgtgagagacatcaccagcgacagcctgagcctgagctggaccgtgcccgagggccagttcgaccacttcctggtgcagttcaagaacggcgacggccagcccaaggccgtgagagtgcccggccacgaggacggcgtgaccatcagcggcctggagcccgaccacaagtacaagatgaacctgtacggcttccacggcggccagagagtgggccccgtgagcgccgtgggcctgaccgcccccggcaaggacgaggagatggcccccgccagcaccgagccccccacccccgagccccccatcaagcccagactggaggagctgaccgtgaccgacgccacccccgacagcctgagcctgagctggaccgtgcccgagggccagttcgaccacttcctggtgcagtacaagaacggcgacggccagcccaaggccaccagagtgcccggccacgaggacagagtgaccatcagcggcctggagcccgacaacaagtacaagatgaacctgtacggcttccacggcggccagagagtgggccccgtgagcgccatcggcgtgaccgccgccgaggaggagacccccagccccaccgagcccagcatggaggcccccgagccccccgaggagcccctgctgggcgagctgaccgtgaccggcagcagccccgacagcctgagcctgagctggaccgtgccccagggcagattcgacagcttcaccgtgcagtacaaggacagagacggcagaccccaggtggtgagagtgggcggcgaggagagcgaggtgaccgtgggcggcctggagcccggcagaaagtacaagatgcacctgtacggcctgcacgagggcagaagagtgggccccgtgagcaccgtgggcgtgaccgccccccaggaggacgtggacgagacccccagccccaccgagcccggcaccgaggcccccgagccccccgaggagcccctgctgggcgagctgaccgtgaccggcagcagccccgacagcctgagcctgagctggaccgtgccccagggcagattcgacagcttcaccgtgcagtacaaggacagagacggcagaccccaggccgtgagagtgggcggccaggagagcaaggtgaccgtgagaggcctggagcccggcagaaagtacaagatgcacctgtacggcctgcacgagggcagaagactgggccccgtgagcgccgtgggcgtgaccgaggacgaggccgagaccacccaggccgtgcccaccatgacccccgagccccccatcaagcccagactgggcgagctgaccatgaccgacgccacccccgacagcctgagcctgagctggaccgtgcccgagggccagttcgaccacttcctggtgcagtacagaaacggcgacggccagcccaaggccgtgagagtgcccggccacgaggacggcgtgaccatcagcggcctggagcccgaccacaagtacaagatgaacctgtacggcttccacggcggccagagagtgggccccatcagcgtgaccggcgtgaccgccgccgaggaggagacccccagccccaccgagctgagcaccgaggcccccgagccccccgaggagcccctgctgggcgagctgaccgtgaccggcagcagccccgacagcctgagcctgagctggaccatcccccagggccacttcgacagcttcaccgtgcagtacaaggacagagacggcagaccccaggtgatgagagtgagaggcgaggagagcgaggtgaccgtgggcggcctggagcccggcagaaagtacaagatgcacctgtacggcctgcacgagggcagaagagtgggccccgtgagcaccgtgggcgtgaccgtgcccaccaccacccccgagccccccaacaagcccagactgggcgagctgaccgtgaccgacgccacccccgacagcctgagcctgagctggatggtgcccgagggccagttcgaccacttcctggtgcagtacagaaacggcgacggccagcccaaggtggtgagagtgcccggccacgaggacggcgtgaccatcagcggcctggagcccgaccacaagtacaagatgaacctgtacggcttccacggcggccagagagtgggccccatcagcgtgatcggcgtgaccgccgccgaggaggagacccccgcccccaccgagcccagcaccgaggcccccgagccccccgaggagcccctgctgggcgagctgaccgtgaccggcagcagccccgacagcctgagcctgagctggaccatcccccagggcagattcgacagcttcaccgtgcagtacaaggacagagacggcagaccccaggtggtgagagtgagaggcgaggagagcgaggtgaccgtgggcggcctggagcccggctgcaagtacaagatgcacctgtacggcctgcacgagggccagagagtgggccccgtgagcgccgtgggcgtgaccgtgcccaccatgacccccgagccccccatcaagcccagactgggcgagctgaccgtgaccgacgccacccccgacagcctgagcctgagctggatggtgcccgagggccagttcgaccacttcctggtgcagtacagaaacggcgacggccagcccaaggccgtgagagtgcccggccacgaggacggcgtgaccatcagcggcctggagcccgaccacaagtacaagatgaacctgtacggcttccacggcggccagagagtgggccccgtgagcgccatcggcgtgaccgaggaggagacccccagccccaccgagcccagcaccgaggcccccgaggcccccgaggagcccctgctgggcgagctgaccgtgaccggcagcagccccgacagcctgagcctgagctggaccgtgccccagggcagattcgacagcttcaccgtgcagtacaaggacagagacggccagccccaggtggtgagagtgagaggcgaggagagcgaggtgaccgtgggcggcctggagcccggcagaaagtacaagatgcacctgtacggcctgcacgagggccagagagtgggccccgtgagcaccgtgggcatcaccgcccccctgcccacccccctgcccgtggagcccagactgggcgagctggccgtggccgccgtgaccagcgacagcgtgggcctgagctggaccgtggcccagggccccttcgacagcttcctggtgcagtacagagacgcccagggccagccccaggccgtgcccgtgagcggcgacctgagagccgtggccgtgagcggcctggaccccgccagaaagtacaagttcctgctgttcggcctgcagaacggcaagagacacggccccgtgcccgtggaggccagaaccgcccccgacaccaagcccagccccagactgggcgagctgaccgtgaccgacgccacccccgacagcgtgggcctgagctggaccgtgcccgagggcgagttcgacagcttcgtggtgcagtacaaggacaaggacggcagactgcaggtggtgcccgtggccgccaaccagagagaggtgaccgtgcagggcctggagcccagcagaaagtacagattcctgctgtacggcctgagcggcagaaagagactgggccccatcagcgccgacagcaccaccgcccccctggagaaggagctgcccccccacctgggcgagctgaccgtggccgaggagaccagcagcagcctgagactgagctggaccgtggcccagggccccttcgacagcttcgtggtgcagtacagagacaccgacggccagcccagagccgtgcccgtggccgccgaccagagaaccgtgaccgtggaggacctggagcccggcaagaagtacaagttcctgctgtacggcctgctgggcggcaagagactgggccccgtgagcgccctgggcatgaccgcccccgaggaggacacccccgcccccgagctggcccccgaggcccccgagccccccgaggagcccagactgggcgtgctgaccgtgaccgacaccacccccgacagcatgagactgagctggagcgtggcccagggccccttcgacagcttcgtggtgcagtacgaggacaccaacggccagccccaggccctgctggtggacggcgaccagagcaagatcctgatcagcggcctggagcccagcaccccctacagattcctgctgtacggcctgcacgagggcaagagactgggccccctgagcgccgagggcaccaccggcctggcccccgccggccagaccagcgaggagagcagacccagactgagccagctgagcgtgaccgacgtgaccaccagcagcctgagactgaactgggaggccccccccggcgccttcgacagcttcctgctgagattcggcgtgcccagccccagcaccctggagccccaccccagacccctgctgcagagagagctgatggtgcccggcaccagacacagcgccgtgctgagagacctgagaagcggcaccctgtacagcctgaccctgtacggcctgagaggcccccacaaggccgacagcatccagggcaccgccagaaccctgagccccgtgctggagagccccagagacctgcagttcagcgagatcagagagaccagcgccaaggtgaactggatgcccccccccagcagagccgacagcttcaaggtgagctaccagctggccgacggcggcgagccccagagcgtgcaggtggacggccaggccagaacccagaagctgcagggcctgatccccggcgccagatacgaggtgaccgtggtgagcgtgagaggcttcgaggagagcgagcccctgaccggcttcctgaccaccgtgcccgacggccccacccagctgagagccctgaacctgaccgagggcttcgccgtgctgcactggaagcccccccagaaccccgtggacacctacgacatccaggtgaccgcccccggcgccccccccctgcaggccgagacccccggcagcgccgtggactaccccctgcacgacctggtgctgcacaccaactacaccgccaccgtgagaggcctgagaggccccaacctgaccagccccgccagcatcaccttcaccaccggcctggaggcccccagagacctggaggccaaggaggtgacccccagaaccgccctgctgacctggaccgagccccccgtgagacccgccggctacctgctgagcttccacacccccggcggccagacccaggagatcctgctgcccggcggcatcaccagccaccagctgctgggcctgttccccagcaccagctacaacgccagactgcaggccatgtggggccagagcctgctgccccccgtgagcaccagcttcaccaccggcggcctgagaatccccttccccagagactgcggcgaggagatgcagaacggcgccggcgccagcagaaccagcaccatcttcctgaacggcaacagagagagacccctgatcgtgttctgcgacatggagaccgacggcggcggctggctggtgttccagagaagaatggacggccagaccgacttctggagagactgggaggactacgcccacggcttcggcaacatcagcggcgagttctggctgggcaacgaggccctgcacagcctgacccaggccggcgactacagcatgagagtggacctgagagccggcgacgaggccgtgttcgcccagtacgacagcttccacgtggacagcgccgccgagtactacagactgcacctggagggctaccacggcaccgccggcgacagcatgagctaccacagcggcagcgtgttcagcgccagagacagagaccccaacagcctgctgatcagctgcgccgtgagctacagaggcgcctggtggtacagaaactgccactacgccaacctgaacggcctgtacggcagcaccgtggaccaccagggcgtgagctggtaccactggaagggcttcgagttcagcgtgcccttcaccgagatgaagctgagacccagaaacttcagaagccccgccggcggcggctag

SEQ ID NO: 102126 - DNA, 27 bp, synthetic construct
  misc_feature 1..27: note = Description of Artificial Sequence: Synthetic coding sequence
  source 1..27: mol_type = other DNA
atgatgcccgcccagtacgccctgtag

SEQ ID NO: 102127 - DNA, 27 bp, synthetic construct
  misc_feature 1..27: note = Description of Artificial Sequence: Synthetic coding sequence
  source 1..27: mol_type = other DNA
atgatgcccgcccagtacgccctgtag

SEQ ID NO: 102128 - DNA, 9891 bp, synthetic construct
  misc_feature 1..9891: note = Description of Artificial Sequence: Synthetic coding sequence
  source 1..9891: mol_type = other DNA
tgaagcagccccctgggcctgctgggcaccaccgacgagcccccccccagcggccccagcaccacccagggcgcccaggcccccctgctgcagcagagaccccaggagctgggcgagctgagagtgctgggcagagacgagaccggcagactgagagtggtgtggaccgcccagcccgacaccttcgcctacttccagctgagaatgagagtgcccgagggccccggcgcccacgaggaggtgctgcccggcgacgtgagacaggccctggtgcccccccccccccccggcaccccctacgagctgagcctgcacggcgtgccccccggcggcaagcccagcgaccccatcatctaccagggcatcatggacaaggacgaggagaagcccggcaagagcagcggcccccccagactgggcgagctgaccgtgaccgacagaaccagcgacagcctgctgctgagatggaccgtgcccgagggcgagttcgacagcttcgtgatccagtacaaggacagagacggccagccccaggtggtgcccgtggagggcccccagagaagcgccgtgatcaccagcctggaccccggcagaaagtacaagttcgtgctgtacggcttcgtgggcaagaagagacacggccccctggtggccgaggccaagatcctgccccagagcgaccccagccccggcacccccccccacctgggcaacctgtgggtgaccgaccccacccccgacagcctgcacctgagctggaccgtgcccgagggccagttcgacaccttcatggtgcagtacagagacagagacggcagaccccaggtggtgcccgtggagggccccgagagaagcttcgtggtgagcagcctggaccccgaccacaagtacagattcaccctgttcggcatcgccaacaagaagagatacggccccctgaccgccgacggcaccaccgcccccgagagaaaggaggagccccccagacccgagttcctggagcagcccctgctgggcgagctgaccgtgaccggcgtgacccccgacagcctgagactgagctggaccgtggcccagggccccttcgacagcttcatggtgcagtacaaggacgcccagggccagccccaggccgtgcccgtggccggcgacgagaacgaggtgaccgtgcccggcctggaccccgacagaaagtacaagatgaacctgtacggcctgagaggcagacagagagtgggccccgagagcgtggtggccaagaccgccccccaggaggacgtggacgagacccccagccccaccgagctgggcaccgaggcccccgagagccccgaggagcccctgctgggcgagctgaccgtgaccggcagcagccccgacagcctgagcctgttctggaccgtgccccagggcagcttcgacagcttcaccgtgcagtacaaggacagagacggcagaccccaggccgtgagagtgggcggcaaggagagcgaggtgaccgtgggcggcctggagcccggccacaagtacaagatgcacctgtacggcctgcacgagggccagagagtgggccccgtgagcgccgtgggcgtgaccgccccccagcaggaggagaccccccccgccaccgagagccccctggagcccagactgggcgagctgaccgtgaccgacgtgacccccaacagcgtgggcctgagctggaccgtgcccgagggccagttcgacagcttcatcgtgcagtacaaggacaaggacggccagccccaggtggtgcccgtggccgccgaccagagagaggtgaccgtgtacaacctggagcccgagagaaagtacaagatgaacatgtacggcctgcacgacggccagagaatgggccccctgagcgtggtgatcgtgaccgcccccctgccccccgcccccgccaccgaggccagcaagccccccctggagcccagactgggcgagctgaccgtgaccgacatcacccccgacagcgtgggcctgagctggaccgtgcccgagggcgagttcgacagcttcgtggtgcagtacaaggacagagacggccagccccaggtggtgcccgtggccgccgaccagagagaggtgaccatccccgacctggagcccagcagaaagtacaagttcctgctgttcggcatccaggacggcaagagaagaagccccgtgagcgtggaggccaagaccgtggccagaggcgacgccagccccggcgccccccccagactgggcgagctgtgggtgaccgaccccacccccgacagcctgagactgagctggaccgtgcccgagggccagttcgacagcttcgtggtgcagttcaaggacaaggacggcccccaggtggtgcccgtggagggccacgagagaagcgtgaccgtgacccccctggacgccggcagaaagtacagattcctgctgtacggcctgctgggcaagaagagacacggccccctgaccgccgacggcaccaccgaggccagaagcgccatggacgacaccggcaccaagagaccccccaagcccagactgggcgaggagctgcaggtgaccaccgtgacccagaacagcgtgggcctgagctggaccgtgcccgagggccagttcgacagcttcgtggtgcagtacaaggacagagacggccagccccaggtggtgcccgtggagggcagcctgagagaggtgagcgtgcccggcctggaccccgcccacagatacaagctgctgctgtacggcctgcaccacggcaagagagtgggccccatcagcgccgtggccatcaccgccggcagagaggagaccgagaccgagaccaccgcccccaccccccccgcccccgagccccacctgggcgagctgaccgtggaggaggccaccagccacaccctgcacctgagctggatggtgaccgagggcgagttcgacagcttcgagatccagtacaccgacagagacggccagctgcagatggtgagaatcggcggcgacagaaacgacatcaccctgagcggcctggagagcgaccacagatacctggtgaccctgtacggcttcagcgacggcaagcacgtgggccccgtgcacgtggaggccctgaccgtgcccgaggaggagaagcccagcgagccccccaccgccacccccgagccccccatcaagcccagactgggcgagctgaccgtgaccgacgccacccccgacagcctgagcctgagctggaccgtgcccgagggccagttcgaccacttcctggtgcagtacagaaacggcgacggccagcccaaggccgtgagagtgcccggccacgaggagggcgtgaccatcagcggcctggagcccgaccacaagtacaagatgaacctgtacggcttccacggcggccagagaatgggccccgtgagcgtggtgggcgtgaccgccgccgaggaggagacccccagccccaccgagcccagcatggaggcccccgagcccgccgaggagcccctgctgggcgagctgaccgtgaccggcagcagccccgacagcctgagcctgagctggaccgtgccccagggcagattcgacagcttcaccgtgcagtacaaggacagagacggcagaccccaggtggtgagagtgggcggcgaggagagcgaggtgaccgtgggcggcctggagcccggcagaaagtacaagatgcacctgtacggcctgcacgagggcagaagagtgggccccgtgagcgccgtgggcgtgaccgcccccgaggaggagagccccgacgcccccctggccaagctgagactgggccagatgaccgtgagagacatcaccagcgacagcctgagcctgagctggaccgtgcccgagggccagttcgaccacttcctggtgcagttcaagaacggcgacggccagcccaaggccgtgagagtgcccggccacgaggacggcgtgaccatcagcggcctggagcccgaccacaagtacaagatgaacctgtacggcttccacggcggccagagagtgggccccgtgagcgccgtgggcctgaccgcccccggcaaggacgaggagatggcccccgccagcaccgagccccccacccccgagccccccatcaagcccagactggaggagctgaccgtgaccgacgccacccccgacagcctgagcctgagctggaccgtgcccgagggccagttcgaccacttcctggtgcagtacaagaacggcgacggccagcccaaggccaccagagtgcccggccacgaggacagagtgaccatcagcggcctggagcccgacaacaagtacaagatgaacctgtacggcttccacggcggccagagagtgggccccgtgagcgccatcggcgtgaccgccgccgaggaggagacccccagccccaccgagcccagcatggaggcccccgagccccccgaggagcccctgctgggcgagctgaccgtgaccggcagcagccccgacagcctgagcctgagctggaccgtgccccagggcagattcgacagcttcaccgtgcagtacaaggacagagacggcagaccccaggtggtgagagtgggcggcgaggagagcgaggtgaccgtgggcggcctggagcccggcagaaagtacaagatgcacctgtacggcctgcacgagggcagaagagtgggccccgtgagcaccgtgggcgtgaccgccccccaggaggacgtggacgagacccccagccccaccgagcccggcaccgaggcccccggcccccccgaggagcccctgctgggcgagctgaccgtgaccggcagcagccccgacagcctgagcctgagctggaccgtgccccagggcagattcgacagcttcaccgtgcagtacaaggacagagacggcagaccccaggccgtgagagtgggcggccaggagagcaaggtgaccgtgagaggcctggagcccggcagaaagtacaagatgcacctgtacggcctgcacgagggcagaagactgggccccgtgagcgccgtgggcgtgaccgaggacgaggccgagaccacccaggccgtgcccaccatgacccccgagccccccatcaagcccagactgggcgagctgaccatgaccgacgccacccccgacagcctgagcctgagctggaccgtgcccgagggccagttcgaccacttcctggtgcagtacagaaacggcgacggccagcccaaggccgtgagagtgcccggccacgaggacggcgtgaccatcagcggcctggagcccgaccacaagtacaagatgaacctgtacggcttccacggcggccagagagtgggccccatcagcgtgatcggcgtgaccgccgccgaggaggagacccccagccccaccgagctgagcaccgaggcccccgagccccccgaggagcccctgctgggcgagctgaccgtgaccggcagcagccccgacagcctgagcctgagctggaccatcccccagggccacttcgacagcttcaccgtgcagtacaaggacagagacggcagaccccaggtgatgagagtgagaggcgaggagagcgaggtgaccgtgggcggcctggagcccggcagaaagtacaagatgcacctgtacggcctgcacgagggcagaagagtgggccccgtgagcaccgtgggcgtgaccgtgcccaccaccacccccgagccccccaacaagcccagactgggcgagctgaccgtgaccgacgccacccccgacagcctgagcctgagctggatggtgcccgagggccagttcgaccacttcctggtgcagtacagaaacggcgacggccagcccaaggtggtgagagtgcccggccacgaggacggcgtgaccatcagcggcctggagcccgaccacaagtacaagatgaacctgtacggcttccacggcggccagagagtgggccccatcagcgtgatcggcgtgaccgccgccgaggaggagacccccgcccccaccgagcccagcaccgaggcccccgagccccccgaggagcccctgctgggcgagctgaccgtgaccggcagcagccccgacagcctgagcctgagctggaccatcccccagggcagattcgacagcttcaccgtgcagtacaaggacagagacggcagaccccaggtggtgagagtgagaggcgaggagagcgaggtgaccgtgggcggcctggagcccggctgcaagtacaagatgcacctgtacggcctgcacgagggccagagagtgggccccgtgagcgccgtgggcgtgaccgtgcccaccatgacccccgagccccccatcaagcccagactgggcgagctgaccgtgaccgacgccacccccgacagcctgagcctgagctggatggtgcccgagggccagttcgaccacttcctggtgcagtacagaaacggcgacggccagcccaaggccgtgagagtgcccggccacgaggacggcgtgaccatcagcggcctggagcccgaccacaagtacaagatgaacctgtacggcttccacggcggccagagagtgggccccgtgagcgccatcggcgtgaccgaggaggagacccccagccccaccgagcccagcaccgaggcccccgaggcccccgaggagcccctgctgggcgagctgaccgtgaccggcagcagccccgacagcctgagcctgagctggaccgtgccccagggcagattcgacagcttcaccgtgcagtacaaggacagagacggccagccccaggtggtgagagtgagagtggaggagagcgaggtgaccgtgggcggcctggagcccggcagaaagtacaagatgcacctgtacggcctgcacgagggccagagagtgggccccgtgagcaccgtgggcatcaccgcccccctgcccacccccctgcccgtggagcccagactgggcgagctggccgtggccgccgtgaccagcgacagcgtgggcctgagctggaccgtggcccagggccccttcgacagcttcctggtgcagtacagagacgcccagggccagccccaggccgtgcccgtgagcggcgacctgagagccgtggccgtgagcggcctggaccccgccagaaagtacaagttcctgctgttcggcctgcagaacggcaagagacacggccccgtgcccgtggaggccagaaccgcccccgacaccaagcccagccccagactgggcgagctgaccgtgaccgacgccacccccgacagcgtgggcctgagctggaccgtgcccgagggcgagttcgacagcttcgtggtgcagtacaaggacaaggacggcagactgcaggtggtgcccgtggccgccaaccagagagaggtgaccgtgcagggcctggagcccagcagaaagtacagattcctgctgtacggcctgagcggcagaaagagactgggccccatcagcgccgacagcaccaccgcccccctggagaaggagctgcccccccacctgggcgagctgaccgtggccgaggagaccagcagcagcctgagactgagctggaccgtggcccagggccccttcgacagcttcgtggtgcagtacagagacaccgacggccagcccagagccgtgcccgtggccgccgaccagagaaccgtgaccgtggaggacctggagcccggcaagaagtacaagttcctgctgtacggcctgctgggcggcaagagactgggccccgtgagcgccctgggcatgaccgcccccgaggaggacacccccgcccccgagctggcccccgaggcccccgagccccccgaggagcccagactgggcgtgctgaccgtgaccgacaccacccccgacagcatgagactgagctggagcgtggcccagggccccttcgacagcttcgtggtgcagtacgaggacaccaacggccagccccaggccctgctggtggacggcgaccagagcaagatcctgatcagcggcctggagcccagcaccccctacagattcctgctgtacggcctgcacgagggcaagagactgggccccctgagcgccgagggcaccaccggcctggcccccgccggccagaccagcgaggagagcagacccagactgagccagctgagcgtgaccgacgtgaccaccagcagcctgagactgaactgggaggccccccccggcgccttcgacagcttcctgctgagattcggcgtgcccagccccagcaccctggagccccaccccagacccctgctgcagagagagctgatggtgcccggcaccagacacagcgccgtgctgagagacctgagaagcggcaccctgtacagcctgaccctgtacggcctgagaggcccccacaaggccgacagcatccagggcaccgccagaaccctgagccccgtgctggagagccccagagacctgcagttcagcgagatcagagagaccagcgccaaggtgaactggatgcccccccccagcagagccgacagcttcaaggtgagctaccagctggccgacggcggcgagccccagagcgtgcaggtggacggccaggccagaacccagaagctgcagggcctgatccccggcgccagatacgaggtgaccgtggtgagcgtgagaggcttcgaggagagcgagcccctgaccggcttcctgaccaccgtgcccgacggccccacccagctgagagccctgaacctgaccgagggcttcgccgtgctgcactggaagcccccccagaaccccgtggacacctacgacgtgcaggtgaccgcccccggcgccccccccctgcaggccgagacccccggcagcgccgtggactaccccctgcacgacctggtgctgcacaccaactacaccgccaccgtgagaggcctgagaggccccaacctgaccagccccgccagcatcaccttcaccaccggcctggaggcccccagagacctggaggccaaggaggtgacccccagaaccgccctgctgacctggaccgagccccccgtgagacccgccggctacctgctgagcttccacacccccggcggccagaaccaggagatcctgctgcccggcggcatcaccagccaccagctgctgggcctgttccccagcaccagctacaacgccagactgcaggccatgtggggccagagcctgctgccccccgtgagcaccagcttcaccaccggcggcctgagaatccccttccccagagactgcggcgaggagatgcagaacggcgccggcgccagcagaaccagcaccatcttcctgaacggcaacagagagagacccctgaacgtgttctgcgacatggagaccgacggcggcggctggctggtgttccagagaagaatggacggccagaccgacttctggagagactgggaggactacgcccacggcttcggcaacatcagcggcgagttctggctgggcaacgaggccctgcacagcctgacccaggccggcgactacagcatgagagtggacctgagagccggcgacgaggccgtgttcgcccagtacgacagcttccacgtggacagcgccgccgagtactacagactgcacctggagggctaccacggcaccgccggcgacagcatgagctaccacagcggcagcgtgttcagcgccagagacagagaccccaacagcctgctgatcagctgcgccgtgagctacagaggcgcctggtggtacagaaactgccactacgccaacctgaacggcctgtacggcagcaccgtggaccaccagggcgtgagctggtaccactggaagggcttcgagttcagcgtgcccttcaccgagatgaagctgagacccagaaacttcagaagccccgccggcggcggctag

SEQ ID NO: 102129 - DNA, 12669 bp, synthetic construct
  misc_feature 1..12669: note = Description of Artificial Sequence: Synthetic coding sequence
  source 1..12669: mol_type = other DNA
atgatgcccgcccagtacgccctgaccagcagcctggtgctgctggtgctgctgagcaccgccagagccggccccttcagcagcagaagcaacgtgaccctgcccgcccccagaccccccccccagcccggcggccacaccgtgggcgccggcgtgggcagccccagcagccagctgtacgagcacaccgtggagggcggcgagaagcaggtggtgttcacccacagaatcaacctgccccccagcaccggctgcggctgcccccccggcaccgagccccccgtgctggccagcgaggtgcaggccctgagagtgagactggagatcctggaggagctggtgaagggcctgaaggagcagtgcaccggcggctgctgccccgccagcgcccaggccggcaccggccagaccgacgtgagaaccctgtgcagcctgcacggcgtgttcgacctgagcagatgcacctgcagctgcgagcccggctggggcggccccacctgcagcgaccccaccgacgccgagatcccccccagcagcccccccagcgccagcggcagctgccccgacgactgcaacgaccagggcagatgcgtgagaggcagatgcgtgtgcttccccggctacaccggccccagctgcggctggcccagctgccccggcgactgccagggcagaggcagatgcgtgcagggcgtgtgcgtgtgcagagccggcttcagcggccccgactgcagccagagaagctgccccagaggctgcagccagagaggcagatgcgagggcggcagatgcgtgtgcgaccccggctacaccggcgacgactgcggcatgagaagctgccccagaggctgcagccagagaggcagatgcgagaacggcagatgcgtgtgcaaccccggctacaccggcgaggactgcggcgtgagaagctgccccagaggctgcagccagagaggcagatgcaaggacggcagatgcgtgtgcgaccccggctacaccggcgaggactgcggcaccagaagctgcccctgggactgcggcgagggcggcagatgcgtggacggcagatgcgtgtgctggcccggctacaccggcgaggactgcagcaccagaacctgccccagagactgcagaggcagaggcagatgcgaggacggcgagtgcatctgcgacaccggctacagcggcgacgactgcggcgtgagaagctgccccggcgactgcaaccagagaggcagatgcgaggacggcagatgcgtgtgctggcccggctacaccggcaccgactgcggcagcagagcctgccccagagactgcagaggcagaggcagatgcgagaacggcgtgtgcgtgtgcaacgccggctacagcggcgaggactgcggcgtgagaagctgccccggcgactgcagaggcagaggcagatgcgagagcggcagatgcatgtgctggcccggctacaccggcagagactgcggcaccagagcctgccccggcgactgcagaggcagaggcagatgcgtggacggcagatgcgtgtgcaaccccggcttcaccggcgaggactgcggcagcagaagatgccccggcgactgcagaggccacggcctgtgcgaggacggcgtgtgcgtgtgcgacgccggctacagcggcgaggactgcagcaccagaagctgccccggcggctgcagaggcagaggccagtgcctggacggcagatgcgtgtgcgaggacggctacagcggcgaggactgcggcgtgagacagtgccccaacgactgcagccagcacggcgtgtgccaggacggcgtgtgcatctgctgggagggctacgtgagcgaggactgcagcatcagaacctgccccagcaactgccacggcagaggcagatgcgaggagggcagatgcctgtgcgaccccggctacaccggccccacctgcgccaccagaatgtgccccgccgactgcagaggcagaggcagatgcgtgcagggcgtgtgcctgtgccacgtgggctacggcggcgaggactgcggccaggaggagccccccgccagcgcctgccccggcggctgcggccccagagagctgtgcagagccggccagtgcgtgtgcgtggagggcttcagaggccccgactgcgccatccagacctgccccggcgactgcagaggcagaggcgagtgccacgacggcagctgcgtgtgcaaggacggctacgccggcgaggactgcggcgaggaggtgcccaccatcgagggcatgagaatgcacctgctggaggagaccaccgtgagaaccgagtggacccccgcccccggccccgtggacgcctacgagatccagttcatccccaccaccgagggcgccagcccccccttcaccgccagagtgcccagcagcgccagcgcctacgaccagagaggcctggcccccggccaggagtaccaggtgaccgtgagagccctgagaggcaccagctggggcctgcccgccagcaagaccatcaccaccatgatcgacggcccccaggacctgagagtggtggccgtgacccccaccaccctggagctgggctggctgagaccccaggccgaggtggacagattcgtggtgagctacgtgagcgccggcaaccagagagtgagactggaggtgccccccgaggccgacggcaccctgctgaccgacctgatgcccggcgtggagtacgtggtgaccgtgaccgccgagagaggcagagccgtgagctaccccgccagcgtgagagccaacaccggcagcagccccctgggcctgctgggcaccaccgacgagcccccccccagcggccccagcaccacccagggcgcccaggcccccctgctgcagcagagaccccaggagctgggcgagctgagagtgctgggcagagacgagaccggcagactgagagtggtgtggaccgcccagcccgacaccttcgcctacttccagctgagaatgagagtgcccgagggccccggcgcccacgaggaggtgctgcccggcgacgtgagacaggccctggtgcccccccccccccccggcaccccctacgagctgagcctgcacggcgtgccccccggcggcaagcccagcgaccccatcatctaccagggcatcatggacaaggacgaggagaagcccggcaagagcagcggcccccccagactgggcgagctgaccgtgaccgacagaaccagcgacagcctgctgctgagatggaccgtgcccgagggcgagttcgacagcttcgtgatccagtacaaggacagagacggccagccccaggtggtgcccgtggagggcccccagagaagcgccgtgatcaccagcctggaccccggcagaaagtacaagttcgtgctgtacggcttcgtgggcaagaagagacacggccccctggtggccgaggccaagatcctgccccagagcgaccccagccccggcaccccccccagactgggcaacctgtgggtgaccgaccccacccccgacagcctgcacctgagctggaccgtgcccgagggccagttcgacaccttcatggtgcagtacagagacagagacggcagaccccaggtggtgcccgtggagggccccgagagaagcttcgtggtgagcagcctggaccccgaccacaagtacagattcaccctgttcggcatcgccaacaagaagagatacggccccctgaccgccgacggcaccaccgcccccgagagaaaggaggagccccccagacccgagttcctggagcagcccctgctgggcgagctgaccgtgaccggcgtgacccccgacagcctgagactgagctggaccgtggcccagggccccttcgacagcttcatggtgcagtacaaggacgcccagggccagccccaggccgtgcccgtggccggcgacgagaacgaggtgaccgtgcccggcctggaccccgacagaaagtacaagatgaacctgtacggcctgagaggcagacagagagtgggccccgagagcgtggtggccaagaccgccccccaggaggacgtggacgagacccccagccccaccgagctgggcaccgaggcccccgagagccccgaggagcccctgctgggcgagctgaccgtgaccggcagcagccccgacagcctgagcctgttctggaccgtgccccagggcagcttcgacagcttcaccgtgcagtacaaggacagagacggcagacccagagccgtgagagtgggcggcaaggagagcgaggtgaccgtgggcggcctggagcccggccacaagtacaagatgcacctgtacggcctgcacgagggccagagagtgggccccgtgagcgccgtgggcgtgaccgccccccagcaggaggagaccccccccgccaccgagagccccctggagcccagactgggcgagctgaccgtgaccgacgtgacccccaacagcgtgggcctgagctggaccgtgcccgagggccagttcgacagcttcatcgtgcagtacaaggacaaggacggccagccccaggtggtgcccgtggccgccgaccagagagaggtgaccgtgtacaacctggagcccgagagaaagtacaagatgaacatgtacggcctgcacgacggccagagaatgggccccctgagcgtggtgatcgtgaccgcccccctgccccccgcccccgccaccgaggccagcaagccccccctggagcccagactgggcgagctgaccgtgaccgacatcacccccgacagcgtgggcctgagctggaccgtgcccgagggcgagttcgacagcttcgtggtgcagtacaaggacagagacggccagccccaggtggtgcccgtggccgccgaccagagagaggtgaccatccccgacctggagcccagcagaaagtacaagttcctgctgttcggcatccaggacggcaagagaagaagccccgtgagcgtggaggccaagaccgtggccagaggcgacgccagccccggcgccccccccagactgggcgagctgtgggtgaccgaccccacccccgacagcctgagactgagctggaccgtgcccgagggccagttcgacagcttcgtggtgcagttcaaggacaaggacggcccccaggtggtgcccgtggagggccacgagagaagcgtgaccgtgacccccctggacgccggcagaaagtacagattcctgctgtacggcctgctgggcaagaagagacacggccccctgaccgccgacggcaccaccgaggccagaagcgccatggacgacaccggcaccaagagaccccccaagcccagactgggcgaggagctgcaggtgaccaccgtgacccagaacagcgtgggcctgagctggaccgtgcccgagggccagttcgacagcttcgtggtgcagtacaaggacagagacggccagccccaggtggtgcccgtggagggcagcctgagagaggtgagcgtgcccggcctggaccccgcccacagatacaagctgctgctgtacggcctgcaccacggcaagagagtgggccccatcagcgccgtggccatcaccgccggcagagaggagaccgagaccgagaccaccgcccccaccccccccgcccccgagccccacctgggcgagctgaccgtggaggaggccaccagccacaccctgcacctgagctggatggtgaccgagggcgagttcgacagcttcgagatccagtacaccgacagagacggccagctgcagatggtgagaatcggcggcgacagaaacgacatcaccctgagcggcctggagagcgaccacagatacctggtgaccctgtacggcttcagcgacggcaagcacgtgggccccgtgcacgtggaggccctgaccgtgcccgaggaggagaagcccagcgagccccccaccgccacccccgagccccccatcaagcccagactgggcgagctgaccgtgaccgacgccacccccgacagcctgagcctgagctggaccgtgcccgagggccagttcgaccacttcctggtgcagtacagaaacggcgacggccagcccaaggccgtgagagtgcccggccacgaggagggcgtgaccatcagcggcctggagcccgaccacaagtacaagatgaacctgtacggcttccacggcggccagagaatgggccccgtgagcgtggtgggcgtgaccgccgccgaggaggagacccccagccccaccgagcccagcatggaggcccccgagcccgccgaggagcccctgctgggcgagctgaccgtgaccggcagcagccccgacagcctgagcctgagctggaccgtgccccagggcagattcgacagcttcaccgtgcagtacaaggacagagacggcagaccccaggtggtgagagtgggcggcgaggagagcgaggtgaccgtgggcggcctggagcccggcagaaagtacaagatgcacctgtacggcctgcacgagggcagaagagtgggccccgtgagcgccgtgggcgtgaccgcccccgaggaggagagccccgacgcccccctggccaagctgagactgggccagatgaccgtgagagacatcaccagcgacagcctgagcctgagctggaccgtgcccgagggccagttcgaccacttcctggtgcagttcaagaacggcgacggccagcccaaggccgtgagagtgcccggccacgaggacggcgtgaccatcagcggcctggagcccgaccacaagtacaagatgaacctgtacggcttccacggcggccagagagtgggccccgtgagcgccgtgggcctgaccgcccccggcaaggacgaggagatggcccccgccagcaccgagccccccacccccgagccccccatcaagcccagactggaggagctgaccgtgaccgacgccacccccgacagcctgagcctgagctggaccgtgcccgagggccagttcgaccacttcctggtgcagtacaagaacggcgacggccagcccaaggccaccagagtgcccggccacgaggacagagtgaccatcagcggcctggagcccgacaacaagtacaagatgaacctgtacggcttccacggcggccagagagtgggccccgtgagcgccatcggcgtgaccgccgccgaggaggagacccccagccccaccgagcccagcatggaggcccccgagccccccgaggagcccctgctgggcgagctgaccgtgaccggcagcagccccgacagcctgagcctgagctggaccgtgccccagggcagattcgacagcttcaccgtgcagtacaaggacagagacggcagaccccaggtggtgagagtgggcggcgaggagagcgaggtgaccgtgggcggcctggagcccggcagaaagtacaagatgcacctgtacggcctgcacgagggcagaagagtgggccccgtgagcaccgtgggcgtgaccgccccccaggaggacgtggacgagacccccagccccaccgagcccggcaccgaggcccccgagccccccgaggagcccctgctgggcgagctgaccgtgaccggcagcagccccgacagcctgagcctgagctggaccgtgccccagggcagattcgacagcttcaccgtgcagtacaaggacagagacggcagaccccaggccgtgagagtgggcggccaggagagcaaggtgaccgtgagaggcctggagcccggcagaaagtacaagatgcacctgtacggcctgcacgagggcagaagactgggccccgtgagcgccgtgggcgtgaccgaggacgaggccgagaccacccaggccgtgcccaccatgacccccgagccccccatcaagcccagactgggcgagctgaccatgaccgacgccacccccgacagcctgagcctgagctggaccgtgcccgagggccagttcgaccacttcctggtgcagtacagaaacggcgacggccagcccaaggccgtgagagtgcccggccacgaggacggcgtgaccatcagcggcctggagcccgaccacaagtacaagatgaacctgtacggcttccacggcggccagagagtgggccccatcagcgtgatcggcgtgaccgccgccgaggaggagacccccagccccaccgagctgagcaccgaggcccccgagccccccgaggagcccctgctgggcgagctgaccgtgaccggcagcagccccgacagcctgagcctgagctggaccatcccccagggccacttcgacagcttcaccgtgcagtacaaggacagagacggcagaccccaggtgatgagagtgagaggcgaggagagcgaggtgaccgtgggcggcctggagcccggcagaaagtacaagatgcacctgtacggcctgcacgagggcagaagagtgggccccgtgagcaccgtgggcgtgaccgtgcccaccaccacccccgagccccccaacaagcccagactgggcgagctgaccgtgaccgacgccacccccgacagcctgagcctgagctggatggtgcccgagggccagttcgaccacttcctggtgcagtacagaaacggcgacggccagcccaaggtggtgagagtgcccggccacgaggacggcgtgaccatcagcggcctggagcccgaccacaagtacaagatgaacctgtacggcttccacggcggccagagagtgggccccatcagcgtgatcggcgtgaccgccgccgaggaggagacccccgcccccaccgagcccagcaccgaggcccccgagccccccgaggagcccctgctgggcgagctgaccgtgaccggcagcagccccgacagcctgagcctgagctggaccatcccccagggcagattcgacagcttcaccgtgcagtacaaggacagagacggcagaccccaggtggtgagagtgagaggcgaggagagcgaggtgaccgtgggcggcctggagcccggctgcaagtacaagatgcacctgtacggcctgcacgagggccagagagtgggccccgtgagcgccgtgggcgtgaccgtgcccaccatgacccccgagccccccatcaagcccagactgggcgagctgaccgtgaccgacgccacccccgacagcctgagcctgagctggatggtgcccgagggccagttcgaccacttcctggtgcagtacagaaacggcgacggccagcccaaggccgtgagagtgcccggccacgaggacggcgtgaccatcagcggcctggagcccgaccacaagtacaagatgaacctgtacggcttccacggcggccagagagtgggccccgtgagcgccatcggcgtgaccgaggaggagacccccagccccaccgagcccagcaccgaggcccccgaggcccccgaggagcccctgctgggcgagctgaccgtgaccggcagcagccccgacagcctgagcctgagctggaccgtgccccagggcagattcgacagcttcaccgtgcagtacaaggacagagacggccagccccaggtggtgagagtgagaggcgaggagagcgaggtgaccgtgggcggcctggagcccggcagaaagtacaagatgcacctgtacggcctgcacgagggccagagagtgggccccgtgagcaccgtgggcatcaccgcccccctgcccacccccctgcccgtggagcccagactgggcgagctggccgtggccgccgtgaccagcgacagcgtgggcctgagctggaccgtggcccagggccccttcgacagcttcctggtgcagtacagagacgcccagggccagccccaggccgtgcccgtgagcggcgacctgagagccgtggccgtgagcggcctggaccccgccagaaagtacaagttcctgctgttcggcctgcagaacggcaagagacacggccccgtgcccgtggaggccagaaccgcccccgacaccaagcccagccccagactgggcgagctgaccgtgaccgacgccacccccgacagcgtgggcctgagctggaccgtgcccgagggcgagttcgacagcttcgtggtgcagtacaaggacaaggacggcagactgcaggtggtgcccgtggccgccaaccagagagaggtgaccgtgcagggcctggagcccagcagaaagtacagattcctgctgtacggcctgagcggcagaaagagactgggccccatcagcgccgacagcaccaccgcccccctggagaaggagctgcccccccacctgggcgagctgaccgtggccgaggagaccagcagcagcctgagactgagctggaccgtggcccagggccccttcgacagcttcgtggtgcagtacagagacaccgacggccagcccagagccgtgcccgtggccgccgaccagagaaccgtgaccgtggaggacctggagcccggcaagaagtacaagttcctgctgtacggcctgctgggcggcaagagactgggccccgtgagcgccctgggcatgaccgcccccgaggaggacacccccgcccccgagctggcccccgaggcccccgagccccccgaggagcccagactgggcgtgctgaccgtgaccgacaccacccccgacagcatgagactgagctggagcgtggcccagggccccttcgacagcttcgtggtgcagtacgaggacaccaacggccagccccaggccctgctggtggacggcgaccagagcaagatcctgatcagcggcctggagcccagcaccccctacagattcctgctgtacggcctgcacgagggcaagagactgggccccctgagcgccgagggcaccaccggcctggcccccgccggccagaccagcgaggagagcagacccagactgagccagctgagcgtgaccgacgtgaccaccagcagcctgagactgaactgggaggccccccccggcgccttcgacagcttcctgctgagattcggcgtgcccagccccagcaccctggagccccaccccagacccctgctgcagagagagctgatggtgcccggcaccagacacagcgccgtgctgagagacctgagaagcggcaccctgtacagcctgaccctgtacggcctgagaggcccccacaaggccgacagcatccagggcaccgccagaaccctgagccccgtgctggagagccccagagacctgcagttcagcgagatcagagagaccagcgccaaggtgaactggatgcccccccccagcagagccgacagcttcaaggtgagctaccagctggccgacggcggcgagccccagagcgtgcaggtggacggccaggccagaacccagaagctgcagggcctgatccccggcgccagatacgaggtgaccgtggtgagcgtgagaggcttcgaggagagcgagcccctgaccggcttcctgaccaccgtgcccgacggccccacccagctgagagccctgaacctgaccgagggcttcgccgtgctgcactggaagcccccccagaaccccgtggacacctacgacatccaggtgaccgcccccggcgccccccccctgcaggccgagacccccggcagcgccgtggactaccccctgcacgacctggtgctgcacaccaactacaccgccaccgtgagaggcctgagaggccccaacctgaccagccccgccagcatcaccttcaccaccggcctggaggcccccagagacctggaggccaaggaggtgacccccagaaccgccctgctgacctggaccgagccccccgtgagacccgccggctacctgctgagcttccacacccccggcggccagacccaggagatcctgctgcccggcggcatcaccagccaccagctgctgggcctgttccccagcaccagctacaacgccagactgcaggccatgtggggccagagcctgctgccccccgtgagcaccagcttcaccaccggcggcctgagaatccccttccccagagactgcggcgaggagatgcagaacggcgccggcgccagcagaaccagcaccatcttcctgaacggcaacagagagagacccctgatcgtgttctgcgacatggagaccgacggcggcggctggctggtgttccagagaagaatggacggccagaccgacttctggagagactgggaggactacgcccacggcttcggcaacatcagcggcgagttctggctgggcaacgaggccctgcacagcctgacccaggccggcgactacagcatgagagtggacctgagagccggcgacgaggccgtgttcgcccagtacgacagcttccacgtggacagcgccgccgagtactacagactgcacctggagggctaccacggcaccgccggcgacagcatgagctaccacagcggcagcgtgttcagcgccagagacagagaccccaacagcctgctgatcagctgcgccgtgagctacagaggcgcctggtggtacagaaactgccactacgccaacctgaacggcctgtacggcagcaccgtggaccaccagggcgtgagctggtaccactggaagggcttcgagttcagcgtgcccttcaccgagatgaagctgagacccagaaacttcagaagccccgccggcggcggctag

SEQ ID NO: 102130 - DNA, 27 bp, synthetic construct
  misc_feature 1..27: note = Description of Artificial Sequence: Synthetic coding sequence
  source 1..27: mol_type = other DNA
atgatgcccgcccagtacgccctgtag

SEQ ID NO: 102131 - DNA, 1905 bp, synthetic construct
  misc_feature 1..1905: note = Description of Artificial Sequence: Synthetic coding sequence
  source 1..1905: mol_type = other DNA
tgaagcagccccctgggcctgctgggcaccaccgacgagcccccccccagcggccccagcaccacccagggcgcccaggcccccctgctgcagcagagaccccaggagctgggcgagctgagagtgctgggcagagacgagaccggcagactgagagtggtgtggaccgcccagcccgacaccttcgcctacttccagctgagaatgagagtgcccgagggccccggcgcccacgaggaggtgctgcccggcgacgtgagacaggccctggtgcccccccccccccccggcaccccctacgagctgagcctgcacggcgtgccccccggcggcaagcccagcgaccccatcatctaccagggcatcatggacaaggacgaggagaagcccggcaagagcagcggcccccccagactgggcgagctgaccgtgaccgacagaaccagcgacagcctgctgctgagatggaccgtgcccgagggcgagttcgacagcttcgtgatccagtacaaggacagagacggccagccccaggtggtgcccgtggagggcccccagagaagcgccgtgatcaccagcctggaccccggcagaaagtacaagttcgtgctgtacggcttcgtgggcaagaagagacacggccccctggtggccgaggccaagatcctgccccagagcgaccccagccccggcaccccccccagactgggcaacctgtgggtgaccgaccccacccccgacagcctgcacctgagctggaccgtgcccgagggccagttcgacaccttcatggtgcagtacagagacagagacggcagaccccaggtggtgcccgtggagggccccgagagaagcttcgtggtgagcagcctggaccccgaccacaagtacagattcaccctgttcggcatcgccaacaagaagagatacggccccctgaccgccgacggcaccaccgcccccgagagaaaggaggagccccccagacccgagttcctggagcagcccctgctgggcgagctgaccgtgaccggcgtgacccccgacagcctgagactgagctggaccgtggcccagggccccttcgacagcttcatggtgcagtacaaggacgcccagggccagccccaggccgtgcccgtggccggcgacgagaacgaggtgaccgtgcccggcctggaccccgacagaaagtacaagatgaacctgtacggcctgagaggcagacagagagtgggccccgagagcgtggtggccaagaccgccccccaggaggacgtggacgagacccccagccccaccgagctgggcaccgaggcccccgagagccccgaggagcccctgctgggcgagctgaccgtgaccggcagcagccccgacagcctgagcctgttctggaccgtgccccagggcagcttcgacagcttcaccgtgcagtacaaggacagagacggcagacccagagccgtgagagtgggcggcaaggagagcgaggtgaccgtgggcggcctggagcccggccacaagtacaagatgcacctgtacggcctgcacgagggccagagagtgggccccgtgagcgccgtgggcgtgaccgccccccagcaggaggagaccccccccgccaccgagagccccctggagcccagactgggcgagctgaccgtgaccgacgtgacccccaacagcgtgggcctgagctggaccgtgcccgagggccagttcgacagcttcatcgtgcagtacaaggacaaggacggccagccccaggtggtgcccgtggccgccgaccagagagaggtgaccgtgtacaacctggagcccgagagaaagtacaagatgaacatgtacggcctgcacgacggccagagaatgggccccctgagcgtggtgatcgtgacctag

SEQ ID NO: 102132 - DNA, 27 bp, synthetic construct
  misc_feature 1..27: note = Description of Artificial Sequence: Synthetic coding sequence
  source 1..27: mol_type = other DNA
atgatgcccgcccagtacgccctgtag

SEQ ID NO: 102133 - DNA, 12669 bp, synthetic construct
  misc_feature 1..12669: note = Description of Artificial Sequence: Synthetic coding sequence
  source 1..12669: mol_type = other DNA
atgatgcccgcccagtacgccctgaccagcagcctggtgctgctggtgctgctgagcaccgccagagccggccccttcagcagcagaagcaacgtgaccctgcccgcccccagaccccccccccagcccggcggccacaccgtgggcgccggcgtgggcagccccagcagccagctgtacgagcacaccgtggagggcggcgagaagcaggtggtgttcacccacagaatcaacctgccccccagcaccggctgcggctgcccccccggcaccgagccccccgtgctggccagcgaggtgcaggccctgagagtgagactggagatcctggaggagctggtgaagggcctgaaggagcagtgcaccggcggctgctgccccgccagcgcccaggccggcaccggccagaccgacgtgagaaccctgtgcagcctgcacggcgtgttcgacctgagcagatgcacctgcagctgcgagcccggctggggcggccccacctgcagcgaccccaccgacgccgagatcccccccagcagcccccccagcgccagcggcagctgccccgacgactgcaacgaccagggcagatgcgtgagaggcagatgcgtgtgcttccccggctacaccggccccagctgcggctggcccagctgccccggcgactgccagggcagaggcagatgcgtgcagggcgtgtgcgtgtgcagagccggcttcagcggccccgactgcagccagagaagctgccccagaggctgcagccagagaggcagatgcgagggcggcagatgcgtgtgcgaccccggctacaccggcgacgactgcggcatgagaagctgccccagaggctgcagccagagaggcagatgcgagaacggcagatgcgtgtgcaaccccggctacaccggcgaggactgcggcgtgagaagctgccccagaggctgcagccagagaggcagatgcaaggacggcagatgcgtgtgcgaccccggctacaccggcgaggactgcggcaccagaagctgcccctgggactgcggcgagggcggcagatgcgtggacggcagatgcgtgtgctggcccggctacaccggcgaggactgcagcaccagaacctgccccagagactgcagaggcagaggcagatgcgaggacggcgagtgcatctgcgacaccggctacagcggcgacgactgcggcgtgagaagctgccccggcgactgcaaccagagaggcagatgcgaggacggcagatgcgtgtgctggcccggctacaccggcaccgactgcggcagcagagcctgccccagagactgcagaggcagaggcagatgcgagaacggcgtgtgcgtgtgcaacgccggctacagcggcgaggactgcggcgtgagaagctgccccggcgactgcagaggcagaggcagatgcgagagcggcagatgcatgtgctggcccggctacaccggcagagactgcggcaccagagcctgccccggcgactgcagaggcagaggcagatgcgtggacggcagatgcgtgtgcaaccccggcttcaccggcgaggactgcggcagcagaagatgccccggcgactgcagaggccacggcctgtgcgaggacggcgtgtgcgtgtgcgacgccggctacagcggcgaggactgcagcaccagaagctgccccggcggctgcagaggcagaggccagtgcctggacggcagatgcgtgtgcgaggacggctacagcggcgaggactgcggcgtgagacagtgccccaacgactgcagccagcacggcgtgtgccaggacggcgtgtgcatctgctgggagggctacgtgagcgaggactgcagcatcagaacctgccccagcaactgccacggcagaggcagatgcgaggagggcagatgcctgtgcgaccccggctacaccggccccacctgcgccaccagaatgtgccccgccgactgcagaggcagaggcagatgcgtgcagggcgtgtgcctgtgccacgtgggctacggcggcgaggactgcggccaggaggagccccccgccagcgcctgccccggcggctgcggccccagagagctgtgcagagccggccagtgcgtgtgcgtggagggcttcagaggccccgactgcgccatccagacctgccccggcgactgcagaggcagaggcgagtgccacgacggcagctgcgtgtgcaaggacggctacgccggcgaggactgcggcgaggaggtgcccaccatcgagggcatgagaatgcacctgctggaggagaccaccgtgagaaccgagtggacccccgcccccggccccgtggacgcctacgagatccagttcatccccaccaccgagggcgccagcccccccttcaccgccagagtgcccagcagcgccagcgcctacgaccagagaggcctggcccccggccaggagtaccaggtgaccgtgagagccctgagaggcaccagctggggcctgcccgccagcaagaccatcaccaccatgatcgacggcccccaggacctgagagtggtggccgtgacccccaccaccctggagctgggctggctgagaccccaggccgaggtggacagattcgtggtgagctacgtgagcgccggcaaccagagagtgagactggaggtgccccccgaggccgacggcaccctgctgaccgacctgatgcccggcgtggagtacgtggtgaccgtgaccgccgagagaggcagagccgtgagctaccccgccagcgtgagagccaacaccggcagcagccccctgggcctgctgggcaccaccgacgagcccccccccagcggccccagcaccacccagggcgcccaggcccccctgctgcagcagagaccccaggagctgggcgagctgagagtgctgggcagagacgagaccggcagactgagagtggtgtggaccgcccagcccgacaccttcgcctacttccagctgagaatgagagtgcccgagggccccggcgcccacgaggaggtgctgcccggcgacgtgagacaggccctggtgcccccccccccccccggcaccccctacgagctgagcctgcacggcgtgccccccggcggcaagcccagcgaccccatcatctaccagggcatcatggacaaggacgaggagaagcccggcaagagcagcggcccccccagactgggcgagctgaccgtgaccgacagaaccagcgacagcctgctgctgagatggaccgtgcccgagggcgagttcgacagcttcgtgatccagtacaaggacagagacggccagccccaggtggtgcccgtggagggcccccagagaagcgccgtgatcaccagcctggaccccggcagaaagtacaagttcgtgctgtacggcttcgtgggcaagaagagacacggccccctggtggccgaggccaagatcctgccccagagcgaccccagccccggcaccccccccagactgggcaacctgtgggtgaccgaccccacccccgacagcctgcacctgagctggaccgtgcccgagggccagttcgacaccttcatggtgcagtacagagacagagacggcagaccccaggtggtgcccgtggagggccccgagagaagcttcgtggtgagcagcctggaccccgaccacaagtacagattcaccctgttcggcatcgccaacaagaagagatacggccccctgaccgccgacggcaccaccgcccccgagagaaaggaggagcccccccaccccgagttcctggagcagcccctgctgggcgagctgaccgtgaccggcgtgacccccgacagcctgagactgagctggaccgtggcccagggccccttcgacagcttcatggtgcagtacaaggacgcccagggccagccccaggccgtgcccgtggccggcgacgagaacgaggtgaccgtgcccggcctggaccccgacagaaagtacaagatgaacctgtacggcctgagaggcagacagagagtgggccccgagagcgtggtggccaagaccgccccccaggaggacgtggacgagacccccagccccaccgagctgggcaccgaggcccccgagagccccgaggagcccctgctgggcgagctgaccgtgaccggcagcagccccgacagcctgagcctgttctggaccgtgccccagggcagcttcgacagcttcaccgtgcagtacaaggacagagacggcagacccagagccgtgagagtgggcggcaaggagagcgaggtgaccgtgggcggcctggagcccggccacaagtacaagatgcacctgtacggcctgcacgagggccagagagtgggccccgtgagcgccgtgggcgtgaccgccccccagcaggaggagaccccccccgccaccgagagccccctggagcccagactgggcgagctgaccgtgaccgacgtgacccccaacagcgtgggcctgagctggaccgtgcccgagggccagttcgacagcttcatcgtgcagtacaaggacaaggacggccagccccaggtggtgcccgtggccgccgaccagagagaggtgaccgtgtacaacctggagcccgagagaaagtacaagatgaacatgtacggcctgcacgacggccagagaatgggccccctgagcgtggtgatcgtgaccgcccccctgccccccgcccccgccaccgaggccagcaagccccccctggagcccagactgggcgagctgaccgtgaccgacatcacccccgacagcgtgggcctgagctggaccgtgcccgagggcgagttcgacagcttcgtggtgcagtacaaggacagagacggccagccccaggtggtgcccgtggccgccgaccagagagaggtgaccatccccgacctggagcccagcagaaagtacaagttcctgctgttcggcatccaggacggcaagagaagaagccccgtgagcgtggaggccaagaccgtggccagaggcgacgccagccccggcgccccccccagactgggcgagctgtgggtgaccgaccccacccccgacagcctgagactgagctggaccgtgcccgagggccagttcgacagcttcgtggtgcagttcaaggacaaggacggcccccaggtggtgcccgtggagggccacgagagaagcgtgaccgtgacccccctggacgccggcagaaagtacagattcctgctgtacggcctgctgggcaagaagagacacggccccctgaccgccgacggcaccaccgaggccagaagcgccatggacgacaccggcaccaagagaccccccaagcccagactgggcgaggagctgcaggtgaccaccgtgacccagaacagcgtgggcctgagctggaccgtgcccgagggccagttcgacagcttcgtggtgcagtacaaggacagagacggccagccccaggtggtgcccgtggagggcagcctgagagaggtgagcgtgcccggcctggaccccgcccacagatacaagctgctgctgtacggcctgcaccacggcaagagagtgggccccatcagcgccgtggccatcaccgccggcagagaggagaccgagaccgagaccaccgcccccaccccccccgcccccgagccccacctgggcgagctgaccgtggaggaggccaccagccacaccctgcacctgagctggatggtgaccgagggcgagttcgacagcttcgagatccagtacaccgacagagacggccagctgcagatggtgagaatcggcggcgacagaaacgacatcaccctgagcggcctggagagcgaccacagatacctggtgaccctgtacggcttcagcgacggcaagcacgtgggccccgtgcacgtggaggccctgaccgtgcccgaggaggagaagcccagcgagccccccaccgccacccccgagccccccatcaagcccagactgggcgagctgaccgtgaccgacgccacccccgacagcctgagcctgagctggaccgtgcccgagggccagttcgaccacttcctggtgcagtacagaaacggcgacggccagcccaaggccgtgagagtgcccggccacgaggagggcgtgaccatcagcggcctggagcccgaccacaagtacaagatgaacctgtacggcttccacggcggccagagaatgggccccgtgagcgtggtgggcgtgaccgccgccgaggaggagacccccagccccaccgagcccagcatggaggcccccgagcccgccgaggagcccctgctgggcgagctgaccgtgaccggcagcagccccgacagcctgagcctgagctggaccgtgccccagggcagattcgacagcttcaccgtgcagtacaaggacagagacggcagaccccaggtggtgagagtgggcggcgaggagagcgaggtgaccgtgggcggcctggagcccggcagaaagtacaagatgcacctgtacggcctgcacgagggcagaagagtgggccccgtgagcgccgtgggcgtgaccgcccccgaggaggagagccccgacgcccccctggccaagctgagactgggccagatgaccgtgagagacatcaccagcgacagcctgagcctgagctggaccgtgcccgagggccagttcgaccacttcctggtgcagttcaagaacggcgacggccagcccaaggccgtgagagtgcccggccacgaggacggcgtgaccatcagcggcctggagcccgaccacaagtacaagatgaacctgtacggcttccacggcggccagagagtgggccccgtgagcgccgtgggcctgaccgcccccggcaaggacgaggagatggcccccgccagcaccgagccccccacccccgagccccccatcaagcccagactggaggagctgaccgtgaccgacgccacccccgacagcctgagcctgagctggaccgtgcccgagggccagttcgaccacttcctggtgcagtacaagaacggcgacggccagcccaaggccaccagagtgcccggccacgaggacagagtgaccatcagcggcctggagcccgacaacaagtacaagatgaacctgtacggcttccacggcggccagagagtgggccccgtgagcgccatcggcgtgaccgccgccgaggaggagacccccagccccaccgagcccagcatggaggcccccgagccccccgaggagcccctgctgggcgagctgaccgtgaccggcagcagccccgacagcctgagcctgagctggaccgtgccccagggcagattcgacagcttcaccgtgcagtacaaggacagagacggcagaccccaggtggtgagagtgggcggcgaggagagcgaggtgaccgtgggcggcctggagcccggcagaaagtacaagatgcacctgtacggcctgcacgagggcagaagagtgggccccgtgagcaccgtgggcgtgaccgccccccaggaggacgtggacgagacccccagccccaccgagcccggcaccgaggcccccgagccccccgaggagcccctgctgggcgagctgaccgtgaccggcagcagccccgacagcctgagcctgagctggaccgtgccccagggcagattcgacagcttcaccgtgcagtacaaggacagagacggcagaccccaggccgtgagagtgggcggccaggagagcaaggtgaccgtgagaggcctggagcccggcagaaagtacaagatgcacctgtacggcctgcacgagggcagaagactgggccccgtgagcgccgtgggcgtgaccgaggacgaggccgagaccacccaggccgtgcccaccatgacccccgagccccccatcaagcccagactgggcgagctgaccatgaccgacgccacccccgacagcctgagcctgagctggaccgtgcccgagggccagttcgaccacttcctggtgcagtacagaaacggcgacggccagcccaaggccgtgagagtgcccggccacgaggacggcgtgaccatcagcggcctggagcccgaccacaagtacaagatgaacctgtacggcttccacggcggccagagagtgggccccatcagcgtgatcggcgtgaccgccgccgaggaggagacccccagccccaccgagctgagcaccgaggcccccgagccccccgaggagcccctgctgggcgagctgaccgtgaccggcagcagccccgacagcctgagcctgagctggaccatcccccagggccacttcgacagcttcaccgtgcagtacaaggacagagacggcagaccccaggtgatgagagtgagaggcgaggagagcgaggtgaccgtgggcggcctggagcccggcagaaagtacaagatgcacctgtacggcctgcacgagggcagaagagtgggccccgtgagcaccgtgggcgtgaccgtgcccaccaccacccccgagccccccaacaagcccagactgggcgagctgaccgtgaccgacgccacccccgacagcctgagcctgagctggatggtgcccgagggccagttcgaccacttcctggtgcagtacagaaacggcgacggccagcccaaggtggtgagagtgcccggccacgaggacggcgtgaccatcagcggcctggagcccgaccacaagtacaagatgaacctgtacggcttccacggcggccagagagtgggccccatcagcgtgatcggcgtgaccgccgccgaggaggagacccccgcccccaccgagcccagcaccgaggcccccgagccccccgaggagcccctgctgggcgagctgaccgtgaccggcagcagccccgacagcctgagcctgagctggaccatcccccagggcagattcgacagcttcaccgtgcagtacaaggacagagacggcagaccccaggtggtgagagtgagaggcgaggagagcgaggtgaccgtgggcggcctggagcccggctgcaagtacaagatgcacctgtacggcctgcacgagggccagagagtgggccccgtgagcgccgtgggcgtgaccgtgcccaccatgacccccgagccccccatcaagcccagactgggcgagctgaccgtgaccgacgccacccccgacagcctgagcctgagctggatggtgcccgagggccagttcgaccacttcctggtgcagtacagaaacggcgacggccagcccaaggccgtgagagtgcccggccacgaggacggcgtgaccatcagcggcctggagcccgaccacaagtacaagatgaacctgtacggcttccacggcggccagagagtgggccccgtgagcgccatcggcgtgaccgaggaggagacccccagccccaccgagcccagcaccgaggcccccgaggcccccgaggagcccctgctgggcgagctgaccgtgaccggcagcagccccgacagcctgagcctgagctggaccatcccccagggcagattcgacagcttcaccgtgcagtacaaggacagagacggccagccccaggtggtgagagtgagaggcgaggagagcgaggtgaccgtgggcggcctggagcccggcagaaagtacaagatgcacctgtacggcctgcacgagggccagagagtgggccccgtgagcaccgtgggcatcaccgcccccctgcccacccccctgcccgtggagcccagactgggcgagctggccgtggccgccgtgaccagcgacagcgtgggcctgagctggaccgtggcccagggccccttcgacagcttcctggtgcagtacagagacgcccagggccagccccaggccgtgcccgtgagcggcgacctgagagccgtggccgtgagcggcctggaccccgccagaaagtacaagttcctgctgttcggcctgcagaacggcaagagacacggccccgtgcccgtggaggccagaaccgcccccgacaccaagcccagccccagactgggcgagctgaccgtgaccgacgccacccccgacagcgtgggcctgagctggaccgtgcccgagggcgagttcgacagcttcgtggtgcagtacaaggacaaggacggcagactgcaggtggtgcccgtggccgccaaccagagagaggtgaccgtgcagggcctggagcccagcagaaagtacagattcctgctgtacggcctgagcggcagaaagagactgggccccatcagcgccgacagcaccaccgcccccctggagaaggagctgcccccccacctgggcgagctgaccgtggccgaggagaccagcagcagcctgagactgagctggaccgtggcccagggccccttcgacagcttcgtggtgcagtacagagacaccgacggccagcccagagccgtgcccgtggccgccgaccagagaaccgtgaccgtggaggacctggagcccggcaagaagtacaagttcctgctgtacggcctgctgggcggcaagagactgggccccgtgagcgccctgggcatgaccgcccccgaggaggacacccccgcccccgagctggcccccgaggcccccgagccccccgaggagcccagactgggcgtgctgaccgtgaccgacaccacccccgacagcatgagactgagctggagcgtggcccagggccccttcgacagcttcgtggtgcagtacgaggacaccaacggccagccccaggccctgctggtggacggcgaccagagcaagatcctgatcagcggcctggagcccagcaccccctacagattcctgctgtacggcctgcacgagggcaagagactgggccccctgagcgccgagggcaccaccggcctggcccccgccggccagaccagcgaggagagcagacccagactgagccagctgagcgtgaccgacgtgaccaccagcagcctgagactgaactgggaggccccccccggcgccttcgacagcttcctgctgagattcggcgtgcccagccccagcaccctggagccccaccccagacccctgctgcagagagagctgatggtgcccggcaccagacacagcgccgtgctgagagacctgagaagcggcaccctgtacagcctgaccctgtacggcctgagaggcccccacaaggccgacagcatccagggcaccgccagaaccctgagccccgtgctggagagccccagagacctgcagttcagcgagatcagagagaccagcgccaaggtgaactggatgcccccccccagcagagccgacagcttcaaggtgagctaccagctggccgacggcggcgagccccagagcgtgcaggtggacggccaggccagaacccagaagctgcagggcctgatccccggcgccagatacgaggtgaccgtggtgagcgtgagaggcttcgaggagagcgagcccctgaccggcttcctgaccaccgtgcccgacggccccacccagctgagagccctgaacctgaccgagggcttcgccgtgctgcactggaagcccccccagaaccccgtggacacctacgacatccaggtgaccgcccccggcgccccccccctgcaggccgagacccccggcagcgccgtggactaccccctgcacgacctggtgctgcacaccaactacaccgccaccgtgagaggcctgagaggccccaacctgaccagccccgccagcatcaccttcaccaccggcctggaggcccccagagacctggaggccaaggaggtgacccccagaaccgccctgctgacctggaccgagccccccgtgagacccgccggctacctgctgagcttccacacccccggcggccagacccaggagatcctgctgcccggcggcatcaccagccaccagctgctgggcctgttccccagcaccagctacaacgccagactgcaggccacctggggccagagcctgctgccccccgtgagcaccagcttcaccaccggcggcctgagaatccccttccccagagactgcggcgaggagatgcagaacggcgccggcgccagcagaaccagcaccatcttcctgaacggcaacagagagagacccctgaacgtgttctgcgacatggagaccgacggcggcggctggctggtgttccagagaagaatggacggccagaccgacttctggagagactgggaggactacgcccacggcttcggcaacatcagcggcgagttctggctgggcaacgaggccctgcacagcctgacccaggccggcgactacagcatgagagtggacctgagagccggcgacgaggccgtgttcgcccagtacgacagcttccacgtggacagcgccgccgagtactacagactgcacctggagggctaccacggcaccgccggcgacagcatgagctaccacagcggcagcgtgttcagcgccagagacagagaccccaacagcctgctgatcagctgcgccgtgagctacagaggcgcctggtggtacagaaactgccactacgccaacctgaacggcctgtacggcagcaccgtggaccaccagggcgtgagctggtaccactggaagggcttcgagttcagcgtgcccttcaccgagatgaagctgagacccagaaacttcagaagccccgccggcggcggctag

SEQ ID NO: 102134 - DNA, 27 bp, synthetic construct
  misc_feature 1..27: note = Description of Artificial Sequence: Synthetic coding sequence
  source 1..27: mol_type = other DNA
atgatgcccgcccagtacgccctgtag

SEQ ID NO: 102135 - DNA, 6843 bp, synthetic construct
  misc_feature 1..6843: note = Description of Artificial Sequence: Synthetic coding sequence
  source 1..6843: mol_type = other DNA
atgatgcccgcccagtacgccctgaccagcagcctggtgctgctggtgctgctgagcaccgccagagccggccccttcagcagcagaagcaacgtgaccctgcccgcccccagaccccccccccagcccggcggccacaccgtgggcgccggcgtgggcagccccagcagccagctgtacgagcacaccgtggagggcggcgagaagcaggtggtgttcacccacagaatcaacctgccccccagcaccggctgcggctgcccccccggcaccgagccccccgtgctggccagcgaggtgcaggccctgagagtgagactggagatcctggaggagctggtgaagggcctgaaggagcagtgcaccggcggctgctgccccgccagcgcccaggccggcaccggccagaccgacgtgagaaccctgtgcagcctgcacggcgtgttcgacctgagcagatgcacctgcagctgcgagcccggctggggcggccccacctgcagcgaccccaccgacgccgagatcccccccagcagcccccccagcgccagcggcagctgccccgacgactgcaacgaccagggcagatgcgtgagaggcagatgcgtgtgcttccccggctacaccggccccagctgcggctggcccagctgccccggcgactgccagggcagaggcagatgcgtgcagggcgtgtgcgtgtgcagagccggcttcagcggccccgactgcagccagagaagctgccccagaggctgcagccagagaggcagatgcgagggcggcagatgcgtgtgcgaccccggctacaccggcgacgactgcggcatgagaagctgccccagaggctgcagccagagaggcagatgcgagaacggcagatgcgtgtgcaaccccggctacaccggcgaggactgcggcgtgagaagctgccccagaggctgcagccagagaggcagatgcaaggacggcagatgcgtgtgcgaccccggctacaccggcgaggactgcggcaccagaagctgcccctgggactgcggcgagggcggcagatgcgtggacggcagatgcgtgtgctggcccggctacaccggcgaggactgcagcaccagaacctgccccagagactgcagaggcagaggcagatgcgaggacggcgagtgcatctgcgacaccggctacagcggcgacgactgcggcgtgagaagctgccccggcgactgcaaccagagaggcagatgcgaggacggcagatgcgtgtgctggcccggctacaccggcaccgactgcggcagcagagcctgccccagagactgcagaggcagaggcagatgcgagaacggcgtgtgcgtgtgcaacgccggctacagcggcgaggactgcggcgtgagaagctgccccggcgactgcagaggcagaggcagatgcgagagcggcagatgcatgtgctggcccggctacaccggcagagactgcggcaccagagcctgccccggcgactgcagaggcagaggcagatgcgtggacggcagatgcgtgtgcaaccccggcttcaccggcgaggactgcggcagcagaagatgccccggcgactgcagaggccacggcctgtgcgaggacggcgtgtgcgtgtgcgacgccggctacagcggcgaggactgcagcaccagaagctgccccggcggctgcagaggcagaggccagtgcctggacggcagatgcgtgtgcgaggacggctacagcggcgaggactgcggcgtgagacagtgccccaacgactgcagccagcacggcgtgtgccaggacggcgtgtgcatctgctgggagggctacgtgagcgaggactgcagcatcagaacctgccccagcaactgccacggcagaggcagatgcgaggagggcagatgcctgtgcgaccccggctacaccggccccacctgcgccaccagaatgtgccccgccgactgcagaggcagaggcagatgcgtgcagggcgtgtgcctgtgccacgtgggctacggcggcgaggactgcggccaggaggagccccccgccagcgcctgccccggcggctgcggccccagagagctgtgcagagccggccagtgcgtgtgcgtggagggcttcagaggccccgactgcgccatccagacctgccccggcgactgcagaggcagaggcgagtgccacgacggcagctgcgtgtgcaaggacggctacgccggcgaggactgcggcgaggaggtgcccaccatcgagggcatgagaatgcacctgctggaggagaccaccgtgagaaccgagtggacccccgcccccggccccgtggacgcctacgagatccagttcatccccaccaccgagggcgccagcccccccttcaccgccagagtgcccagcagcgccagcgcctacgaccagagaggcctggcccccggccaggagtaccaggtgaccgtgagagccctgagaggcaccagctggggcctgcccgccagcaagaccatcaccaccatgatcgacggcccccaggacctgagagtggtggccgtgacccccaccaccctggagctgggctggctgagaccccaggccgaggtggacagattcgtggtgagctacgtgagcgccggcaaccagagagtgagactggaggtgccccccgaggccgacggcaccctgctgaccgacctgatgcccggcgtggagtacgtggtgaccgtgaccgccgagagaggcagagccgtgagctaccccgccagcgtgagagccaacaccggcagcagccccctgggcctgctgggcaccaccgacgagcccccccccagcggccccagcaccacccagggcgcccaggcccccctgctgcagcagagaccccaggagctgggcgagctgagagtgctgggcagagacgagaccggcagactgagagtggtgtggaccgcccagcccgacaccttcgcctacttccagctgagaatgagagtgcccgagggccccggcgcccacgaggaggtgctgcccggcgacgtgagacaggccctggtgcccccccccccccccggcaccccctacgagctgagcctgcacggcgtgccccccggcggcaagcccagcgaccccatcatctaccagggcatcatggacaaggacgaggagaagcccggcaagagcagcggcccccccagactgggcgagctgaccgtgaccgacagaaccagcgacagcctgctgctgagatggaccgtgcccgagggcgagttcgacagcttcgtgatccagtacaaggacagagacggccagccccaggtggtgcccgtggagggcccccagagaagcgccgtgatcaccagcctggaccccggcagaaagtacaagttcgtgctgtacggcttcgtgggcaagaagagacacggccccctggtggccgaggccaagatcctgccccagagcgaccccagccccggcacccccccccacctgggcaacctgtgggtgaccgaccccacccccgacagcctgcacctgagctggaccgtgcccgagggccagttcgacaccttcatggtgcagtacagagacagagacggcagaccccaggtggtgcccgtggagggccccgagagaagcttcgtggtgagcagcctggaccccgaccacaagtacagattcaccctgttcggcatcgccaacaagaagagatacggccccctgaccgccgacggcaccaccgcccccgagagaaaggaggagccccccagacccgagttcctggagcagcccctgctgggcgagctgaccgtgaccggcgtgacccccgacagcctgagactgagctggaccgtggcccagggccccttcgacagcttcatggtgcagtacaaggacgcccagggccagccccaggccgtgcccgtggccggcgacgagaacgaggtgaccgtgcccggcctggaccccgacagaaagtacaagatgaacctgtacggcctgagaggcagacagagagtgggccccgagagcgtggtggccaagaccgccccccaggaggacgtggacgagacccccagccccaccgagctgggcaccgaggcccccgagagccccgaggagcccctgctgggcgagctgaccgtgaccggcagcagccccgacagcctgagcctgttctggaccgtgccccagggcagcttcgacagcttcaccgtgcagtacaaggacagagacggcagacccagagccgtgagagtgggcggcaaggagagcgaggtgaccgtgggcggcctggagcccggccacaagtacaagatgcacctgtacggcctgcacgagggccagagagtgggccccgtgagcgccgtgggcgtgaccgccccccagcaggaggagaccccccccgccaccgagagccccctggagcccagactgggcgagctgaccgtgaccgacgtgacccccaacagcgtgggcctgagctggaccgtgcccgagggccagttcgacagcttcatcgtgcagtacaaggacaaggacggccagccccaggtggtgcccgtggccgccgaccagagagaggtgaccgtgtacaacctggagcccgagagaaagtacaagatgaacatgtacggcctgcacgacggccagagaatgggccccctgagcgtggtgatcgtgaccgcccccctgccccccgcccccgccaccgaggccagcaagccccccctggagcccagactgggcgagctgaccgtgaccgacatcacccccgacagcgtgggcctgagctggaccgtgcccgagggcgagttcgacagcttcgtggtgcagtacaaggacagagacggccagccccaggtggtgcccgtggccgccgaccagagagaggtgaccatccccgacctggagcccagcagaaagtacaagttcctgctgttcggcatccaggacggcaagagaagaagccccgtgagcgtggaggccaagaccgtggccagaggcgacgccagccccggcgccccccccagactgggcgagctgtgggtgaccgaccccacccccgacagcctgagactgagctggaccgtgcccgagggccagttcgacagcttcgtggtgcagttcaaggacaaggacggcccccaggtggtgcccgtggagggccacgagagaagcgtgaccgtgacccccctggacgccggcagaaagtacagattcctgctgtacggcctgctgggcaagaagagacacggccccctgaccgccgacggcaccaccgaggccagaagcgccatggacgacaccggcaccaagagaccccccaagcccagactgggcgaggagctgcaggtgaccaccgtgacccagaacagcgtgggcctgagctggaccgtgcccgagggccagttcgacagcttcgtggtgcagtacaaggacagagacggccagccccaggtggtgcccgtggagggcagcctgagagaggtgagcgtgcccggcctggaccccgcccacagatacaagctgctgctgtacggcctgcaccacggcaagagagtgggccccatcagcgccgtggccatcaccgccggcagagaggagaccgagaccgagaccaccgcccccaccccccccgcccccgagccccacctgggcgagctgaccgtggaggaggccaccagccacaccctgcacctgagctggatggtgaccgagggcgagttcgacagcttcgagatccagtacaccgacagagacggccagctgcagatggtgagaatcggcggcgacagaaacgacatcaccctgagcggcctggagagcgaccacagatacctggtgaccctgtacggcttcagcgacggcaagcacgtgggccccgtgcacgtggaggccctgaccgtgcccgaggaggagaagcccagcgagccccccaccgccacccccgagccccccatcaagcccagactgggcgagctgaccgtgaccgacgccacccccgacagcctgagcctgagctggaccgtgcccgagggccagttcgaccacttcctggtgcagtacagaaacggcgacggccagcccaaggccgtgagagtgcccggccacgaggagggcgtgaccatcagcggcctggagcccgaccacaagtacaagatgaacctgtacggcttccacggcggccagagaatgggccccgtgagcgtggtgggcgtgaccgccgccgaggaggagacccccagccccaccgagcccagcatggaggcccccgagcccgccgaggagcccctgctgggcgagctgaccgtgaccggcagcagccccgacagcctgagcctgagctggaccgtgccccagggcagattcgacagcttcaccgtgcagtacaaggacagagacggcagaccccaggtggtgagagtgggcggcgaggagagcgaggtgaccgtgggcggcctggagcccggcagaaagtacaagatgcacctgtacggcctgcacgagggcagaagagtgggccccgtgagcgccgtgggcgtgaccgcccccgaggaggagagccccgacgcccccctggccaagctgagactgggccagatgaccgtgagagacatcaccagcgacagcctgagcctgagctggaccgtgcccgagggccagttcgaccacttcctggtgcagttcaagaacggcgacggccagcccaaggccgtgagagtgcccggccacgaggacggcgtgaccatcagcggcctggagcccgaccacaagtacaagatgaacctgtacggcttccacggcggccagagagtgggccccgtgagcgccgtgggcctgacctag

SEQ ID NO: 102136 - DNA, 2022 bp, synthetic construct
  misc_feature 1..2022: note = Description of Artificial Sequence: Synthetic coding sequence
  source 1..2022: mol_type = other DNA
atgagactgagctggagcgtggcccagggccccttcgacagcttcgtggtgcagtacgaggacaccaacggccagccccaggccctgctggtggacggcgaccagagcaagatcctgatcagcggcctggagcccagcaccccctacagattcctgctgtacggcctgcacgagggcaagagactgggccccctgagcgccgagggcaccaccggcctggcccccgccggccagaccagcgaggagagcagacccagactgagccagctgagcgtgaccgacgtgaccaccagcagcctgagactgaactgggaggccccccccggcgccttcgacagcttcctgctgagattcggcgtgcccagccccagcaccctggagccccaccccagacccctgctgcagagagagctgatggtgcccggcaccagacacagcgccgtgctgagagacctgagaagcggcaccctgtacagcctgaccctgtacggcctgagaggcccccacaaggccgacagcatccagggcaccgccagaaccctgagccccgtgctggagagccccagagacctgcagttcagcgagatcagagagaccagcgccaaggtgaactggatgcccccccccagcagagccgacagcttcaaggtgagctaccagctggccgacggcggcgagccccagagcgtgcaggtggacggccaggccagaacccagaagctgcagggcctgatccccggcgccagatacgaggtgaccgtggtgagcgtgagaggcttcgaggagagcgagcccctgaccggcttcctgaccaccgtgcccgacggccccacccagctgagagccctgaacctgaccgagggcttcgccgtgctgcactggaagcccccccagaaccccgtggacacctacgacatccaggtgaccgcccccggcgccccccccctgcaggccgagacccccggcagcgccgtggactaccccctgcacgacctggtgctgcacaccaactacaccgccaccgtgagaggcctgagaggccccaacctgaccagccccgccagcatcaccttcaccaccggcctggaggcccccagagacctggaggccaaggaggtgacccccagaaccgccctgctgacctggaccgagccccccgtgagacccgccggctacctgctgagcttccacacccccggcggccagacccaggagatcctgctgcccggcggcatcaccagccaccagctgctgggcctgttccccagcaccagctacaacgccagactgcaggccatgtggggccagagcctgctgccccccgtgagcaccagcttcaccaccggcggcctgagaatccccttccccagagactgcggcgaggagatgcagaacggcgccggcgccagcagaaccagcaccatcttcctgaacggcaacagagagagacccctgatcgtgttctgcgacatggagaccgacggcggcggctggctggtgttccagagaagaatggacggccagaccgacttctggagagactgggaggactacgcccacggcttcggcaacatcagcggcgagttctggctgggcaacgaggccctgcacagcctgacccaggccggcgactacagcatgagagtggacctgagagccggcgacgaggccgtgttcgcccagtacgacagcttccacgtggacagcgccgccgagtactacagactgcacctggagggctaccacggcaccgccggcgacagcatgagctaccacagcggcagcgtgttcagcgccagagacagagaccccaacagcctgctgatcagctgcgccgtgagctacagaggcgcctggtggtacagaaactgccactacgccaacctgaacggcctgtacggcagcaccgtggaccaccagggcgtgagctggtaccactggaagggcttcgagttcagcgtgcccttcaccgagatgaagctgagacccagaaacttcagaagccccgccggcggcggctag

SEQ ID NO: 102137 - DNA, 654 bp, synthetic construct
  misc_feature 1..654: note = Description of Artificial Sequence: Synthetic coding sequence
  source 1..654: mol_type = other DNA
gcccccggcaaggacgaggagatggcccccgccagcaccgagccccccacccccgagccccccatcaagcccagactggaggagctgaccgtgaccgacgccacccccgacagcctgagcctgagctggaccgtgcccgagggccagttcgaccacttcctggtgcagtacaagaacggcgacggccagcccaaggccaccagagtgcccggccacgaggacagagtgaccatcagcggcctggagcccgacaacaagtacaagatgaacctgtacggcttccacggcggccagagagtgggccccgtgagcgccatcggcgtgaccgccgccgaggaggagacccccagccccaccgagcccagcatggaggcccccgagccccccgaggagcccctgctgggcgagctgaccgtgaccggcagcagccccgacagcctgagcctgagctggaccgtgccccagggcagattcgacagcttcaccgtgcagtacaaggacagagacggcagaccccaggtggtgagagtgggcggcgaggagagcgaggtgaccgtgggcggcctggagcccggcagaaagtacaagatgcacctgtacggcctgcacgagggcagaagagtgggccccgtgagcaccgtgggcgtgacctag

SEQ ID NO: 102138 - DNA, 12729 bp, synthetic construct
  misc_feature 1..12729: note = Description of Artificial Sequence: Synthetic coding sequence
  source 1..12729: mol_type = other DNA
atgatgcccgcccagtacgccctgaccagcagcctggtgctgctggtgctgctgagcaccgccagagccggccccttcagcagcagaagcaacgtgaccctgcccgcccccagaccccccccccagcccggcggccacaccgtgggcgccggcgtgggcagccccagcagccagctgtacgagcacaccgtggagggcggcgagaagcaggtggtgttcacccacagaatcaacctgccccccagcaccggctgcggctgcccccccggcaccgagccccccgtgctggccagcgaggtgcaggccctgagagtgagactggagatcctggaggagctggtgaagggcctgaaggagcagtgcaccggcggctgctgccccgccagcgcccaggccggcaccggccagaccgacgtgagaaccctgtgcagcctgcacggcgtgttcgacctgagcagatgcacctgcagctgcgagcccggctggggcggccccacctgcagcgaccccaccgacgccgagatcccccccagcagcccccccagcgccagcggcagctgccccgacgactgcaacgaccagggcagatgcgtgagaggcagatgcgtgtgcttccccggctacaccggccccagctgcggctggcccagctgccccggcgactgccagggcagaggcagatgcgtgcagggcgtgtgcgtgtgcagagccggcttcagcggccccgactgcagccagagaagctgccccagaggctgcagccagagaggcagatgcgagggcggcagatgcgtgtgcgaccccggctacaccggcgacgactgcggcatgagaagctgccccagaggctgcagccagagaggcagatgcgagaacggcagatgcgtgtgcaaccccggctacaccggcgaggactgcggcgtgagaagctgccccagaggctgcagccagagaggcagatgcaaggacggcagatgcgtgtgcgaccccggctacaccggcgaggactgcggcaccagaagctgcccctgggactgcggcgagggcggcagatgcgtggacggcagatgcgtgtgctggcccggctacaccggcgaggactgcagcaccagaacctgccccagagactgcagaggcagaggcagatgcgaggacggcgagtgcatctgcgacaccggctacagcggcgacgactgcggcgtgagaagctgccccggcgactgcaaccagagaggcagatgcgaggacggcagatgcgtgtgctggcccggctacaccggcaccgactgcggcagcagagcctgccccagagactgcagaggcagaggcagatgcgagaacggcgtgtgcgtgtgcaacgccggctacagcggcgaggactgcggcgtgagaagctgccccggcgactgcagaggcagaggcagatgcgagagcggcagatgcatgtgctggcccggctacaccggcagagactgcggcaccagagcctgccccggcgactgcagaggcagaggcagatgcgtggacggcagatgcgtgtgcaaccccggcttcaccggcgaggactgcggcagcagaagatgccccggcgactgcagaggccacggcctgtgcgaggacggcgtgtgcgtgtgcgacgccggctacagcggcgaggactgcagcaccagaagctgccccggcggctgcagaggcagaggccagtgcctggacggcagatgcgtgtgcgaggacggctacagcggcgaggactgcggcgtgagacagtgccccaacgactgcagccagcacggcgtgtgccaggacggcgtgtgcatctgctgggagggctacgtgagcgaggactgcagcatcagaacctgccccagcaactgccacggcagaggcagatgcgaggagggcagatgcctgtgcgaccccggctacaccggccccacctgcgccaccagaatgtgccccgccgactgcagaggcagaggcagatgcgtgcagggcgtgtgcctgtgccacgtgggctacggcggcgaggactgcggccaggaggagccccccgccagcgcctgccccggcggctgcggccccagagagctgtgcagagccggccagtgcgtgtgcgtggagggcttcagaggccccgactgcgccatccagacctgccccggcgactgcagaggcagaggcgagtgccacgacggcagctgcgtgtgcaaggacggctacgccggcgaggactgcggcgaggaggtgcccaccatcgagggcatgagaatgcacctgctggaggagaccaccgtgagaaccgagtggacccccgcccccggccccgtggacgcctacgagatccagttcatccccaccaccgagggcgccagcccccccttcaccgccagagtgcccagcagcgccagcgcctacgaccagagaggcctggcccccggccaggagtaccaggtgaccgtgagagccctgagaggcaccagctggggcctgcccgccagcaagaccatcaccaccatgatcgacggcccccaggacctgagagtggtggccgtgacccccaccaccctggagctgggctggctgagaccccaggccgaggtggacagattcgtggtgagctacgtgagcgccggcaaccagagagtgagactggaggtgccccccgaggccgacggcaccctgctgaccgacctgatgcccggcgtggagtacgtggtgaccgtgaccgccgagagaggcagagccgtgagctaccccgccagcgtgagagccaacaccggcagcagccccctgggcctgctgggcaccaccgacgagcccccccccagcggccccagcaccacccagggcgcccaggcccccctgctgcagcagagaccccaggagctgggcgagctgagagtgctgggcagagacgagaccggcagactgagagtggtgtggaccgcccagcccgacaccttcgcctacttccagctgagaatgagagtgcccgagggccccggcgcccacgaggaggtgctgcccggcgacgtgagacaggccctggtgcccccccccccccccggcaccccctacgagctgagcctgcacggcgtgccccccggcggcaagcccagcgaccccatcatctaccagggcatcatggacaaggacgaggagaagcccggcaagagcagcggcccccccagactgggcgagctgaccgtgaccgacagaaccagcgacagcctgctgctgagatggaccgtgcccgagggcgagttcgacagcttcgtgatccagtacaaggacagagacggccagccccaggtggtgcccgtggagggcccccagagaagcgccgtgatcaccagcctggaccccggcagaaagtacaagttcgtgctgtacggcttcgtgggcaagaagagacacggccccctggtggccgaggccaagatcctgccccagagcgaccccagccccggcaccccccccagactgggcaacctgtgggtgaccgaccccacccccgacagcctgcacctgagctggaccgtgcccgagggccagttcgacaccttcatggtgcagtacagagacagagacggcagaccccaggtggtgcccgtggagggccccgagagaagcttcgtggtgagcagcctggaccccgaccacaagtacagattcaccctgttcggcatcgccaacaagaagagatacggccccctgaccgccgacggcaccaccgcccccgagagaaaggaggagccccccagacccgagttcctggagcagcccctgctgggcgagctgaccgtgaccggcgtgacccccgacagcctgagactgagctggaccgtggcccagggccccttcgacagcttcatggtgcagtacaaggacgcccagggccagccccaggccgtgcccgtggccggcgacgagaacgaggtgaccgtgcccggcctggaccccgacagaaagtacaagatgaacctgtacggcctgagaggcagacagagagtgggccccgagagcgtggtggccaagaccgccccccaggaggacgtggacgagacccccagccccaccgagctgggcaccgaggcccccgagagccccgaggagcccctgctgggcgagctgaccgtgaccggcagcagccccgacagcctgagcctgttctggaccgtgccccagggcagcttcgacagcttcaccgtgcagtacaaggacagagacggcagacccagagccgtgagagtgggcggcaaggagagcgaggtgaccgtgggcggcctggagcccggccacaagtacaagatgcacctgtacggcctgcacgagggccagagagtgggccccgtgagcgccgtgggcgtgaccgccccccagcaggaggagaccccccccgccaccgagagccccctggagcccagactgggcgagctgaccgtgaccgacgtgacccccaacagcgtgggcctgagctggaccgtgcccgagggccagttcgacagcttcatcgtgcagtacaaggacaaggacggccagccccaggtggtgcccgtggccgccgaccagagagaggtgaccgtgtacaacctggagcccgagagaaagtacaagatgaacatgtacggcctgcacgacggccagagaatgggccccctgagcgtggtgatcgtgaccgcccccctgccccccgcccccgccaccgaggccagcaagccccccctggagcccagactgggcgagctgaccgtgaccgacatcacccccgacagcgtgggcctgagctggaccgtgcccgagggcgagttcgacagcttcgtggtgcagtacaaggacagagacggccagccccaggtggtgcccgtggccgccgaccagagagaggtgaccatccccgacctggagcccagcagaaagtacaagttcctgctgttcggcatccaggacggcaagagaagaagccccgtgagcgtggaggccaagaccgtggccagaggcgacgccagccccggcgccccccccagactgggcgagctgtgggtgaccgaccccacccccgacagcctgagactgagctggaccgtgcccgagggccagttcgacagcttcgtggtgcagttcaaggacaaggacggcccccaggtggtgcccgtggagggccacgagagaagcgtgaccgtgacccccctggacgccggcagaaagtacagattcctgctgtacggcctgctgggcaagaagagacacggccccctgaccgccgacggcaccaccgaggccagaagcgccatggacgacaccggcaccaagagaccccccaagcccagactgggcgaggagctgcaggtgaccaccgtgacccagaacagcgtgggcctgagctggaccgtgcccgagggccagttcgacagcttcgtggtgcagtacaaggacagagacggccagccccaggtggtgcccgtggagggcagcctgagagaggtgagcgtgcccggcctggaccccgcccacagatacaagctgctgctgtacggcctgcaccacggcaagagagtgggccccatcagcgccgtggccatcaccgccggcagagaggagaccgagaccgagaccaccgcccccaccccccccgcccccgagccccacctgggcgagctgaccgtggaggaggccaccagccacaccctgcacctgagctggatggtgaccgagggcgagttcgacagcttcgagatccagtacaccgacagagacggccagctgcagatggtgagaatcggcggcgacagaaacgacatcaccctgagcggcctggagagcgaccacagatacctggtgaccctgtacggcttcagcgacggcaagcacgtgggccccgtgcacgtggaggccctgaccgtgcccgaggaggagaagcccagcgagccccccaccgccacccccgagccccccatcaagcccagactgggcgagctgaccgtgaccgacgccacccccgacagcctgagcctgagctggaccgtgcccgagggccagttcgaccacttcctggtgcagtacagaaacggcgacggccagcccaaggccgtgagagtgcccggccacgaggagggcgtgaccatcagcggcctggagcccgaccacaagtacaagatgaacctgtacggcttccacggcggccagagaatgggccccgtgagcgtggtgggcgtgaccgccgccgaggaggagacccccagccccaccgagcccagcatggaggcccccgagcccgccgaggagcccctgctgggcgagctgaccgtgaccggcagcagccccgacagcctgagcctgagctggaccgtgccccagggcagattcgacagcttcaccgtgcagtacaaggacagagacggcagaccccaggtggtgagagtgggcggcgaggagagcgaggtgaccgtgggcggcctggagcccggcagaaagtacaagatgcacctgtacggcctgcacgagggcagaagagtgggccccgtgagcgccgtgggcgtgaccgcccccgaggaggagagccccgacgcccccctggccaagctgagactgggccagatgaccgtgagagacatcaccagcgacagcctgagcctgagctggaccgtgcccgagggccagttcgaccacttcctggtgcagttcaagaacggcgacggccagcccaaggccgtgagagtgcccggccacgaggacggcgtgaccatcagcggcctggagcccgaccacaagtacaagatgaacctgtacggcttccacggcggccagagagtgggccccgtgagcgccgtgggcctgaccgcccccggcaaggacgaggagatggcccccgccagcaccgagccccccacccccgagccccccatcaagcccagactggaggagctgaccgtgaccgacgccacccccgacagcctgagcctgagctggaccgtgcccgagggccagttcgaccacttcctggtgcagtacaagaacggcgacggccagcccaaggccaccagagtgcccggccacgaggacagagtgaccatcagcggcctggagcccgacaacaagtacaagatgaacctgtacggcttccacggcggccagagagtgggccccgtgagcgccatcggcgtgaccgccgccgaggaggagacccccagccccaccgagcccagcatggaggcccccgagccccccgaggagcccctgctgggcgagctgaccgtgaccggcagcagccccgacagcctgagcctgagctggaccgtgccccagggcagattcgacagcttcaccgtgcagtacaaggacagagacggcagaccccaggtggtgagagtgggcggcgaggagagcgaggtgaccgtgggcggcctggagcccggcagaaagtacaagatgcacctgtacggcctgcacgagggcagaagagtgggccccgtgagcaccgtgggcgtgaccgccccccaggaggacgtggacgagacccccagccccaccgagcccggcaccgaggcccccgagccccccgaggagcccctgctgggcgagctgaccgtgaccggcagcagccccgacagcctgagcctgagctggaccgtgccccagggcagattcgacagcttcaccgtgcagtacaaggacagagacggcagaccccaggccgtgagagtgggcggccaggagagcaaggtgaccgtgagaggcctggagcccggcagaaagtacaagatgcacctgtacggcctgcacgagggcagaagactgggccccgtgagcgccgtgggcgtgaccgaggacgaggccgagaccacccaggccgtgcccaccatgacccccgagccccccatcaagcccagactgggcgagctgaccatgaccgacgccacccccgacagcctgagcctgagctggaccgtgcccgagggccagttcgaccacttcctggtgcagtacagaaacggcgacggccagcccaaggccgtgagagtgcccggccacgaggacggcgtgaccatcagcggcctggagcccgaccacaagtacaagatgaacctgtacggcttccacggcggccagagagtgggccccatcagcgtgatcggcgtgaccgccgccgaggaggagacccccagccccaccgagctgagcaccgaggcccccgagccccccgaggagcccctgctgggcgagctgaccgtgaccggcagcagccccgacagcctgagcctgagctggaccatcccccagggccacttcgacagcttcaccgtgcagtacaaggacagagacggcagaccccaggtgatgagagtgagaggcgaggagagcgaggtgaccgtgggcggcctggagcccggcagaaagtacaagatgcacctgtacggcctgcacgagggcagaagagtgggccccgtgagcaccgtgggcgtgaccgaggacgaggccgagaccacccaggccgtgcccaccaccacccccgagccccccaacaagcccagactgggcgagctgaccgtgaccgacgccacccccgacagcctgagcctgagctggatggtgcccgagggccagttcgaccacttcctggtgcagtacagaaacggcgacggccagcccaaggtggtgagagtgcccggccacgaggacggcgtgaccatcagcggcctggagcccgaccacaagtacaagatgaacctgtacggcttccacggcggccagagagtgggccccatcagcgtgatcggcgtgaccgccgccgaggaggagacccccgcccccaccgagcccagcaccgaggcccccgagccccccgaggagcccctgctgggcgagctgaccgtgaccggcagcagccccgacagcctgagcctgagctggaccatcccccagggcagattcgacagcttcaccgtgcagtacaaggacagagacggcagaccccaggtggtgagagtgagaggcgaggagagcgaggtgaccgtgggcggcctggagcccggctgcaagtacaagatgcacctgtacggcctgcacgagggccagagagtgggccccgtgagcgccgtgggcgtgaccgcccccaaggacgaggccgagaccacccaggccgtgcccaccatgacccccgagccccccatcaagcccagactgggcgagctgaccgtgaccgacgccacccccgacagcctgagcctgagctggatggtgcccgagggccagttcgaccacttcctggtgcagtacagaaacggcgacggccagcccaaggccgtgagagtgcccggccacgaggacggcgtgaccatcagcggcctggagcccgaccacaagtacaagatgaacctgtacggcttccacggcggccagagagtgggccccgtgagcgccatcggcgtgaccgaggaggagacccccagccccaccgagcccagcaccgaggcccccgaggcccccgaggagcccctgctgggcgagctgaccgtgaccggcagcagccccgacagcctgagcctgagctggaccgtgccccagggcagattcgacagcttcaccgtgcagtacaaggacagagacggccagccccaggtggtgagagtgagaggcgaggagagcgaggtgaccgtgggcggcctggagcccggcagaaagtacaagatgcacctgtacggcctgcacgagggccagagagtgggccccgtgagcaccgtgggcatcaccgcccccctgcccacccccctgcccgtggagcccagactgggcgagctggccgtggccgccgtgaccagcgacagcgtgggcctgagctggaccgtggcccagggccccttcgacagcttcctggtgcagtacagagacgcccagggccagccccaggccgtgcccgtgagcggcgacctgagagccgtggccgtgagcggcctggaccccgccagaaagtacaagttcctgctgttcggcctgcagaacggcaagagacacggccccgtgcccgtggaggccagaaccgcccccgacaccaagcccagccccagactgggcgagctgaccgtgaccgacgccacccccgacagcgtgggcctgagctggaccgtgcccgagggcgagttcgacagcttcgtggtgcagtacaaggacaaggacggcagactgcaggtggtgcccgtggccgccaaccagagagaggtgaccgtgcagggcctggagcccagcagaaagtacagattcctgctgtacggcctgagcggcagaaagagactgggccccatcagcgccgacagcaccaccgcccccctggagaaggagctgcccccccacctgggcgagctgaccgtggccgaggagaccagcagcagcctgagactgagctggaccgtggcccagggccccttcgacagcttcgtggtgcagtacagagacaccgacggccagcccagagccgtgcccgtggccgccgaccagagaaccgtgaccgtggaggacctggagcccggcaagaagtacaagttcctgctgtacggcctgctgggcggcaagagactgggccccgtgagcgccctgggcatgaccgcccccgaggaggacacccccgcccccgagctggcccccgaggcccccgagccccccgaggagcccagactgggcgtgctgaccgtgaccgacaccacccccgacagcatgagactgagctggagcgtggcccagggccccttcgacagcttcgtggtgcagtacgaggacaccaacggccagccccaggccctgctggtggacggcgaccagagcaagatcctgatcagcggcctggagcccagcaccccctacagattcctgctgtacggcctgcacgagggcaagagactgggccccctgagcgccgagggcaccaccggcctggcccccgccggccagaccagcgaggagagcagacccagactgagccagctgagcgtgaccgacgtgaccaccagcagcctgagactgaactgggaggccccccccggcgccttcgacagcttcctgctgagattcggcgtgcccagccccagcaccctggagccccaccccagacccctgctgcagagagagctgatggtgcccggcaccagacacagcgccgtgctgagagacctgagaagcggcaccctgtacagcctgaccctgtacggcctgagaggcccccacaaggccgacagcatccagggcaccgccagaaccctgagccccgtgctggagagccccagagacctgcagttcagcgagatcagagagaccagcgccaaggtgaactggatgcccccccccagcagagccgacagcttcaaggtgagctaccagctggccgacggcggcgagccccagagcgtgcaggtggacggccaggccagaacccagaagctgcagggcctgatccccggcgccagatacgaggtgaccgtggtgagcgtgagaggcttcgaggagagcgagcccctgaccggcttcctgaccaccgtgcccgacggccccacccagctgagagccctgaacctgaccgagggcttcgccgtgctgcactggaagcccccccagaaccccgtggacacctacgacatccaggtgaccgcccccggcgccccccccctgcaggccgagacccccggcagcgccgtggactaccccctgcacgacctggtgctgcacaccaactacaccgccaccgtgagaggcctgagaggccccaacctgaccagccccgccagcatcaccttcaccaccggcctggaggcccccagagacctggaggccaaggaggtgacccccagaaccgccctgctgacctggaccgagccccccgtgagacccgccggctacctgctgagcttccacacccccggcggccagacccaggagatcctgctgcccggcggcatcaccagccaccagctgctgggcctgttccccagcaccagctacaacgccagactgcaggccatgtggggccagagcctgctgccccccgtgagcaccagcttcaccaccggcggcctgagaatccccttccccagagactgcggcgaggagatgcagaacggcgccggcgccagcagaaccagcaccatcttcctgaacggcaacagagagagacccctgatcgtgttctgcgacatggagaccgacggcggcggctggctggtgttccagagaagaatggacggccagaccgacttctggagagactgggaggactacgcccacggcttcggcaacatcagcggcgagttctggctgggcaacgaggccctgcacagcctgacccaggccggcgactacagcatgagagtggacctgagagccggcgacgaggccgtgttcgcccagtacgacagcttccacgtggacagcgccgccgagtactacagactgcacctggagggctaccacggcaccgccggcgacagcatgagctaccacagcggcagcgtgttcagcgccagagacagagaccccaacagcctgctgatcagctgcgccgtgagctacagaggcgcctggtggtacagaaactgccactacgccaacctgaacggcctgtacggcagcaccgtggaccaccagggcgtgagctggtaccactggaagggcttcgagttcagcgtgcccttcaccgagatgaagctgagacccagaaacttcagaagccccgccggcggcggctag

SEQ ID NO: 102139 - DNA, 12729 bp, synthetic construct
  misc_feature 1..12729: note = Description of Artificial Sequence: Synthetic coding sequence
  source 1..12729: mol_type = other DNA
atgatgcccgcccagtacgccctgaccagcagcctggtgctgctggtgctgctgagcaccgccagagccggccccttcagcagcagaagcaacgtgaccctgcccgcccccagaccccccccccagcccggcggccacaccgtgggcgccggcgtgggcagccccagcagccagctgtacgagcacaccgtggagggcggcgagaagcaggtggtgttcacccacagaatcaacctgccccccagcaccggctgcggctgcccccccggcaccgagccccccgtgctggccagcgaggtgcaggccctgagagtgagactggagatcctggaggagctggtgaagggcctgaaggagcagtgcaccggcggctgctgccccgccagcgcccaggccggcaccggccagaccgacgtgagaaccctgtgcagcctgcacggcgtgttcgacctgagcagatgcacctgcagctgcgagcccggctggggcggccccacctgcagcgaccccaccgacgccgagatcccccccagcagcccccccagcgccagcggcagctgccccgacgactgcaacgaccagggcagatgcgtgagaggcagatgcgtgtgcttccccggctacaccggccccagctgcggctggcccagctgccccggcgactgccagggcagaggcagatgcgtgcagggcgtgtgcgtgtgcagagccggcttcagcggccccgactgcagccagagaagctgccccagaggctgcagccagagaggcagatgcgagggcggcagatgcgtgtgcgaccccggctacaccggcgacgactgcggcatgagaagctgccccagaggctgcagccagagaggcagatgcgagaacggcagatgcgtgtgcaaccccggctacgccggcgaggactgcggcgtgagaagctgccccagaggctgcagccagagaggcagatgcaaggacggcagatgcgtgtgcgaccccggctacaccggcgaggactgcggcaccagaagctgcccctgggactgcggcgagggcggcagatgcgtggacggcagatgcgtgtgctggcccggctacaccggcgaggactgcagcaccagaacctgccccagagactgcagaggcagaggcagatgcgaggacggcgagtgcatctgcgacaccggctacagcggcgacgactgcggcgtgagaagctgccccggcgactgcaaccagagaggcagatgcgaggacggcagatgcgtgtgctggcccggctacaccggcaccgactgcggcagcagagcctgccccagagactgcagaggcagaggcagatgcgagaacggcgtgtgcgtgtgcaacgccggctacagcggcgaggactgcggcgtgagaagctgccccggcgactgcagaggcagaggcagatgcgagagcggcagatgcatgtgctggcccggctacaccggcagagactgcggcaccagagcctgccccggcgactgcagaggcagaggcagatgcgtggacggcagatgcgtgtgcaaccccggcttcaccggcgaggactgcggcagcagaagatgccccggcgactgcagaggccacggcctgtgcgaggacggcgtgtgcgtgtgcgacgccggctacagcggcgaggactgcagcaccagaagctgccccggcggctgcagaggcagaggccagtgcctggacggcagatgcgtgtgcgaggacggctacagcggcgaggactgcggcgtgagacagtgccccaacgactgcagccagcacggcgtgtgccaggacggcgtgtgcatctgctgggagggctacgtgagcgaggactgcagcatcagaacctgccccagcaactgccacggcagaggcagatgcgaggagggcagatgcctgtgcgaccccggctacaccggccccacctgcgccaccagaatgtgccccgccgactgcagaggcagaggcagatgcgtgcagggcgtgtgcctgtgccacgtgggctacggcggcgaggactgcggccaggaggagccccccgccagcgcctgccccggcggctgcggccccagagagctgtgcagagccggccagtgcgtgtgcgtggagggcttcagaggccccgactgcgccatccagacctgccccggcgactgcagaggcagaggcgagtgccacgacggcagctgcgtgtgcaaggacggctacgccggcgaggactgcggcgaggaggtgcccaccatcgagggcatgagaatgcacctgctggaggagaccaccgtgagaaccgagtggacccccgcccccggccccgtggacgcctacgagatccagttcatccccaccaccgagggcgccagcccccccttcaccgccagagtgcccagcagcgccagcgcctacgaccagagaggcctggcccccggccaggagtaccaggtgaccgtgagagccctgagaggcaccagctggggcctgcccgccagcaagaccatcaccaccatgatcgacggcccccaggacctgagagtggtggccgtgacccccaccaccctggagctgggctggctgagaccccaggccgaggtggacagattcgtggtgagctacgtgagcgccggcaaccagagagtgagactggaggtgccccccgaggccgacggcaccctgctgaccgacctgatgcccggcgtggagtacgtggtgaccgtgaccgccgagagaggcagagccgtgagctaccccgccagcgtgagagccaacaccggcagcagccccctgggcctgctgggcaccaccgacgagcccccccccagcggccccagcaccacccagggcgcccaggcccccctgctgcagcagagaccccaggagctgggcgagctgagagtgctgggcagagacgagaccggcagactgagagtggtgtggaccgcccagcccgacaccttcgcctacttccagctgagaatgagagtgcccgagggccccggcgcccacgaggaggtgctgcccggcgacgtgagacaggccctggtgcccccccccccccccggcaccccctacgagctgagcctgcacggcgtgccccccggcggcaagcccagcgaccccatcatctaccagggcatcatggacaaggacgaggagaagcccggcaagagcagcggcccccccagactgggcgagctgaccgtgaccgacagaaccagcgacagcctgctgctgagatggaccgtgcccgagggcgagttcgacagcttcgtgatccagtacaaggacagagacggccagccccaggtggtgcccgtggagggcccccagagaagcgccgtgatcaccagcctggaccccggcagaaagtacaagttcgtgctgtacggcttcgtgggcaagaagagacacggccccctggtggccgaggccaagatcctgccccagagcgaccccagccccggcacccccccccacctgggcaacctgtgggtgaccgaccccacccccgacagcctgcacctgagctggaccgtgcccgagggccagttcgacaccttcatggtgcagtacagagacagagacggcagaccccaggtggtgcccgtggagggccccgagagaagcttcgtggtgagcagcctggaccccgaccacaagtacagattcaccctgttcggcatcgccaacaagaagagatacggccccctgaccgccgacggcaccaccgcccccgagagaaaggaggagccccccagacccgagttcctggagcagcccctgctgggcgagctgaccgtgaccggcgtgacccccgacagcctgagactgagctggaccgtggcccagggccccttcgacagcttcatggtgcagtacaaggacgcccagggccagccccaggccgtgcccgtggccggcgacgagaacgaggtgaccgtgcccggcctggaccccgacagaaagtacaagatgaacctgtacggcctgagaggcagacagagagtgggccccgagagcgtggtggccaagaccgccccccaggaggacgtggacgagacccccagccccaccgagctgggcaccgaggcccccgagagccccgaggagcccctgctgggcgagctgaccgtgaccggcagcagccccgacagcctgagcctgttctggaccgtgccccagggcagcttcgacagcttcaccgtgcagtacaaggacagagacggcagacccagagccgtgagagtgggcggcaaggagagcgaggtgaccgtgggcggcctggagcccggccacaagtacaagatgcacctgtacggcctgcacgagggccagagagtgggccccgtgagcgccgtgggcgtgaccgccccccagcaggaggagaccccccccgccaccgagagccccctggagcccagactgggcgagctgaccgtgaccgacgtgacccccaacagcgtgggcctgagctggaccgtgcccgagggccagttcgacagcttcatcgtgcagtacaaggacaaggacggccagccccaggtggtgcccgtggccgccgaccagagagaggtgaccgtgtacaacctggagcccgagagaaagtacaagatgaacatgtacggcctgcacgacggccagagaatgggccccctgagcgtggtgatcgtgaccgcccccctgccccccgcccccgccaccgaggccagcaagccccccctggagcccagactgggcgagctgaccgtgaccgacatcacccccgacagcgtgggcctgagctggaccgtgcccgagggcgagttcgacagcttcgtggtgcagtacaaggacagagacggccagccccaggtggtgcccgtggccgccgaccagagagaggtgaccatccccgacctggagcccagcagaaagtacaagttcctgctgttcggcatccaggacggcaagagaagaagccccgtgagcgtggaggccaagaccgtggccagaggcgacgccagccccggcgccccccccagactgggcgagctgtgggtgaccgaccccacccccgacagcctgagactgagctggaccgtgcccgagggccagttcgacagcttcgtggtgcagttcaaggacaaggacggcccccaggtggtgcccgtggagggccacgagagaagcgtgaccgtgacccccctggacgccggcagaaagtacagattcctgctgtacggcctgctgggcaagaagagacacggccccctgaccgccgacggcaccaccgaggccagaagcgccatggacgacaccggcaccaagagaccccccaagcccagactgggcgaggagctgcaggtgaccaccgtgacccagaacagcgtgggcctgagctggaccgtgcccgagggccagttcgacagcttcgtggtgcagtacaaggacagagacggccagccccaggtggtgcccgtggagggcagcctgagagaggtgagcgtgcccggcctggaccccgcccacagatacaagctgctgctgtacggcctgcaccacggcaagagagtgggccccatcagcgccgtggccatcaccgccggcagagaggagaccgagaccgagaccaccgcccccaccccccccgcccccgagccccacctgggcgagctgaccgtggaggaggccaccagccacaccctgcacctgagctggatggtgaccgagggcgagttcgacagcttcgagatccagtacaccgacagagacggccagctgcagatggtgagaatcggcggcgacagaaacgacatcaccctgagcggcctggagagcgaccacagatacctggtgaccctgtacggcttcagcgacggcaagcacgtgggccccgtgcacgtggaggccctgaccgtgcccgaggaggagaagcccagcgagccccccaccgccacccccgagccccccatcaagcccagactgggcgagctgaccgtgaccgacgccacccccgacagcctgagcctgagctggaccgtgcccgagggccagttcgaccacttcctggtgcagtacagaaacggcgacggccagcccaaggccgtgagagtgcccggccacgaggagggcgtgaccatcagcggcctggagcccgaccacaagtacaagatgaacctgtacggcttccacggcggccagagaatgggccccgtgagcgtggtgggcgtgaccgccgccgaggaggagacccccagccccaccgagcccagcatggaggcccccgagcccgccgaggagcccctgctgggcgagctgaccgtgaccggcagcagccccgacagcctgagcctgagctggaccgtgccccagggcagattcgacagcttcaccgtgcagtacaaggacagagacggcagaccccaggtggtgagagtgggcggcgaggagagcgaggtgaccgtgggcggcctggagcccggcagaaagtacaagatgcacctgtacggcctgcacgagggcagaagagtgggccccgtgagcgccgtgggcgtgaccgcccccgaggaggagagccccgacgcccccctggccaagctgagactgggccagatgaccgtgagagacatcaccagcgacagcctgagcctgagctggaccgtgcccgagggccagttcgaccacttcctggtgcagttcaagaacggcgacggccagcccaaggccgtgagagtgcccggccacgaggacggcgtgaccatcagcggcctggagcccgaccacaagtacaagatgaacctgtacggcttccacggcggccagagagtgggccccgtgagcgccgtgggcctgaccgcccccggcaaggacgaggagatggcccccgccagcaccgagccccccacccccgagccccccatcaagcccagactggaggagctgaccgtgaccgacgccacccccgacagcctgagcctgagctggaccgtgcccgagggccagttcgaccacttcctggtgcagtacaagaacggcgacggccagcccaaggccaccagagtgcccggccacgaggacagagtgaccatcagcggcctggagcccgacaacaagtacaagatgaacctgtacggcttccacggcggccagagagtgggccccgtgagcgccatcggcgtgaccgccgccgaggaggagacccccagccccaccgagcccagcatggaggcccccgagccccccgaggagcccctgctgggcgagctgaccgtgaccggcagcagccccgacagcctgagcctgagctggaccgtgccccagggcagattcgacagcttcaccgtgcagtacaaggacagagacggcagaccccaggtggtgagagtgggcggcgaggagagcgaggtgaccgtgggcggcctggagcccggcagaaagtacaagatgcacctgtacggcctgcacgagggcagaagagtgggccccgtgagcaccgtgggcgtgaccgccccccaggaggacgtggacgagacccccagccccaccgagcccggcaccgaggcccccgagccccccgaggagcccctgctgggcgagctgaccgtgaccggcagcagccccgacagcctgagcctgagctggaccgtgccccagggcagattcgacagcttcaccgtgcagtacaaggacagagacggcagaccccaggccgtgagagtgggcggccaggagagcaaggtgaccgtgagaggcctggagcccggcagaaagtacaagatgcacctgtacggcctgcacgagggcagaagactgggccccgtgagcgccgtgggcgtgaccgaggacgaggccgagaccacccaggccgtgcccaccatgacccccgagccccccatcaagcccagactgggcgagctgaccatgaccgacgccacccccgacagcctgagcctgagctggaccgtgcccgagggccagttcgaccacttcctggtgcagtacagaaacggcgacggccagcccaaggccgtgagagtgcccggccacgaggacggcgtgaccatcagcggcctggagcccgaccacaagtacaagatgaacctgtacggcttccacggcggccagagagtgggccccatcagcgtgatcggcgtgaccgccgccgaggaggagacccccagccccaccgagctgagcaccgaggcccccgagccccccgaggagcccctgctgggcgagctgaccgtgaccggcagcagccccgacagcctgagcctgagctggaccatcccccagggccacttcgacagcttcaccgtgcagtacaaggacagagacggcagaccccaggtgatgagagtgagaggcgaggagagcgaggtgaccgtgggcggcctggagcccggcagaaagtacaagatgcacctgtacggcctgcacgagggcagaagagtgggccccgtgagcaccgtgggcgtgaccgaggacgaggccgagaccacccaggccgtgcccaccaccacccccgagccccccaacaagcccagactgggcgagctgaccgtgaccgacgccacccccgacagcctgagcctgagctggatggtgcccgagggccagttcgaccacttcctggtgcagtacagaaacggcgacggccagcccaaggtggtgagagtgcccggccacgaggacggcgtgaccatcagcggcctggagcccgaccacaagtacaagatgaacctgtacggcttccacggcggccagagagtgggccccatcagcgtgatcggcgtgaccgccgccgaggaggagacccccgcccccaccgagcccagcaccgaggcccccgagccccccgaggagcccctgctgggcgagctgaccgtgaccggcagcagccccgacagcctgagcctgagctggaccatcccccagggcagattcgacagcttcaccgtgcagtacaaggacagagacggcagaccccaggtggtgagagtgagaggcgaggagagcgaggtgaccgtgggcggcctggagcccggctgcaagtacaagatgcacctgtacggcctgcacgagggccagagagtgggccccgtgagcgccgtgggcgtgaccgcccccaaggacgaggccgagaccacccaggccgtgcccaccatgacccccgagccccccatcaagcccagactgggcgagctgaccgtgaccgacgccacccccgacagcctgagcctgagctggatggtgcccgagggccagttcgaccacttcctggtgcagtacagaaacggcgacggccagcccaaggccgtgagagtgcccggccacgaggacggcgtgaccatcagcggcctggagcccgaccacaagtacaagatgaacctgtacggcttccacggcggccagagagtgggccccgtgagcgccatcggcgtgaccgaggaggagacccccagccccaccgagcccagcaccgaggcccccgaggcccccgaggagcccctgctgggcgagctgaccgtgaccggcagcagccccgacagcctgagcctgagctggaccgtgccccagggcagattcgacagcttcaccgtgcagtacaaggacagagacggccagccccaggtggtgagagtgagaggcgaggagagcgaggtgaccgtgggcggcctggagcccggcagaaagtacaagatgcacctgtacggcctgcacgagggccagagagtgggccccgtgagcaccgtgggcatcaccgcccccctgcccacccccctgcccgtggagcccagactgggcgagctggccgtggccgccgtgaccagcgacagcgtgggcctgagctggaccgtggcccagggccccttcgacagcttcctggtgcagtacagagacgcccagggccagccccaggccgtgcccgtgagcggcgacctgagagccgtggccgtgagcggcctggaccccgccagaaagtacaagttcctgctgttcggcctgcagaacggcaagagacacggccccgtgcccgtggaggccagaaccgcccccgacaccaagcccagccccagactgggcgagctgaccgtgaccgacgccacccccgacagcgtgggcctgagctggaccgtgcccgagggcgagttcgacagcttcgtggtgcagtacaaggacaaggacggcagactgcaggtggtgcccgtggccgccaaccagagagaggtgaccgtgcagggcctggagcccagcagaaagtacagattcctgctgtacggcctgagcggcagaaagagactgggccccatcagcgccgacagcaccaccgcccccctggagaaggagctgcccccccacctgggcgagctgaccgtggccgaggagaccagcagcagcctgagactgagctggaccgtggcccagggccccttcgacagcttcgtggtgcagtacagagacaccgacggccagcccagagccgtgcccgtggccgccgaccagagaaccgtgaccgtggaggacctggagcccggcaagaagtacaagttcctgctgtacggcctgctgggcggcaagagactgggccccgtgagcgccctgggcatgaccgcccccgaggaggacacccccgcccccgagctggcccccgaggcccccgagccccccgaggagcccagactgggcgtgctgaccgtgaccgacaccacccccgacagcatgagactgagctggagcgtggcccagggccccttcgacagcttcgtggtgcagtacgaggacaccaacggccagccccaggccctgctggtggacggcgaccagagcaagatcctgatcagcggcctggagcccagcaccccctacagattcctgctgtacggcctgcacgagggcaagagactgggccccctgagcgccgagggcaccaccggcctggcccccgccggccagaccagcgaggagagcagacccagactgagccagctgagcgtgaccgacgtgaccaccagcagcctgagactgaactgggaggccccccccggcgccttcgacagcttcctgctgagattcggcgtgcccagccccagcaccctggagccccaccccagacccctgctgcagagagagctgatggtgcccggcaccagacacagcgccgtgctgagagacctgagaagcggcaccctgtacagcctgaccctgtacggcctgagaggcccccacaaggccgacagcatccagggcaccgccagaaccctgagccccgtgctggagagccccagagacctgcagttcagcgagatcagagagaccagcgccaaggtgaactggatgcccccccccagcagagccgacagcttcaaggtgagctaccagctggccgacggcggcgagccccagagcgtgcaggtggacggccaggccagaacccagaagctgcagggcctgatccccggcgccagatacgaggtgaccgtggtgagcgtgagaggcttcgaggagagcgagcccctgaccggcttcctgaccaccgtgcccgacggccccacccagctgagagccctgaacctgaccgagggcttcgccgtgctgcactggaagcccccccagaaccccgtggacacctacgacgtgcaggtgaccgcccccggcgccccccccctgcaggccgagacccccggcagcgccgtggactaccccctgcacgacctggtgctgcacaccaactacaccgccaccgtgagaggcctgagaggccccaacctgaccagccccgccagcatcaccttcaccaccggcctggaggcccccagagacctggaggccaaggaggtgacccccagaaccgccctgctgacctggaccgagccccccgtgagacccgccggctacctgctgagcttccacacccccggcggccagaaccaggagatcctgctgcccggcggcatcaccagccaccagctgctgggcctgttccccagcaccagctacaacgccagactgcaggccatgtggggccagagcctgctgccccccgtgagcaccagcttcaccaccggcggcctgagaatccccttccccagagactgcggcgaggagatgcagaacggcgccggcgccagcagaaccagcaccatcttcctgaacggcaacagagagagacccctgaacgtgttctgcgacatggagaccgacggcggcggctggctggtgttccagagaagaatggacggccagaccgacttctggagagactgggaggactacgcccacggcttcggcaacatcagcggcgagttctggctgggcaacgaggccctgcacagcctgacccaggccggcgactacagcatgagagtggacctgagagccggcgacgaggccgtgttcgcccagtacgacagcttccacgtggacagcgccgccgagtactacagactgcacctggagggctaccacggcaccgccggcgacagcatgagctaccacagcggcagcgtgttcagcgccagagacagagaccccaacagcctgctgatcagctgcgccgtgagctacagaggcgcctggtggtacagaaactgccactacgccaacctgaacggcctgtacggcagcaccgtggaccaccagggcgtgagctggtaccactggaagggcttcgagttcagcgtgcccttcaccgagatgaagctgagacccagaaacttcagaagccccgccggcggcggctag

SEQ ID NO: 102140 - DNA, 843 bp, synthetic construct
  misc_feature 1..843: note = Description of Artificial Sequence: Synthetic coding sequence
  source 1..843: mol_type = other DNA
atggtgaccgagggcgagttcgacagcttcgagatccagtacaccgacagagacggccagctgcagatggtgagaatcggcggcgacagaaacgacatcaccctgagcggcctggagagcgaccacagatacctggtgaccctgtacggcttcagcgacggcaagcacgtgggccccgtgcacgtggaggccctgaccgtgcccgaggaggagaagcccagcgagccccccaccgccacccccgagccccccatcaagcccagactgggcgagctgaccgtgaccgacgccacccccgacagcctgagcctgagctggaccgtgcccgagggccagttcgaccacttcctggtgcagtacagaaacggcgacggccagcccaaggccgtgagagtgcccggccacgaggagggcgtgaccatcagcggcctggagcccgaccacaagtacaagatgaacctgtacggcttccacggcggccagagaatgggccccgtgagcgtggtgggcgtgaccgccgccgaggaggagacccccagccccaccgagcccagcatggaggcccccgagcccgccgaggagcccctgctgggcgagctgaccgtgaccggcagcagccccgacagcctgagcctgagctggaccgtgccccagggcagattcgacagcttcaccgtgcagtacaaggacagagacggcagaccccaggtggtgagagtgggcggcgaggagagcgaggtgaccgtgggcggcctggagcccggcagaaagtacaagatgcacctgtacggcctgcacgagggcagaagagtgggccccgtgagcgccgtgggcgtgacctag

SEQ ID NO: 102141 - DNA, 12729 bp, synthetic construct
  misc_feature 1..12729: note = Description of Artificial Sequence: Synthetic coding sequence
  source 1..12729: mol_type = other DNA
atgatgcccgcccagtacgccctgaccagcagcctggtgctgctggtgctgctgagcaccgccagagccggccccttcagcagcagaagcaacgtgaccctgcccgcccccagaccccccccccagcccggcggccacaccgtgggcgccggcgtgggcagccccagcagccagctgtacgagcacaccgtggagggcggcgagaagcaggtggtgttcacccacagaatcaacctgccccccagcaccggctgcggctgcccccccggcaccgagccccccgtgctggccagcgaggtgcaggccctgagagtgagactggagatcctggaggagctggtgaagggcctgaaggagcagtgcaccggcggctgctgccccgccagcgcccaggccggcaccggccagaccgacgtgagaaccctgtgcagcctgcacggcgtgttcgacctgagcagatgcacctgcagctgcgagcccggctggggcggccccacctgcagcgaccccaccgacgccgagatcccccccagcagcccccccagcgccagcggcagctgccccgacgactgcaacgaccagggcagatgcgtgagaggcagatgcgtgtgcttccccggctacaccggccccagctgcggctggcccagctgccccggcgactgccagggcagaggcagatgcgtgcagggcgtgtgcgtgtgcagagccggcttcagcggccccgactgcagccagagaagctgccccagaggctgcagccagagaggcagatgcgagggcggcagatgcgtgtgcgaccccggctacaccggcgacgactgcggcatgagaagctgccccagaggctgcagccagagaggcagatgcgagaacggcagatgcgtgtgcaaccccggctacaccggcgaggactgcggcgtgagaagctgccccagaggctgcagccagagaggcagatgcaaggacggcagatgcgtgtgcgaccccggctacaccggcgaggactgcggcaccagaagctgcccctgggactgcggcgagggcggcagatgcgtggacggcagatgcgtgtgctggcccggctacaccggcgaggactgcagcaccagaacctgccccagagactgcagaggcagaggcagatgcgaggacggcgagtgcatctgcgacaccggctacagcggcgacgactgcggcgtgagaagctgccccggcgactgcaaccagagaggcagatgcgaggacggcagatgcgtgtgctggcccggctacaccggcaccgactgcggcagcagagcctgccccagagactgcagaggcagaggcagatgcgagaacggcgtgtgcgtgtgcaacgccggctacagcggcgaggactgcggcgtgagaagctgccccggcgactgcagaggcagaggcagatgcgagagcggcagatgcatgtgctggcccggctacaccggcagagactgcggcaccagagcctgccccggcgactgcagaggcagaggcagatgcgtggacggcagatgcgtgtgcaaccccggcttcaccggcgaggactgcggcagcagaagatgccccggcgactgcagaggccacggcctgtgcgaggacggcgtgtgcgtgtgcgacgccggctacagcggcgaggactgcagcaccagaagctgccccggcggctgcagaggcagaggccagtgcctggacggcagatgcgtgtgcgaggacggctacagcggcgaggactgcggcgtgagacagtgccccaacgactgcagccagcacggcgtgtgccaggacggcgtgtgcatctgctgggagggctacgtgagcgaggactgcagcatcagaacctgccccagcaactgccacggcagaggcagatgcgaggagggcagatgcctgtgcgaccccggctacaccggccccacctgcgccaccagaatgtgccccgccgactgcagaggcagaggcagatgcgtgcagggcgtgtgcctgtgccacgtgggctacggcggcgaggactgcggccaggaggagccccccgccagcgcctgccccggcggctgcggccccagagagctgtgcagagccggccagtgcgtgtgcgtggagggcttcagaggccccgactgcgccatccagacctgccccggcgactgcagaggcagaggcgagtgccacgacggcagctgcgtgtgcaaggacggctacgccggcgaggactgcggcgaggaggtgcccaccatcgagggcatgagaatgcacctgctggaggagaccaccgtgagaaccgagtggacccccgcccccggccccgtggacgcctacgagatccagttcatccccaccaccgagggcgccagcccccccttcaccgccagagtgcccagcagcgccagcgcctacgaccagagaggcctggcccccggccaggagtaccaggtgaccgtgagagccctgagaggcaccagctggggcctgcccgccagcaagaccatcaccaccatgatcgacggcccccaggacctgagagtggtggccgtgacccccaccaccctggagctgggctggctgagaccccaggccgaggtggacagattcgtggtgagctacgtgagcgccggcaaccagagagtgagactggaggtgccccccgaggccgacggcaccctgctgaccgacctgatgcccggcgtggagtacgtggtgaccgtgaccgccgagagaggcagagccgtgagctaccccgccagcgtgagagccaacaccggcagcagccccctgggcctgctgggcaccaccgacgagcccccccccagcggccccagcaccacccagggcgcccaggcccccctgctgcagcagagaccccaggagctgggcgagctgagagtgctgggcagagacgagaccggcagactgagagtggtgtggaccgcccagcccgacaccttcgcctacttccagctgagaatgagagtgcccgagggccccggcgcccacgaggaggtgctgcccggcgacgtgagacaggccctggtgcccccccccccccccggcaccccctacgagctgagcctgcacggcgtgccccccggcggcaagcccagcgaccccatcatctaccagggcatcatggacaaggacgaggagaagcccggcaagagcagcggcccccccagactgggcgagctgaccgtgaccgacagaaccagcgacagcctgctgctgagatggaccgtgcccgagggcgagttcgacagcttcgtgatccagtacaaggacagagacggccagccccaggtggtgcccgtggagggcccccagagaagcgccgtgatcaccagcctggaccccggcagaaagtacaagttcgtgctgtacggcttcgtgggcaagaagagacacggccccctggtggccgaggccaagatcctgccccagagcgaccccagccccggcaccccccccagactgggcaacctgtgggtgaccgaccccacccccgacagcctgcacctgagctggaccgtgcccgagggccagttcgacaccttcatggtgcagtacagagacagagacggcagaccccaggtggtgcccgtggagggccccgagagaagcttcgtggtgagcagcctggaccccgaccacaagtacagattcaccctgttcggcatcgccaacaagaagagatacggccccctgaccgccgacggcaccaccgcccccgagagaaaggaggagcccccccaccccgagttcctggagcagcccctgctgggcgagctgaccgtgaccggcgtgacccccgacagcctgagactgagctggaccgtggcccagggccccttcgacagcttcatggtgcagtacaaggacgcccagggccagccccaggccgtgcccgtggccggcgacgagaacgaggtgaccgtgcccggcctggaccccgacagaaagtacaagatgaacctgtacggcctgagaggcagacagagagtgggccccgagagcgtggtggccaagaccgccccccaggaggacgtggacgagacccccagccccaccgagctgggcaccgaggcccccgagagccccgaggagcccctgctgggcgagctgaccgtgaccggcagcagccccgacagcctgagcctgttctggaccgtgccccagggcagcttcgacagcttcaccgtgcagtacaaggacagagacggcagacccagagccgtgagagtgggcggcaaggagagcgaggtgaccgtgggcggcctggagcccggccacaagtacaagatgcacctgtacggcctgcacgagggccagagagtgggccccgtgagcgccgtgggcgtgaccgccccccagcaggaggagaccccccccgccaccgagagccccctggagcccagactgggcgagctgaccgtgaccgacgtgacccccaacagcgtgggcctgagctggaccgtgcccgagggccagttcgacagcttcatcgtgcagtacaaggacaaggacggccagccccaggtggtgcccgtggccgccgaccagagagaggtgaccgtgtacaacctggagcccgagagaaagtacaagatgaacatgtacggcctgcacgacggccagagaatgggccccctgagcgtggtgatcgtgaccgcccccctgccccccgcccccgccaccgaggccagcaagccccccctggagcccagactgggcgagctgaccgtgaccgacatcacccccgacagcgtgggcctgagctggaccgtgcccgagggcgagttcgacagcttcgtggtgcagtacaaggacagagacggccagccccaggtggtgcccgtggccgccgaccagagagaggtgaccatccccgacctggagcccagcagaaagtacaagttcctgctgttcggcatccaggacggcaagagaagaagccccgtgagcgtggaggccaagaccgtggccagaggcgacgccagccccggcgccccccccagactgggcgagctgtgggtgaccgaccccacccccgacagcctgagactgagctggaccgtgcccgagggccagttcgacagcttcgtggtgcagttcaaggacaaggacggcccccaggtggtgcccgtggagggccacgagagaagcgtgaccgtgacccccctggacgccggcagaaagtacagattcctgctgtacggcctgctgggcaagaagagacacggccccctgaccgccgacggcaccaccgaggccagaagcgccatggacgacaccggcaccaagagaccccccaagcccagactgggcgaggagctgcaggtgaccaccgtgacccagaacagcgtgggcctgagctggaccgtgcccgagggccagttcgacagcttcgtggtgcagtacaaggacagagacggccagccccaggtggtgcccgtggagggcagcctgagagaggtgagcgtgcccggcctggaccccgcccacagatacaagctgctgctgtacggcctgcaccacggcaagagagtgggccccatcagcgccgtggccatcaccgccggcagagaggagaccgagaccgagaccaccgcccccaccccccccgcccccgagccccacctgggcgagctgaccgtggaggaggccaccagccacaccctgcacctgagctggatggtgaccgagggcgagttcgacagcttcgagatccagtacaccgacagagacggccagctgcagatggtgagaatcggcggcgacagaaacgacatcaccctgagcggcctggagagcgaccacagatacctggtgaccctgtacggcttcagcgacggcaagcacgtgggccccgtgcacgtggaggccctgaccgtgcccgaggaggagaagcccagcgagccccccaccgccacccccgagccccccatcaagcccagactgggcgagctgaccgtgaccgacgccacccccgacagcctgagcctgagctggaccgtgcccgagggccagttcgaccacttcctggtgcagtacagaaacggcgacggccagcccaaggccgtgagagtgcccggccacgaggagggcgtgaccatcagcggcctggagcccgaccacaagtacaagatgaacctgtacggcttccacggcggccagagaatgggccccgtgagcgtggtgggcgtgaccgccgccgaggaggagacccccagccccaccgagcccagcatggaggcccccgagcccgccgaggagcccctgctgggcgagctgaccgtgaccggcagcagccccgacagcctgagcctgagctggaccgtgccccagggcagattcgacagcttcaccgtgcagtacaaggacagagacggcagaccccaggtggtgagagtgggcggcgaggagagcgaggtgaccgtgggcggcctggagcccggcagaaagtacaagatgcacctgtacggcctgcacgagggcagaagagtgggccccgtgagcgccgtgggcgtgaccgcccccgaggaggagagccccgacgcccccctggccaagctgagactgggccagatgaccgtgagagacatcaccagcgacagcctgagcctgagctggaccgtgcccgagggccagttcgaccacttcctggtgcagttcaagaacggcgacggccagcccaaggccgtgagagtgcccggccacgaggacggcgtgaccatcagcggcctggagcccgaccacaagtacaagatgaacctgtacggcttccacggcggccagagagtgggccccgtgagcgccgtgggcctgaccgcccccggcaaggacgaggagatggcccccgccagcaccgagccccccacccccgagccccccatcaagcccagactggaggagctgaccgtgaccgacgccacccccgacagcctgagcctgagctggaccgtgcccgagggccagttcgaccacttcctggtgcagtacaagaacggcgacggccagcccaaggccaccagagtgcccggccacgaggacagagtgaccatcagcggcctggagcccgacaacaagtacaagatgaacctgtacggcttccacggcggccagagagtgggccccgtgagcgccatcggcgtgaccgccgccgaggaggagacccccagccccaccgagcccagcatggaggcccccgagccccccgaggagcccctgctgggcgagctgaccgtgaccggcagcagccccgacagcctgagcctgagctggaccgtgccccagggcagattcgacagcttcaccgtgcagtacaaggacagagacggcagaccccaggtggtgagagtgggcggcgaggagagcgaggtgaccgtgggcggcctggagcccggcagaaagtacaagatgcacctgtacggcctgcacgagggcagaagagtgggccccgtgagcaccgtgggcgtgaccgccccccaggaggacgtggacgagacccccagccccaccgagcccggcaccgaggcccccgagccccccgaggagcccctgctgggcgagctgaccgtgaccggcagcagccccgacagcctgagcctgagctggaccgtgccccagggcagattcgacagcttcaccgtgcagtacaaggacagagacggcagaccccaggccgtgagagtgggcggccaggagagcaaggtgaccgtgagaggcctggagcccggcagaaagtacaagatgcacctgtacggcctgcacgagggcagaagactgggccccgtgagcgccgtgggcgtgaccgaggacgaggccgagaccacccaggccgtgcccaccatgacccccgagccccccatcaagcccagactgggcgagctgaccatgaccgacgccacccccgacagcctgagcctgagctggaccgtgcccgagggccagttcgaccacttcctggtgcagtacagaaacggcgacggccagcccaaggccgtgagagtgcccggccacgaggacggcgtgaccatcagcggcctggagcccgaccacaagtacaagatgaacctgtacggcttccacggcggccagagagtgggccccatcagcgtgatcggcgtgaccgccgccgaggaggagacccccagccccaccgagctgagcaccgaggcccccgagccccccgaggagcccctgctgggcgagctgaccgtgaccggcagcagccccgacagcctgagcctgagctggaccatcccccagggccacttcgacagcttcaccgtgcagtacaaggacagagacggcagaccccaggtgatgagagtgagaggcgaggagagcgaggtgaccgtgggcggcctggagcccggcagaaagtacaagatgcacctgtacggcctgcacgagggcagaagagtgggccccgtgagcaccgtgggcgtgaccgaggacgaggccgagaccacccaggccgtgcccaccaccacccccgagccccccaacaagcccagactgggcgagctgaccgtgaccgacgccacccccgacagcctgagcctgagctggatggtgcccgagggccagttcgaccacttcctggtgcagtacagaaacggcgacggccagcccaaggtggtgagagtgcccggccacgaggacggcgtgaccatcagcggcctggagcccgaccacaagtacaagatgaacctgtacggcttccacggcggccagagagtgggccccatcagcgtgatcggcgtgaccgccgccgaggaggagacccccgcccccaccgagcccagcaccgaggcccccgagccccccgaggagcccctgctgggcgagctgaccgtgaccggcagcagccccgacagcctgagcctgagctggaccatcccccagggcagattcgacagcttcaccgtgcagtacaaggacagagacggcagaccccaggtggtgagagtgagaggcgaggagagcgaggtgaccgtgggcggcctggagcccggctgcaagtacaagatgcacctgtacggcctgcacgagggccagagagtgggccccgtgagcgccgtgggcgtgaccgcccccaaggacgaggccgagaccacccaggccgtgcccaccatgacccccgagccccccatcaagcccagactgggcgagctgaccgtgaccgacgccacccccgacagcctgagcctgagctggatggtgcccgagggccagttcgaccacttcctggtgcagtacagaaacggcgacggccagcccaaggccgtgagagtgcccggccacgaggacggcgtgaccatcagcggcctggagcccgaccacaagtacaagatgaacctgtacggcttccacggcggccagagagtgggccccgtgagcgccatcggcgtgaccgaggaggagacccccagccccaccgagcccagcaccgaggcccccgaggcccccgaggagcccctgctgggcgagctgaccgtgaccggcagcagccccgacagcctgagcctgagctggaccatcccccagggcagattcgacagcttcaccgtgcagtacaaggacagagacggccagccccaggtggtgagagtgagaggcgaggagagcgaggtgaccgtgggcggcctggagcccggcagaaagtacaagatgcacctgtacggcctgcacgagggccagagagtgggccccgtgagcaccgtgggcatcaccgcccccctgcccacccccctgcccgtggagcccagactgggcgagctggccgtggccgccgtgaccagcgacagcgtgggcctgagctggaccgtggcccagggccccttcgacagcttcctggtgcagtacagagacgcccagggccagccccaggccgtgcccgtgagcggcgacctgagagccgtggccgtgagcggcctggaccccgccagaaagtacaagttcctgctgttcggcctgcagaacggcaagagacacggccccgtgcccgtggaggccagaaccgcccccgacaccaagcccagccccagactgggcgagctgaccgtgaccgacgccacccccgacagcgtgggcctgagctggaccgtgcccgagggcgagttcgacagcttcgtggtgcagtacaaggacaaggacggcagactgcaggtggtgcccgtggccgccaaccagagagaggtgaccgtgcagggcctggagcccagcagaaagtacagattcctgctgtacggcctgagcggcagaaagagactgggccccatcagcgccgacagcaccaccgcccccctggagaaggagctgcccccccacctgggcgagctgaccgtggccgaggagaccagcagcagcctgagactgagctggaccgtggcccagggccccttcgacagcttcgtggtgcagtacagagacaccgacggccagcccagagccgtgcccgtggccgccgaccagagaaccgtgaccgtggaggacctggagcccggcaagaagtacaagttcctgctgtacggcctgctgggcggcaagagactgggccccgtgagcgccctgggcatgaccgcccccgaggaggacacccccgcccccgagctggcccccgaggcccccgagccccccgaggagcccagactgggcgtgctgaccgtgaccgacaccacccccgacagcatgagactgagctggagcgtggcccagggccccttcgacagcttcgtggtgcagtacgaggacaccaacggccagccccaggccctgctggtggacggcgaccagagcaagatcctgatcagcggcctggagcccagcaccccctacagattcctgctgtacggcctgcacgagggcaagagactgggccccctgagcgccgagggcaccaccggcctggcccccgccggccagaccagcgaggagagcagacccagactgagccagctgagcgtgaccgacgtgaccaccagcagcctgagactgaactgggaggccccccccggcgccttcgacagcttcctgctgagattcggcgtgcccagccccagcaccctggagccccaccccagacccctgctgcagagagagctgatggtgcccggcaccagacacagcgccgtgctgagagacctgagaagcggcaccctgtacagcctgaccctgtacggcctgagaggcccccacaaggccgacagcatccagggcaccgccagaaccctgagccccgtgctggagagccccagagacctgcagttcagcgagatcagagagaccagcgccaaggtgaactggatgcccccccccagcagagccgacagcttcaaggtgagctaccagctggccgacggcggcgagccccagagcgtgcaggtggacggccaggccagaacccagaagctgcagggcctgatccccggcgccagatacgaggtgaccgtggtgagcgtgagaggcttcgaggagagcgagcccctgaccggcttcctgaccaccgtgcccgacggccccacccagctgagagccctgaacctgaccgagggcttcgccgtgctgcactggaagcccccccagaaccccgtggacacctacgacatccaggtgaccgcccccggcgccccccccctgcaggccgagacccccggcagcgccgtggactaccccctgcacgacctggtgctgcacaccaactacaccgccaccgtgagaggcctgagaggccccaacctgaccagccccgccagcatcaccttcaccaccggcctggaggcccccagagacctggaggccaaggaggtgacccccagaaccgccctgctgacctggaccgagccccccgtgagacccgccggctacctgctgagcttccacacccccggcggccagacccaggagatcctgctgcccggcggcatcaccagccaccagctgctgggcctgttccccagcaccagctacaacgccagactgcaggccacctggggccagagcctgctgccccccgtgagcaccagcttcaccaccggcggcctgagaatccccttccccagagactgcggcgaggagatgcagaacggcgccggcgccagcagaaccagcaccatcttcctgaacggcaacagagagagacccctgaacgtgttctgcgacatggagaccgacggcggcggctggctggtgttccagagaagaatggacggccagaccgacttctggagagactgggaggactacgcccacggcttcggcaacatcagcggcgagttctggctgggcaacgaggccctgcacagcctgacccaggccggcgactacagcatgagagtggacctgagagccggcgacgaggccgtgttcgcccagtacgacagcttccacgtggacagcgccgccgagtactacagactgcacctggagggctaccacggcaccgccggcgacagcatgagctaccacagcggcagcgtgttcagcgccagagacagagaccccaacagcctgctgatcagctgcgccgtgagctacagaggcgcctggtggtacagaaactgccactacgccaacctgaacggcctgtacggcagcaccgtggaccaccagggcgtgagctggtaccactggaagggcttcgagttcagcgtgcccttcaccgagatgaagctgagacccagaaacttcagaagccccgccggcggcggctag

SEQ ID NO: 102142 - DNA, 2022 bp, synthetic construct
  misc_feature 1..2022: note = Description of Artificial Sequence: Synthetic coding sequence
  source 1..2022: mol_type = other DNA
atgagactgagctggagcgtggcccagggccccttcgacagcttcgtggtgcagtacgaggacaccaacggccagccccaggccctgctggtggacggcgaccagagcaagatcctgatcagcggcctggagcccagcaccccctacagattcctgctgtacggcctgcacgagggcaagagactgggccccctgagcgccgagggcaccaccggcctggcccccgccggccagaccagcgaggagagcagacccagactgagccagctgagcgtgaccgacgtgaccaccagcagcctgagactgaactgggaggccccccccggcgccttcgacagcttcctgctgagattcggcgtgcccagccccagcaccctggagccccaccccagacccctgctgcagagagagctgatggtgcccggcaccagacacagcgccgtgctgagagacctgagaagcggcaccctgtacagcctgaccctgtacggcctgagaggcccccacaaggccgacagcatccagggcaccgccagaaccctgagccccgtgctggagagccccagagacctgcagttcagcgagatcagagagaccagcgccaaggtgaactggatgcccccccccagcagagccgacagcttcaaggtgagctaccagctggccgacggcggcgagccccagagcgtgcaggtggacggccaggccagaacccagaagctgcagggcctgatccccggcgccagatacgaggtgaccgtggtgagcgtgagaggcttcgaggagagcgagcccctgaccggcttcctgaccaccgtgcccgacggccccacccagctgagagccctgaacctgaccgagggcttcgccgtgctgcactggaagcccccccagaaccccgtggacacctacgacgtgcaggtgaccgcccccggcgccccccccctgcaggccgagacccccggcagcgccgtggactaccccctgcacgacctggtgctgcacaccaactacaccgccaccgtgagaggcctgagaggccccaacctgaccagccccgccagcatcaccttcaccaccggcctggaggcccccagagacctggaggccaaggaggtgacccccagaaccgccctgctgacctggaccgagccccccgtgagacccgccggctacctgctgagcttccacacccccggcggccagaaccaggagatcctgctgcccggcggcatcaccagccaccagctgctgggcctgttccccagcaccagctacaacgccagactgcaggccatgtggggccagagcctgctgccccccgtgagcaccagcttcaccaccggcggcctgagaatccccttccccagagactgcggcgaggagatgcagaacggcgccggcgccagcagaaccagcaccatcttcctgaacggcaacagagagagacccctgaacgtgttctgcgacatggagaccgacggcggcggctggctggtgttccagagaagaatggacggccagaccgacttctggagagactgggaggactacgcccacggcttcggcaacatcagcggcgagttctggctgggcaacgaggccctgcacagcctgacccaggccggcgactacagcatgagagtggacctgagagccggcgacgaggccgtgttcgcccagtacgacagcttccacgtggacagcgccgccgagtactacagactgcacctggagggctaccacggcaccgccggcgacagcatgagctaccacagcggcagcgtgttcagcgccagagacagagaccccaacagcctgctgatcagctgcgccgtgagctacagaggcgcctggtggtacagaaactgccactacgccaacctgaacggcctgtacggcagcaccgtggaccaccagggcgtgagctggtaccactggaagggcttcgagttcagcgtgcccttcaccgagatgaagctgagacccagaaacttcagaagccccgccggcggcggctag

SEQ ID NO: 102143 - DNA, 654 bp, synthetic construct; identical to SEQ ID NO: 102137
  misc_feature 1..654: note = Description of Artificial Sequence: Synthetic coding sequence
  source 1..654: mol_type = other DNA

SEQ ID NO: 102144 - DNA, 942 bp, synthetic construct
  misc_feature 1..942: note = Description of Artificial Sequence: Synthetic coding sequence
  source 1..942: mol_type = other DNA
accgagcccggcaccgaggcccccggcccccccgaggagcccctgctgggcgagctgaccgtgaccggcagcagccccgacagcctgagcctgagctggaccgtgccccagggcagattcgacagcttcaccgtgcagtacaaggacagagacggcagaccccaggccgtgagagtgggcggccaggagagcaaggtgaccgtgagaggcctggagcccggcagaaagtacaagatgcacctgtacggcctgcacgagggcagaagactgggccccgtgagcgccgtgggcgtgaccgaggacgaggccgagaccacccaggccgtgcccaccatgacccccgagccccccatcaagcccagactgggcgagctgaccatgaccgacgccacccccgacagcctgagcctgagctggaccgtgcccgagggccagttcgaccacttcctggtgcagtacagaaacggcgacggccagcccaaggccgtgagagtgcccggccacgaggacggcgtgaccatcagcggcctggagcccgaccacaagtacaagatgaacctgtacggcttccacggcggccagagagtgggccccatcagcgtgatcggcgtgaccgccgccgaggaggagacccccagccccaccgagctgagcaccgaggcccccgagccccccgaggagcccctgctgggcgagctgaccgtgaccggcagcagccccgacagcctgagcctgagctggaccatcccccagggccacttcgacagcttcaccgtgcagtacaaggacagagacggcagaccccaggtgatgagagtgagaggcgaggagagcgaggtgaccgtgggcggcctggagcccggcagaaagtacaagatgcacctgtacggcctgcacgagggcagaagagtgggccccgtgagcaccgtgggcgtgacctag

SEQ ID NO: 102145 - DNA, 942 bp, synthetic construct
  misc_feature 1..942: note = Description of Artificial Sequence: Synthetic coding sequence
  source 1..942: mol_type = other DNA
atgacccccgagccccccatcaagcccagactgggcgagctgaccatgaccgacgccacccccgacagcctgagcctgagctggaccgtgcccgagggccagttcgaccacttcctggtgcagtacagaaacggcgacggccagcccaaggccgtgagagtgcccggccacgaggacggcgtgaccatcagcggcctggagcccgaccacaagtacaagatgaacctgtacggcttccacggcggccagagagtgggccccatcagcgtgaccggcgtgaccgccgccgaggaggagacccccagccccaccgagctgagcaccgaggcccccgagccccccgaggagcccctgctgggcgagctgaccgtgaccggcagcagccccgacagcctgagcctgagctggaccatcccccagggccacttcgacagcttcaccgtgcagtacaaggacagagacggcagaccccaggtgatgagagtgagaggcgaggagagcgaggtgaccgtgggcggcctggagcccggcagaaagtacaagatgcacctgtacggcctgcacgagggcagaagagtgggccccgtgagcaccgtgggcgtgaccgcccccgaggacgaggaggaggagacccccgcccccaccgagcccagcaccgaggcccccgagccccccgaggagcccctgctgggcgagctgaccgtgaccggcagcagccccgacagcctgagcctgagctggaccatcccccagggcagattcgacagcttcaccgtgcagtacaaggacagagacggcagaccccaggtggtgagagtgagaggcgaggagagcgaggtgaccgtgggcggcctggagcccggctgcaagtacaagatgcacctgtacggcctgcacgagggccagagagtgggccccgtgagcgccgtgggcgtgacctag

SEQ ID NO: 102146 - DNA, 1281 bp, synthetic construct
  misc_feature 1..1281: note = Description of Artificial Sequence: Synthetic coding sequence
  source 1..1281: mol_type = other DNA
gccggcgaggactgcggcgaggaggtgcccaccatcgagggcatgagaatgcacctgctggaggagaccaccgtgagaaccgagtggacccccgcccccggccccgtggacgcctacgagatccagttcatccccaccaccgagggcgccagcccccccttcaccgccagagtgcccagcagcgccagcgcctacgaccagagaggcctggcccccggccaggagtaccaggtgaccgtgagagccctgagaggcaccagctggggcctgcccgccagcaagaccatcaccaccatgatcgacggcccccaggacctgagagtggtggccgtgacccccaccaccctggagctgggctggctgagaccccaggccgaggtggacagattcgtggtgagctacgtgagcgccggcaaccagagagtgagactggaggtgccccccgaggccgacggcaccctgctgaccgacctgatgcccggcgtggagtacgtggtgaccgtgaccgccgagagaggcagagccgtgagctaccccgccagcgtgagagccaacaccggcagcagccccctgggcctgctgggcaccaccgacgagcccccccccagcggccccagcaccacccagggcgcccaggcccccctgctgcagcagagaccccaggagctgggcgagctgagagtgctgggcagagacgagaccggcagactgagagtggtgtggaccgcccagcccgacaccttcgcctacttccagctgagaatgagagtgcccgagggccccggcgcccacgaggaggtgctgcccggcgacgtgagacaggccctggtgcccccccccccccccggcaccccctacgagctgagcctgcacggcgtgccccccggcggcaagcccagcgaccccatcatctaccagggcatcatggacaaggacgaggagaagcccggcaagagcagcggcccccccagactgggcgagctgaccgtgaccgacagaaccagcgacagcctgctgctgagatggaccgtgcccgagggcgagttcgacagcttcgtgatccagtacaaggacagagacggccagccccaggtggtgcccgtggagggcccccagagaagcgccgtgatcaccagcctggaccccggcagaaagtacaagttcgtgctgtacggcttcgtgggcaagaagagacacggccccctggtggccgaggccaagatcctgccccagagcgaccccagccccggcacccccccccacctgggcaacctgtggtag

SEQ ID NO: 102147 - DNA, 2598 bp, synthetic construct
  misc_feature 1..2598: note = Description of Artificial Sequence: Synthetic coding sequence
  source 1..2598: mol_type = other DNA
ctgtacggcctgagaggcagacagagagtgggccccgagagcgtggtggccaagaccgccccccaggaggacgtggacgagacccccagccccaccgagctgggcaccgaggcccccgagagccccgaggagcccctgctgggcgagctgaccgtgaccggcagcagccccgacagcctgagcctgttctggaccgtgccccagggcagcttcgacagcttcaccgtgcagtacaaggacagagacggcagacccagagccgtgagagtgggcggcaaggagagcgaggtgaccgtgggcggcctggagcccggccacaagtacaagatgcacctgtacggcctgcacgagggccagagagtgggccccgtgagcgccgtgggcgtgaccgccccccagcaggaggagaccccccccgccaccgagagccccctggagcccagactgggcgagctgaccgtgaccgacgtgacccccaacagcgtgggcctgagctggaccgtgcccgagggccagttcgacagcttcatcgtgcagtacaaggacaaggacggccagccccaggtggtgcccgtggccgccgaccagagagaggtgaccgtgtacaacctggagcccgagagaaagtacaagatgaacatgtacggcctgcacgacggccagagaatgggccccctgagcgtggtgatcgtgaccgcccccctgccccccgcccccgccaccgaggccagcaagccccccctggagcccagactgggcgagctgaccgtgaccgacatcacccccgacagcgtgggcctgagctggaccgtgcccgagggcgagttcgacagcttcgtggtgcagtacaaggacagagacggccagccccaggtggtgcccgtggccgccgaccagagagaggtgaccatccccgacctggagcccagcagaaagtacaagttcctgctgttcggcatccaggacggcaagagaagaagccccgtgagcgtggaggccaagaccgtggccagaggcgacgccagccccggcgccccccccagactgggcgagctgtgggtgaccgaccccacccccgacagcctgagactgagctggaccgtgcccgagggccagttcgacagcttcgtggtgcagttcaaggacaaggacggcccccaggtggtgcccgtggagggccacgagagaagcgtgaccgtgacccccctggacgccggcagaaagtacagattcctgctgtacggcctgctgggcaagaagagacacggccccctgaccgccgacggcaccaccgaggccagaagcgccatggacgacaccggcaccaagagaccccccaagcccagactgggcgaggagctgcaggtgaccaccgtgacccagaacagcgtgggcctgagctggaccgtgcccgagggccagttcgacagcttcgtggtgcagtacaaggacagagacggccagccccaggtggtgcccgtggagggcagcctgagagaggtgagcgtgcccggcctggaccccgcccacagatacaagctgctgctgtacggcctgcaccacggcaagagagtgggccccatcagcgccgtggccatcaccgccggcagagaggagaccgagaccgagaccaccgcccccaccccccccgcccccgagccccacctgggcgagctgaccgtggaggaggccaccagccacaccctgcacctgagctggatggtgaccgagggcgagttcgacagcttcgagatccagtacaccgacagagacggccagctgcagatggtgagaatcggcggcgacagaaacgacatcaccctgagcggcctggagagcgaccacagatacctggtgaccctgtacggcttcagcgacggcaagcacgtgggccccgtgcacgtggaggccctgaccgtgcccgaggaggagaagcccagcgagccccccaccgccacccccgagccccccatcaagcccagactgggcgagctgaccgtgaccgacgccacccccgacagcctgagcctgagctggaccgtgcccgagggccagttcgaccacttcctggtgcagtacagaaacggcgacggccagcccaaggccgtgagagtgcccggccacgaggagggcgtgaccatcagcggcctggagcccgaccacaagtacaagatgaacctgtacggcttccacggcggccagagaatgggccccgtgagcgtggtgggcgtgaccgccgccgaggaggagacccccagccccaccgagcccagcatggaggcccccgagcccgccgaggagcccctgctgggcgagctgaccgtgaccggcagcagccccgacagcctgagcctgagctggaccgtgccccagggcagattcgacagcttcaccgtgcagtacaaggacagagacggcagaccccaggtggtgagagtgggcggcgaggagagcgaggtgaccgtgggcggcctggagcccggcagaaagtacaagatgcacctgtacggcctgcacgagggcagaagagtgggccccgtgagcgccgtgggcgtgaccgcccccgaggaggagagccccgacgcccccctggcctag

SEQ ID NO: 102148 - DNA, 5208 bp, synthetic construct
  misc_feature 1..5208: note = Description of Artificial Sequence: Synthetic coding sequence
  source 1..5208: mol_type = other DNA
atgagcgtgagcagaaccatggaggacagctgcgagctggacctggtgtacgtgaccgagagaatcatcgccgtgagcttccccagcaccgccaacgaggagaacttcagaagcaacctgagagaggtggcccagatgctgaagagcaagcacggcggcaactacctgctgttcaacctgagcgagagaagacccgacatcaccaagctgcacgccaaggtgctggagttcggctggcccgacctgcacacccccgccctggagaagatctgcagcatctgcaaggccatggacacctggctgaacgccgacccccacaacgtggtggtgctgcacaacaagggcaacagaggcagaatcggcgtggtgatcgccgcctacatgcactacagcaacatcagcgccagcgccgaccaggccctggacagattcgccatgaagagattctacgaggacaagatcgtgcccatcggccagcccagccagagaagatacgtgcactacttcagcggcctgctgagcggcagcatcaagatgaacaacaagcccctgttcctgcaccacgtgatcatgcacggcatccccaacttcgagagcaagggcggctgcagacccttcctgagaatctaccaggccatgcagcccgtgtacaccagcggcatctacaacatccccggcgacagccagaccagcgtgtgcatcaccatcgagcccggcctgctgctgaagggcgacatcctgctgaagtgctaccacaagaagttcagaagccccgccagagacgtgatcttcagagtgcagttccacacctgcgccatccacgacctgggcgtggtgttcggcaaggaggacctggacgacgccttcaaggacgacagattccccgagtacggcaaggtggagttcgtgttcagctacggccccgagaagatccagggcatggagcacctggagaacggccccagcgtgagcgtggactacaacaccagcgaccccctgatcagatgggacagctacgacaacttcagcggccacagagacgacggcatggaggaggtggtgggccacacccagggccccctggacggcagcctgtacgccaaggtgaagaagaaggacagcctgcacggcagcaccggcgccgtgaacgccaccagacccaccctgagcgccacccccaaccacgtggagcacaccctgagcgtgagcagcgacagcggcaacagcaccgccagcaccaagaccgacaagaccgacgagcccgtgcccggcgccagcagcgccaccgccgccctgagcccccaggagaagagagagctggacagactgctgagcggcttcggcctggagagagagaagcagggcgccatgtaccacacccagcacctgagaagcagacccgccggcggcagcgccgtgcccagcagcggcagacacgtggtgcccgcccaggtgcacgtgaacggcggcgccctggccagcgagagagagaccgacatcctggacgacgagctgcccaaccaggacggccacagcgccggcagcatgggcaccctgagcagcctggacggcgtgaccaacaccagcgagggcggctaccccgaggccctgagccccctgaccaacggcctggacaagagctaccccatggagcccatggtgaacggcggcggctacccctacgagagcgccagcagagccggccccgcccacgccggccacaccgcccccatgagacccagctacagcgcccaggagggcctggccggctaccagagagagggcccccaccccgcctggccccagcccgtgaccaccagccactacgcccacgaccccagcggcatgttcagaagccagagcttcagcgaggccgagccccagctgccccccgcccccgtgagaggcggcagcagcagagaggccgtgcagagaggcctgaacagctggcagcagcagcagcagcagcagcagcagcccagacccccccccagacagcaggagagagcccacctggagagcctggtggccagcagacccagcccccagcccctggccgagacccccatccccagcctgcccgagttccccagagccgccagccagcaggagatcgagcagagcatcgagaccctgaacatgctgatgctggacctggagcccgccagcgccgccgcccccctgcacaagagccagagcgtgcccggcgcctggcccggcgccagccccctgagcagccagcccctgagcggcagcagcagacagagccaccccctgacccagagcagaagcggctacatccccagcggccacagcctgggcacccccgagcccgcccccagagccagcctggagagcgtgccccccggcagaagctacagcccctacgactaccagccctgcctggccggccccaaccaggacttccacagcaagagccccgccagcagcagcctgcccgccttcctgcccaccacccacagcccccccggcccccagcagccccccgccagcctgcccggcctgaccgcccagcccctgctgagccccaaggaggccaccagcgaccccagcagaacccccgaggaggagcccctgaacctggagggcctggtggcccacagagtggccggcgtgcaggccagagagaagcagcccgccgagccccccgcccccctgagaagaagagccgccagcgacggccagtacgagaaccagagccccgaggccaccagccccagaagccccggcgtgagaagccccgtgcagtgcgtgagccccgagctggccctgaccatcgccctgaaccccggcggcagacccaaggagccccacctgcacagctacaaggaggccttcgaggagatggagggcaccagccccagcagccccccccccagcggcgtgagaagcccccccggcctggccaagacccccctgagcgccctgggcctgaagccccacaaccccgccgacatcctgctgcaccccaccggcgtgaccagaagaagaatccagcccgaggaggacgagggcaaggtggtggtgagactgagcgaggagcccagaagctacgtggagagcgtggccagaaccgccgtggccggccccagagcccaggacagcgagcccaagagcttcagcgcccccgccacccaggcctacggccacgagatccccctgagaaacggcaccctgggcggcagcttcgtgagccccagccccctgagcaccagcagccccatcctgagcgccgacagcaccagcgtgggcagcttccccagcggcgagagcagcgaccagggccccagaacccccacccagcccctgctggagagcggcttcagaagcggcagcctgggccagcccagccccagcgcccagagaaactaccagagcagcagccccctgcccaccgtgggcagcagctacagcagccccgactacagcctgcagcacttcagcagcagccccgagagccaggccagagcccagttcagcgtggccggcgtgcacaccgtgcccggcagcccccaggccagacacagaaccgtgggcaccaacaccccccccagccccggcttcggctggagagccatcaaccccagcatggccgcccccagcagccccagcctgagccaccaccagatgatgggcccccccggcaccggcttccacggcagcaccgtgagcagcccccagagcagcgccgccaccacccccggcagccccagcctgtgcagacaccccgccggcgtgtaccaggtgagcggcctgcacaacaaggtggccaccacccccggcagccccagcctgggcagacaccccggcgcccaccagggcaacctggccagcggcctgcacagcaacgccatcgccagccccggcagccccagcctgggcagacacctgggcggcagcggcagcgtggtgcccggcagcccctgcctggacagacacgtggcctacggcggctacagcacccccgaggacagaagacccaccctgagcagacagagcagcgccagcggctaccaggcccccagcacccccagcttccccgtgagccccgcctactaccccggcctgagcagccccgccaccagccccagccccgacagcgccgccttcagacagggcagccccacccccgccctgcccgagaagagaagaatgagcgtgggcgacagagccggcagcctgcccaactacgccaccatcaacggcaaggtgagcagccccgtggccagcggcatgagcagccccagcggcggcagcaccgtgagcttcagccacaccctgcccgacttcagcaagtacagcatgcccgacaacagccccgagaccagagccaaggtgaagttcgtgcaggacaccagcaagtactggtacaagcccgagatcagcagagagcaggccatcgccctgctgaaggaccaggagcccggcgccttcatcatcagagacagccacagcttcagaggcgcctacggcctggccatgaaggtgagcagccccccccccaccatcatgcagcagaacaagaagggcgacatgacccacgagctggtgagacacttcctgatcgagaccggccccagaggcgtgaagctgaagggctgccccaacgagcccaacttcggcagcctgagcgccctggtgtaccagcacagcatcatccccctggccctgccctgcaagctggtgatccccaacagagaccccaccgacgagagcaaggacagcagcggccccgccaacagcaccgccgacctgctgaagcagggcgccgcctgcaacgtgctgttcgtgaacagcgtggacatggagagcctgaccggcccccaggccatcagcaaggccaccagcgagaccctggccgccgaccccacccccgccgccaccatcgtgcacttcaaggtgagcgcccagggcatcaccctgaccgacaaccagagaaagctgttcttcagaagacactaccccctgaacaccgtgaccttctgcgacctggacccccaggagagaaagtggatgaagaccgagggcggcgcccccgccaagctgttcggcttcgtggccagaaagcagggcagcaccaccgacaacgcctgccacctgttcgccgagctggaccccaaccagcccgccagcgccatcgtgaacttcgtgagcaaggtgatgctgaacgccggccagaagagatag

SEQ ID NO: 102149 - DNA, 1251 bp, synthetic construct
  misc_feature 1..1251: note = Description of Artificial Sequence: Synthetic coding sequence
  source 1..1251: mol_type = other DNA
atggtgcccttccagcagagaaaggactgcgtgctggagggcagcaccagagtgacccccagcgtgcagccccacctgcagcccatcagaaacatgagcgtgagcagaaccatggaggacagctgcgagctggacctggtgtacgtgaccgagagaatcatcgccgtgagcttccccagcaccgccaacgaggagaacttcagaagcaacctgagagaggtggcccagatgctgaagagcaagcacggcggcaactacctgctgttcaacctgagcgagagaagacccgacatcaccaagctgcacgccaaggtgctggagttcggctggcccgacctgcacacccccgccctggagaagatctgcagcatctgcaaggccatggacacctggctgaacgccgacccccacaacgtggtggtgctgcacaacaagggcaacagaggcagaatcggcgtggtgatcgccgcctacatgcactacagcaacatcagcgccagcgccgaccaggccctggacagattcgccatgaagagattctacgaggacaagatcgtgcccatcggccagcccagccagagaagatacgtgcactacttcagcggcctgctgagcggcagcatcaagatgaacaacaagcccctgttcctgcaccacgtgatcatgcacggcatccccaacttcgagagcaagggcggctgcagacccttcctgagaatctaccaggccatgcagcccgtgtacaccagcggcatctacaacatccccggcgacagccagaccagcgtgtgcatcaccatcgagcccggcctgctgctgaagggcgacatcctgctgaagtgctaccacaagaagttcagaagccccgccagagacgtgatcttcagagtgcagttccacacctgcgccatccacgacctgggcgtggtgttcggcaaggaggacctggacgacgccttcaaggacgacagattccccgagtacggcaaggtggagttcgtgttcagctacggccccgagaagatccagggcatggagcacctggagaacggccccagcgtgagcgtggactacaacaccagcgaccccctgatcagatgggacagctacgacaacttcagcggccacagagacgacggcatggaggacggcaacaagcagaacaccaacagccagagcatcggcagcatcagcggcggcctggaggaccagtacacctggcccgacacccactggcccagccagagctag

SEQ ID NO: 102150 - DNA, 312 bp, synthetic construct
  misc_feature 1..312: note = Description of Artificial Sequence: Synthetic coding sequence
  source 1..312: mol_type = other DNA
atgagcgtgagcagaaccatggaggacagctgcgagctggacctggtgtacgtgaccgagagaatcatcgccgtgagcttccccagcaccgccaacgaggagaacttcagaagcaacctgagagaggtggcccagatgctgaagagcaagcacggcggcaactacctgctgttcaacctgagcgagagaagacccgacatcaccaagctgcacgccaaggtgctggagttcggctggcccgacctgcacacccccgccctggagaagatctgcagcatctgcaaggccatggacacctggctgaacgcctag

SEQ ID NO: 102151 - DNA, 5145 bp, synthetic construct
  misc_feature 1..5145: note = Description of Artificial Sequence: Synthetic coding sequence
  source 1..5145: mol_type = other DNA
atgagcgtgagcagaaccatggaggacagctgcgagctggacctggtgtacgtgaccgagagaatcatcgccgtgagcttccccagcaccgccaacgaggagaacttcagaagcaacctgagagaggtggcccagatgctgaagagcaagcacggcggcaactacctgctgttcaacctgagcgagagaagacccgacatcaccaagctgcacgccaaggtgctggagttcggctggcccgacctgcacacccccgccctggagaagatctgcagcatctgcaaggccatggacacctggctgaacgccgacccccacaacgtggtggtgctgcacaacaagggcaacagaggcagaatcggcgtggtgatcgccgcctacatgcactacagcaacatcagcgccagcgccgaccaggccctggacagattcgccatgaagagattctacgaggacaagatcgtgcccatcggccagcccagccagagaagatacgtgcactacttcagcggcctgctgagcggcagcatcaagatgaacaacaagcccctgttcctgcaccacgtgatcatgcacggcatccccaacttcgagagcaagggcggctgcagacccttcctgagaatctaccaggccatgcagcccgtgtacaccagcggcatctacaacatccccggcgacagccagaccagcgtgtgcatcaccatcgagcccggcctgctgctgaagggcgacatcctgctgaagtgctaccacaagaagttcagaagccccgccagagacgtgatcttcagagtgcagttccacacctgcgccatccacgacctgggcgtggtgttcggcaaggaggacctggacgacgccttcaaggacgacagattccccgagtacggcaaggtggagttcgtgttcagctacggccccgagaagatccagggcatggagcacctggagaacggccccagcgtgagcgtggactacaacaccagcgaccccctgatcagatgggacagctacgacaacttcagcggccacagagacgacggcatggaggaggtggtgggccacacccagggccccctggacggcagcctgtacgccaaggtgaagaagaaggacagcctgcacggcagcaccggcgccgtgaacgccaccagacccaccctgagcgccacccccaaccacgtggagcacaccctgagcgtgagcagcgacagcggcaacagcaccgccagcaccaagaccgacaagaccgacgagcccgtgcccggcgccagcagcgccaccgccgccctgagcccccaggagaagagagagctggacagactgctgagcggcttcggcctggagagagagaagcagggcgccatgtaccacacccagcacctgagaagcagacccgccggcggcagcgccgtgcccagcagcggcagacacgtggtgcccgcccaggtgcacgtgaacggcggcgccctggccagcgagagagagaccgacatcctggacgacgagctgcccaaccaggacggccacagcgccggcagcatgggcaccctgagcagcctggacggcgtgaccaacaccagcgagggcggctaccccgaggccctgagccccctgaccaacggcctggacaagagctaccccatggagcccatggtgaacggcggcggctacccctacgagagcgccagcagagccggccccgcccacgccggccacaccgcccccatgagacccagctacagcgcccaggagggcctggccggctaccagagagagggcccccaccccgcctggccccagcccgtgaccaccagccactacgcccacgaccccagcggcatgttcagaagccagagcttcagcgaggccgagccccagctgccccccgcccccgtgagaggcggcagcagcagagaggccgtgcagagaggcctgaacagctggcagcagcagcagcagcagcagcagcagcccagacccccccccagacagcaggagagagcccacctggagagcctggtggccagcagacccagcccccagcccctggccgagacccccatccccagcctgcccgagttccccagagccgccagccagcaggagatcgagcagagcatcgagaccctgaacatgctgatgctggacctggagcccgccagcgccgccgcccccctgcacaagagccagagcgtgcccggcgcctggcccggcgccagccccctgagcagccagcccctgagcggcagcagcagacagagccaccccctgacccagagcagaagcggctacatccccagcggccacagcctgggcacccccgagcccgcccccagagccagcctggagagcgtgccccccggcagaagctacagcccctacgactaccagccctgcctggccggccccaaccaggacttccacagcaagagccccgccagcagcagcctgcccgccttcctgcccaccacccacagcccccccggcccccagcagccccccgccagcctgcccggcctgaccgcccagcccctgctgagccccaaggaggccaccagcgaccccagcagaacccccgaggaggagcccctgaacctggagggcctggtggcccacagagtggccggcgtgcaggccagagagaagcagcccgccgagccccccgcccccctgagaagaagagccgccagcgacggccagtacgagaaccagagccccgaggccaccagccccagaagccccggcgtgagaagccccgtgcagtgcgtgagccccgagctggccctgaccatcgccctgaaccccggcggcagacccaaggagccccacctgcacagctacaaggaggccttcgaggagatggagggcaccagccccagcagccccccccccagcggcgtgagaagcccccccggcctggccaagacccccctgagcgccctgggcctgaagccccacaaccccgccgacatcctgctgcaccccaccggcgagcccagaagctacgtggagagcgtggccagaaccgccgtggccggccccagagcccaggacagcgagcccaagagcttcagcgcccccgccacccaggcctacggccacgagatccccctgagaaacggcaccctgggcggcagcttcgtgagccccagccccctgagcaccagcagccccatcctgagcgccgacagcaccagcgtgggcagcttccccagcggcgagagcagcgaccagggccccagaacccccacccagcccctgctggagagcggcttcagaagcggcagcctgggccagcccagccccagcgcccagagaaactaccagagcagcagccccctgcccaccgtgggcagcagctacagcagccccgactacagcctgcagcacttcagcagcagccccgagagccaggccagagcccagttcagcgtggccggcgtgcacaccgtgcccggcagcccccaggccagacacagaaccgtgggcaccaacaccccccccagccccggcttcggctggagagccatcaaccccagcatggccgcccccagcagccccagcctgagccaccaccagatgatgggcccccccggcaccggcttccacggcagcaccgtgagcagcccccagagcagcgccgccaccacccccggcagccccagcctgtgcagacaccccgccggcgtgtaccaggtgagcggcctgcacaacaaggtggccaccacccccggcagccccagcctgggcagacaccccggcgcccaccagggcaacctggccagcggcctgcacagcaacgccatcgccagccccggcagccccagcctgggcagacacctgggcggcagcggcagcgtggtgcccggcagcccctgcctggacagacacgtggcctacggcggctacagcacccccgaggacagaagacccaccctgagcagacagagcagcgccagcggctaccaggcccccagcacccccagcttccccgtgagccccgcctactaccccggcctgagcagccccgccaccagccccagccccgacagcgccgccttcagacagggcagccccacccccgccctgcccgagaagagaagaatgagcgtgggcgacagagccggcagcctgcccaactacgccaccatcaacggcaaggtgagcagccccgtggccagcggcatgagcagccccagcggcggcagcaccgtgagcttcagccacaccctgcccgacttcagcaagtacagcatgcccgacaacagccccgagaccagagccaaggtgaagttcgtgcaggacaccagcaagtactggtacaagcccgagatcagcagagagcaggccatcgccctgctgaaggaccaggagcccggcgccttcatcatcagagacagccacagcttcagaggcgcctacggcctggccatgaaggtgagcagccccccccccaccatcatgcagcagaacaagaagggcgacatgacccacgagctggtgagacacttcctgatcgagaccggccccagaggcgtgaagctgaagggctgccccaacgagcccaacttcggcagcctgagcgccctggtgtaccagcacagcatcatccccctggccctgccctgcaagctggtgatccccaacagagaccccaccgacgagagcaaggacagcagcggccccgccaacagcaccgccgacctgctgaagcagggcgccgcctgcaacgtgctgttcgtgaacagcgtggacatggagagcctgaccggcccccaggccatcagcaaggccaccagcgagaccctggccgccgaccccacccccgccgccaccatcgtgcacttcaaggtgagcgcccagggcatcaccctgaccgacaaccagagaaagctgttcttcagaagacactaccccctgaacaccgtgaccttctgcgacctggacccccaggagagaaagtggatgaagaccgagggcggcgcccccgccaagctgttcggcttcgtggccagaaagcagggcagcaccaccgacaacgcctgccacctgttcgccgagctggaccccaaccagcccgccagcgccatcgtgaacttcgtgagcaaggtgatgctgaacgccggccagaagagatag

SEQ ID NO: 102152 - DNA, 186 bp, synthetic construct
  misc_feature 1..186: note = Description of Artificial Sequence: Synthetic coding sequence
  source 1..186: mol_type = other DNA
atgagcgtgagcagaaccatggaggacagctgcgagctggacctggtgtacgtgaccgagagaatcatcgccgtgagcttccccagcaccgccaacgaggagaacttcagaagcaacctgagagaggtggcccagatgctgaagagcaagcacggcggcaactacctgctgttcaacctgagctag

SEQ ID NO: 102153 - DNA, 75 bp, synthetic construct
  misc_feature 1..75: note = Description of Artificial Sequence: Synthetic coding sequence
  source 1..75: mol_type = other DNA
atgagcgtgagcagaaccatggaggacagctgcgagctggacctggtgtacgtgaccgagagaatcatcgcctag

SEQ ID NO: 102154 - DNA, 4338 bp, synthetic construct
  misc_feature 1..4338: note = Description of Artificial Sequence: Synthetic coding sequence
  source 1..4338: mol_type = other DNA
atggaggagggccacggcctggacctgacctacatcaccgagagaatcatcgccgtgagcttccccgccggctgcagcgaggagagctacctgcacaacctgcaggaggtgaccagaatgctgaagagcaagcacggcgacaactacctggtgctgaacctgagcgagaagagatacgacctgaccaagctgaaccccaagatcatggacgtgggctggcccgagctgcacgccccccccctggacaagatgtgcaccatctgcaaggcccaggagagctggctgaacagcaacctgcagcacgtggtggtgatccactgcagaggcggcaagggcagaatcggcgtggtgatcagcagctacatgcacttcaccaacgtgagcgccagcgccgaccaggccctggacagattcgccatgaagaagttctacgacgacaaggtgagcgccctgatgcagcccagccagaagagatacgtgcagttcctgagcggcctgctgagcggcagcgtgaagatgaacgccagccccctgttcctgcacttcgtgatcctgcacggcacccccaacttcgacaccggcggcgtgtgcagacccttcctgaagctgtaccaggccatgcagcccgtgtacaccagcggcatctacaacgtgggccccgagaaccccagcagaatctgcatcgtgatcgagcccgcccagctgctgaagggcgacgtgatggtgaagtgctaccacaagaagtacagaagcgccaccagagacgtgatcttcagactgcagttccacaccggcgccgtgcagggctacggcctggtgttcggcaaggaggacctggacaacgccagcaaggacgacagattccccgactacggcaaggtggagctggtgttcagcgccacccccgagaagatccagggcagcgagcacctgtacaacgaccacggcgtgatcgtggactacaacaccaccgaccccctgatcagatgggacagctacgagaacctgagcgccgacggcgaggtgctgcacacccagggccccgtggacggcagcctgtacgccaaggtgagaaagaagagcagcagcgaccccggcatccccggcggcccccaggccatccccgccaccaacagccccgaccacagcgaccacaccctgagcgtgagcagcgacagcggccacagcaccgccagcgccagaaccgacaagaccgaggagagactggcccccggcaccagaagaggcctgagcgcccaggagaaggccgagctggaccagctgctgagcggcttcggcctggaggaccccggcagcagcctgaaggagatgaccgacgccagaagcaagtacagcggcaccagacacgtggtgcccgcccaggtgcacgtgaacggcgacgccgccctgaaggacagagagaccgacatcctggacgacgagatgccccaccacgacctgcacagcgtggacagcctgggcaccctgagcagcagcgagggcccccagagcgcccacctgggccccttcacctgccacaagagcagccagaacagcctgctgagcgacggcttcggcagcaacgtgggcgaggacccccagggcaccctggtgcccgacctgggcctgggcatggacggcccctacgagagagagagaaccttcggcagcagagagcccaagcagccccagcccctgctgagaaagcccagcgtgagcgcccagatgcaggcctacggccagagcagctacagcacccagacctgggtgagacagcagcagatggtggtggcccaccagtacagcttcgcccccgacggcgaggccagactggtgagcagatgccccgccgacaaccccggcctggtgcaggcccagcccagagtgcccctgacccccaccagaggcaccagcagcagagtggccgtgcagagaggcgtgggcagcggcccccacccccccgacacccagcagcccagccccagcaaggccttcaagcccagattccccggcgaccaggtggtgaacggcgccggccccgagctgagcaccggccccagccccggcagccccaccctggacatcgaccagagcatcgagcagctgaacagactgatcctggagctggaccccaccttcgagcccatccccacccacatgaacgccctgggcagccaggccaacggcagcgtgagccccgacagcgtgggcggcggcctgagagccagcagcagactgcccgacaccggcgagggccccagcagagccaccggcagacagggcagcagcgccgagcagcccctgggcggcagactgagaaagctgagcctgggccagtacgacaacgacgccggcggccagctgcccttcagcaagtgcgcctggggcaaggccggcgtggactacgcccccaacctgccccccttccccagccccgccgacgtgaaggagaccatgacccccggctacccccaggacctggacatcatcgacggcagaatcctgagcagcaaggagagcatgtgcagcacccccgccttccccgtgagccccgagaccccctacgtgaagaccgccctgagacacccccccttcagcccccccgagccccccctgagcagccccgccagccagcacaagggcggcagagagcccagaagctgccccgagaccctgacccacgccgtgggcatgagcgagagccccatcggccccaagagcaccatgctgagagccgacgccagcagcacccccagcttccagcaggccttcgccagcagctgcaccatcagcagcaacggccccggccagagaagagagagcagcagcagcgccgagagacagtgggtggagagcagccccaagcccatggtgagcctgctgggcagcggcagacccaccggcagccccctgagcgccgagttcagcggcaccagaaaggacagccccgtgctgagctgcttcccccccagcgagctgcaggcccccttccacagccacgagctgagcctggccgagccccccgacagcctggccccccccagcagccaggccttcctgggcttcggcaccgcccccgtgggcagcggcctgccccccgaggaggacctgggcgccctgctggccaacagccacggcgccagccccacccccagcatccccctgaccgccaccggcgccgccgacaacggcttcctgagccacaacttcctgaccgtggcccccggccacagcagccaccacagccccggcctgcagggccagggcgtgaccctgcccggccagccccccctgcccgagaagaagagagccagcgagggcgacagaagcctgggcagcgtgagccccagcagcagcggcttcagcagcccccacagcggcagcaccatcagcatccccttccccaacgtgctgcccgacttcagcaaggccagcgaggccgccagccccctgcccgacagccccggcgacaagctggtgatcgtgaagttcgtgcaggacaccagcaagttctggtacaaggccgacatcagcagagagcaggccatcgccatgctgaaggacaaggagcccggcagcttcatcgtgagagacagccacagcttcagaggcgcctacggcctggccatgaaggtggccacccccccccccagcgtgctgcagctgaacaagaaggccggcgacctggccaacgagctggtgagacacttcctgatcgagtgcacccccaagggcgtgagactgaagggctgcagcaacgagccctacttcggcagcctgaccgccctggtgtgccagcacagcatcacccccctggccctgccctgcaagctgctgatccccgagagagaccccctggaggagatcgccgagagcagcccccagaccgccgccaacagcgccgccgagctgctgaagcagggcgccgcctgcaacgtgtggtacctgaacagcgtggagatggagagcctgaccggccaccaggccatccagaaggccctgagcatcaccctggtgcaggagcccccccccgtgagcaccgtggtgcacttcaaggtgagcgcccagggcatcaccctgaccgacaaccagagaaagctgttcttcagaagacactaccccgtgaacagcgtgatcttctgcgccctggacccccaggacagaaagtggatcaaggacggccccagcagcaaggtgttcggcttcgtggccagaaagcagggcagcgccaccgacaacgtgtgccacctgttcgccgagcacgaccccgagcagcccgccagcgccatcgtgaacttcgtgagcaaggtgatgatcggcagccccaagaaggtgtag

SEQ ID NO: 102155 - DNA, 3618 bp, synthetic construct
  misc_feature 1..3618: note = Description of Artificial Sequence: Synthetic coding sequence
  source 1..3618: mol_type = other DNA
atggaggagggccacggcctggacctgacctacatcaccgagagaatcatcgccgtgagcttccccgccggctgcagcgaggagagctacctgcacaacctgcaggaggtgaccagaatgctgaagagcaagcacggcgacaactacctggtgctgaacctgagcgagaagagatacgacctgaccaagctgaaccccaagatcatggacgtgggctggcccgagctgcacgccccccccctggacaagatgtgcaccatctgcaaggcccaggagagctggctgaacagcaacctgcagcacgtggtggtgatccactgcagaggcggcaagggcagaatcggcgtggtgatcagcagctacatgcacttcaccaacgtgagcgccagcgccgaccaggccctggacagattcgccatgaagaagttctacgacgacaaggtgagcgccctgatgcagcccagccagaagagatacgtgcagttcctgagcggcctgctgagcggcagcgtgaagatgaacgccagccccctgttcctgcacttcgtgatcctgcacggcacccccaacttcgacaccggcggcgtgtgcagacccttcctgaagctgtaccaggccatgcagcccgtgtacaccagcggcatctacaacgtgggccccgagaaccccagcagaatctgcatcgtgatcgagcccgcccagctgctgaagggcgacgtgatgatgccccaccacgacctgcacagcgtggacagcctgggcaccctgagcagcagcgagggcccccagagcgcccacctgggccccttcacctgccacaagagcagccagaacagcctgctgagcgacggcttcggcagcaacgtgggcgaggacccccagggcaccctggtgcccgacctgggcctgggcatggacggcccctacgagagagagagaaccttcggcagcagagagcccaagcagccccagcccctgctgagaaagcccagcgtgagcgcccagatgcaggcctacggccagagcagctacagcacccagacctgggtgagacagcagcagatggtggtggcccaccagtacagcttcgcccccgacggcgaggccagactggtgagcagatgccccgccgacaaccccggcctggtgcaggcccagcccagagtgcccctgacccccaccagaggcaccagcagcagagtggccgtgcagagaggcgtgggcagcggcccccacccccccgacacccagcagcccagccccagcaaggccttcaagcccagattccccggcgaccaggtggtgaacggcgccggccccgagctgagcaccggccccagccccggcagccccaccctggacatcgaccagagcatcgagcagctgaacagactgatcctggagctggaccccaccttcgagcccatccccacccacatgaacgccctgggcagccaggccaacggcagcgtgagccccgacagcgtgggcggcggcctgagagccagcagcagactgcccgacaccggcgagggccccagcagagccaccggcagacagggcagcagcgccgagcagcccctgggcggcagactgagaaagctgagcctgggccagtacgacaacgacgccggcggccagctgcccttcagcaagtgcgcctggggcaaggccggcgtggactacgcccccaacctgccccccttccccagccccgccgacgtgaaggagaccatgacccccggctacccccaggacctggacatcatcgacggcagaatcctgagcagcaaggagagcatgtgcagcacccccgccttccccgtgagccccgagaccccctacgtgaagaccgccctgagacacccccccttcagcccccccgagccccccctgagcagccccgccagccagcacaagggcggcagagagcccagaagctgccccgagaccctgacccacgccgtgggcatgagcgagagccccatcggccccaagagcaccatgctgagagccgacgccagcagcacccccagcttccagcaggccttcgccagcagctgcaccatcagcagcaacggccccggccagagaagagagagcagcagcagcgccgagagacagtgggtggagagcagccccaagcccatggtgagcctgctgggcagcggcagacccaccggcagccccctgagcgccgagttcagcggcaccagaaaggacagccccgtgctgagctgcttcccccccagcgagctgcaggcccccttccacagccacgagctgagcctggccgagccccccgacagcctggccccccccagcagccaggccttcctgggcttcggcaccgcccccgtgggcagcggcctgccccccgaggaggacctgggcgccctgctggccaacagccacggcgccagccccacccccagcatccccctgaccgccaccggcgccgccgacaacggcttcctgagccacaacttcctgaccgtggcccccggccacagcagccaccacagccccggcctgcagggccagggcgtgaccctgcccggccagccccccctgcccgagaagaagagagccagcgagggcgacagaagcctgggcagcgtgagccccagcagcagcggcttcagcagcccccacagcggcagcaccatcagcatccccttccccaacgtgctgcccgacttcagcaaggccagcgaggccgccagccccctgcccgacagccccggcgacaagctggtgatcgtgaagttcgtgcaggacaccagcaagttctggtacaaggccgacatcagcagagagcaggccatcgccatgctgaaggacaaggagcccggcagcttcatcgtgagagacagccacagcttcagaggcgcctacggcctggccatgaaggtggccacccccccccccagcgtgctgcagctgaacaagaaggccggcgacctggccaacgagctggtgagacacttcctgatcgagtgcacccccaagggcgtgagactgaagggctgcagcaacgagccctacttcggcagcctgaccgccctggtgtgccagcacagcatcacccccctggccctgccctgcaagctgctgatccccgagagagaccccctggaggagatcgccgagagcagcccccagaccgccgccaacagcgccgccgagctgctgaagcagggcgccgcctgcaacgtgtggtacctgaacagcgtggagatggagagcctgaccggccaccaggccatccagaaggccctgagcatcaccctggtgcaggagcccccccccgtgagcaccgtggtgcacttcaaggtgagcgcccagggcatcaccctgaccgacaaccagagaaagctgttcttcagaagacactaccccgtgaacagcgtgatcttctgcgccctggacccccaggacagaaagtggatcaaggacggccccagcagcaaggtgttcggcttcgtggccagaaagcagggcagcgccaccgacaacgtgtgccacctgttcgccgagcacgaccccgagcagcccgccagcgccatcgtgaacttcgtgagcaaggtgatgatcggcagccccaagaaggtgtag

SEQ ID NO: 102156 - DNA, 4338 bp, synthetic construct; identical to SEQ ID NO: 102154
  misc_feature 1..4338: note = Description of Artificial Sequence: Synthetic coding sequence
  source 1..4338: mol_type = other DNA

SEQ ID NO: 102157 - DNA, 327 bp, synthetic construct
  misc_feature 1..327: note = Description of Artificial Sequence: Synthetic coding sequence
  source 1..327: mol_type = other DNA
atggaggagggccacggcctggacctgacctacatcaccgagagaatcatcgccgtgagcttccccgccggctgcagcgaggagagctacctgcacaacctgcaggaggtgaccagaatgctgaagagcaagcacggcgacaactacctggtgctgaacctgagcgagaagagatacgacctgaccaagctgaaccccaagatcatggacgtgggctggcccgagctgcacgccccccccctggacaagatgtgcaccatctgcaaggcccaggagagctggctgaacagcaacctgcagcacgtggtggtgatccactgcagatag

SEQ ID NO: 102158 - DNA, 417 bp, synthetic construct
  misc_feature 1..417: note = Description of Artificial Sequence: Synthetic coding sequence
  source 1..417: mol_type = other DNA
atggaggagggccacggcctggacctgacctacatcaccgagagaatcatcgccgtgagcttccccgccggctgcagcgaggagagctacctgcacaacctgcaggaggtgaccagaatgctgaagagcaagcacggcgacaactacctggtgctgaacctgagcgagaagagatacgacctgaccaagctgaaccccaagatcatggacgtgggctggcccgagctgcacgccccccccctggacaagatgtgcaccatctgcaaggcccaggagagctggctgaacagcaacctgcagcacgtggtggtgatccactgcagaggcggcaagggcagaatcggcgtggtgatcagcagctacatgcacttcaccaacgtgagcgccagcgccgaccaggccctggacagattctag

SEQ ID NO: 102159 - DNA, 753 bp, synthetic construct
  misc_feature 1..753: note = Description of Artificial Sequence: Synthetic coding sequence
  source 1..753: mol_type = other DNA
atggaggagggccacggcctggacctgacctacatcaccgagagaatcatcgccgtgagcttccccgccggctgcagcgaggagagctacctgcacaacctgcaggaggtgaccagaatgctgaagagcaagcacggcgacaactacctggtgctgaacctgagcgagaagagatacgacctgaccaagctgaaccccaagatcatggacgtgggctggcccgagctgcacgccccccccctggacaagatgtgcaccatctgcaaggcccaggagagctggctgaacagcaacctgcagcacgtggtggtgatccactgcagaggcggcaagggcagaatcggcgtggtgatcagcagctacatgcacttcaccaacgtgagcgccagcgccgaccaggccctggacagattcgccatgaagaagttctacgacgacaaggtgagcgccctgatgcagcccagccagaagagatacgtgcagttcctgagcggcctgctgagcggcagcgtgaagatgaacgccagccccctgttcctgcacttcgtgatcctgcacggcacccccaacttcgacaccggcggcgtgtgcagacccttcctgaagctgtaccaggccatgcagcccgtgtacaccagcggcatctacaacgtgggccccgagaaccccagcagaatctgcatcgtgatcgagcccgcccagctgctgaagggcgacgtgatggtgatgaactacaacatcgccaacatctag

SEQ ID NO: 102160 - DNA, 753 bp, synthetic construct; identical to SEQ ID NO: 102159
  misc_feature 1..753: note = Description of Artificial Sequence: Synthetic coding sequence
  source 1..753: mol_type = other DNA

SEQ ID NO: 102161 - DNA, 3816 bp, synthetic construct
  misc_feature 1..3816: note = Description of Artificial Sequence: Synthetic coding sequence
  source 1..3816: mol_type = other DNA
agccaggccctgaacgagagaatgaactggctgtgcagaaaccaggaccccaacccccccccccagcccgaggagctgaccagcagcctgcacgccttcaagaacaaggccttcaagaagagcaaggtgtgcggcgtgtgcaagcagatcatcgacggccagggcatcagctgcagagcctgcaagtacagctgccacaagaagtgcgaggccaaggtggtgatcccctgcggcgtgcaggtgagactggagcaggcccccggcagcagcaccctgagcagcagcctgtgcagagacaagcccctgagacccgtgatcctgagccccaccatggaggagggccacggcctggacctgacctacatcaccgagagaatcatcgccgtgagcttccccgccggctgcagcgaggagagctacctgcacaacctgcaggaggtgaccagaatgctgaagagcaagcacggcgacaactacctggtgctgaacctgagcgagaagagatacgacctgaccaagctgaaccccaagatcatggacgtgggctggcccgagctgcacgccccccccctggacaagatgtgcaccatctgcaaggcccaggagagctggctgaacagcaacctgcagcacgtggtggtgatccactgcagaggcggcaagggcagaatcggcgtggtgatcagcagctacatgcacttcaccaacgtgagcgccagcgccgaccaggccctggacagattcgccatgaagaagttctacgacgacaaggtgagcgccctgatgcagcccagccagaagagatacgtgcagttcctgagcggcctgctgagcggcagcgtgaagatgaacgccagccccctgttcctgcacttcgtgatcctgcacggcacccccaacttcgacaccggcggcgtgtgcagacccttcctgaagctgtaccaggccatgcagcccgtgtacaccagcggcatctacaacgtgggccccgagaaccccagcagaatctgcatcgtgatcgagcccgcccagctgctgaagggcgacgtgatggtgaagtgctaccacaagaagtacagaagcgccaccagagacgtgatcttcagactgcagttccacaccggcgccgtgcagggctacggcctggtgttcggcaaggaggacctggacaacgccagcaaggacgacagattccccgactacggcaaggtggagctggtgttcagcgccacccccgagaagatccagggcagcgagcacctgtacaacgaccacggcgtgatcgtggactacaacaccaccgaccccctgatcagatgggacagctacgagaacctgagcgccgacggcgaggtgctgcacacccagggccccgtggacggcagcctgtacgccaaggtgagaaagaagagcagcagcgaccccggcatccccggcggcccccaggccatccccgccaccaacagccccgaccacagcgaccacaccctgagcgtgagcagcgacagcggccacagcaccgccagcgccagaaccgacaagaccgaggagagactggcccccggcaccagaagaggcctgagcgcccaggagaaggccgagctggaccagctgctgagcggcttcggcctggaggaccccggcagcagcctgaaggagatgaccgacgccagaagcaagtacagcggcaccagacacgtggtgcccgcccaggtgcacgtgaacggcgacgccgccctgaaggacagagagaccgacatcctggacgacgagatgccccaccacgacctgcacagcgtggacagcctgggcaccctgagcagcagcgagggcccccagagcgcccacctgggccccttcacctgccacaagagcagccagaacagcctgctgagcgacggcttcggcagcaacgtgggcgaggacccccagggcaccctggtgcccgacctgggcctgggcatggacggcccctacgagagagagagaaccttcggcagcagagagcccaagcagccccagcccctgctgagaaagcccagcgtgagcgcccagatgcaggcctacggccagagcagctacagcacccagacctgggtgagacagcagcagatggtggtggcccaccagtacagcttcgcccccgacggcgaggccagactggtgagcagatgccccgccgacaaccccggcctggtgcaggcccagcccagagtgcccctgacccccaccagaggcaccagcagcagagtggccgtgcagagaggcgtgggcagcggcccccacccccccgacacccagcagcccagccccagcaaggccttcaagcccagattccccggcgaccaggtggtgaacggcgccggccccgagctgagcaccggccccagccccggcagccccaccctggacatcgaccagagcatcgagcagctgaacagactgatcctggagctggaccccaccttcgagcccatccccacccacatgaacgccctgggcagccaggccaacggcagcgtgagccccgacagcgtgggcggcggcctgagagccagcagcagactgcccgacaccggcgagggccccagcagagccaccggcagacagggcagcagcgccgagcagcccctgggcggcagactgagaaagctgagcctgggccagtacgacaacgacgccggcggccagctgcccttcagcaagtgcgcctggggcaaggccggcgtggactacgcccccaacctgccccccttccccagccccgccgacgtgaaggagaccatgacccccggctacccccaggacctggacatcatcgacggcagaatcctgagcagcaaggagagcatgtgcagcacccccgccttccccgtgagccccgagaccccctacgtgaagaccgccctgagacacccccccttcagcccccccgagccccccctgagcagccccgccagccagcacaagggcggcagagagcccagaagctgccccgagaccctgacccacgccgtgggcatgagcgagagccccatcggccccaagagcaccatgctgagagccgacgccagcagcacccccagcttccagcaggccttcgccagcagctgcaccatcagcagcaacggccccggccagagaagagagagcagcagcagcgccgagagacagtgggtggagagcagccccaagcccatggtgagcctgctgggcagcggcagacccaccggcagccccctgagcgccgagttcagcggcaccagaaaggacagccccgtgctgagctgcttcccccccagcgagctgcaggcccccttccacagccacgagctgagcctggccgagccccccgacagcctggccccccccagcagccaggccttcctgggcttcggcaccgcccccgtgggcagcggcctgccccccgaggaggacctgggcgccctgctggccaacagccacggcgccagccccacccccagcatccccctgaccgccaccggcgccgccgacaacggcttcctgagccacaacttcctgaccgtggcccccggccacagcagccaccacagccccggcctgcagggccagggcgtgaccctgcccggccagccccccctgcccgagaagaagagagccagcgagggcgacagaagcctgggcagcgtgagccccagcagcagcggcttcagcagcccccacagcggcagcaccatcagcatccccttccccaacgtgctgcccgacttcagcaaggccagcgaggcccccaccttctaccagaccagcaagcccgacatccccggcccctag

SEQ ID NO: 102162 - DNA, 2760 bp, synthetic construct
  misc_feature 1..2760: note = Description of Artificial Sequence: Synthetic coding sequence
  source 1..2760: mol_type = other DNA
atggacggcccctacgagagagagagaaccttcggcagcagagagcccaagcagccccagcccctgctgagaaagcccagcgtgagcgcccagatgcaggcctacggccagagcagctacagcacccagacctgggtgagacagcagcagatggtggtggcccaccagtacagcttcgcccccgacggcgaggccagactggtgagcagatgccccgccgacaaccccggcctggtgcaggcccagcccagagtgcccctgacccccaccagaggcaccagcagcagagtggccgtgcagagaggcgtgggcagcggcccccacccccccgacacccagcagcccagccccagcaaggccttcaagcccagattccccggcgaccaggtggtgaacggcgccggccccgagctgagcaccggccccagccccggcagccccaccctggacatcgaccagagcatcgagcagctgaacagactgatcctggagctggaccccaccttcgagcccatccccacccacatgaacgccctgggcagccaggccaacggcagcgtgagccccgacagcgtgggcggcggcctgagagccagcagcagactgcccgacaccggcgagggccccagcagagccaccggcagacagggcagcagcgccgagcagcccctgggcggcagactgagaaagctgagcctgggccagtacgacaacgacgccggcggccagctgcccttcagcaagtgcgcctggggcaaggccggcgtggactacgcccccaacctgccccccttccccagccccgccgacgtgaaggagaccatgacccccggctacccccaggacctggacatcatcgacggcagaatcctgagcagcaaggagagcatgtgcagcacccccgccttccccgtgagccccgagaccccctacgtgaagaccgccctgagacacccccccttcagcccccccgagccccccctgagcagccccgccagccagcacaagggcggcagagagcccagaagctgccccgagaccctgacccacgccgtgggcatgagcgagagccccatcggccccaagagcaccatgctgagagccgacgccagcagcacccccagcttccagcaggccttcgccagcagctgcaccatcagcagcaacggccccggccagagaagagagagcagcagcagcgccgagagacagtgggtggagagcagccccaagcccatggtgagcctgctgggcagcggcagacccaccggcagccccctgagcgccgagttcagcggcaccagaaaggacagccccgtgctgagctgcttcccccccagcgagctgcaggcccccttccacagccacgagctgagcctggccgagccccccgacagcctggccccccccagcagccaggccttcctgggcttcggcaccgcccccgtgggcagcggcctgccccccgaggaggacctgggcgccctgctggccaacagccacggcgccagccccacccccagcatccccctgaccgccaccggcgccgccgacaacggcttcctgagccacaacttcctgaccgtggcccccggccacagcagccaccacagccccggcctgcagggccagggcgtgaccctgcccggccagccccccctgcccgagaagaagagagccagcgagggcgacagaagcctgggcagcgtgagccccagcagcagcggcttcagcagcccccacagcggcagcaccatcagcatccccttccccaacgtgctgcccgacttcagcaaggccagcgaggccgccagccccctgcccgacagccccggcgacaagctggtgatcgtgaagttcgtgcaggacaccagcaagttctggtacaaggccgacatcagcagagagcaggccatcgccatgctgaaggacaaggagcccggcagcttcatcgtgagagacagccacagcttcagaggcgcctacggcctggccatgaaggtggccacccccccccccagcgtgctgcagctgaacaagaaggccggcgacctggccaacgagctggtgagacacttcctgatcgagtgcacccccaagggcgtgagactgaagggctgcagcaacgagccctacttcggcagcctgaccgccctggtgtgccagcacagcatcacccccctggccctgccctgcaagctgctgatccccgagagagaccccctggaggagatcgccgagagcagcccccagaccgccgccaacagcgccgccgagctgctgaagcagggcgccgcctgcaacgtgtggtacctgaacagcgtggagatggagagcctgaccggccaccaggccatccagaaggccctgagcatcaccctggtgcaggagcccccccccgtgagcaccgtggtgcacttcaaggtgagcgcccagggcatcaccctgaccgacaaccagagaaagctgttcttcagaagacactaccccgtgaacagcgtgatcttctgcgccctggacccccaggacagaaagtggatcaaggacggccccagcagcaaggtgttcggcttcgtggccagaaagcagggcagcgccaccgacaacgtgtgccacctgttcgccgagcacgaccccgagcagcccgccagagagagccagagacacagaggcgccagagacggcccccacgaggccatgcccagaagacacagcggcagccccgccaacgtgctgttcgagctgatcggccaggtgtag

SEQ ID NO: 102163 - DNA, 2148 bp, synthetic construct
  misc_feature 1..2148: note = Description of Artificial Sequence: Synthetic coding sequence
  source 1..2148: mol_type = other DNA
atgagccaggtgatgagcagccccctgctggccggcggccacgccgtgagcctggccccctgcgacgagcccagaagaaccctgcaccccgcccccagccccagcctgcccccccagtgcagctactacaccaccgagggctggggcgcccaggccctgatggcccccgtgccctgcatgggcccccccggcagactgcagcaggccccccaggtggaggccaaggccacctgcttcctgcccagccccggcgagaaggccctgggcacccccgaggacctggacagctacatcgacttcagcctggagagcctgaaccagatgatcctggagctggaccccaccttccagctgctgccccccggcaccggcggcagccaggccgagctggcccagagcaccatgagcatgagaaagaaggaggagagcgaggccctggacatcaagtacatcgaggtgaccagcgccagaagcagatgccacgacggcccccagcactgcagcagccccagcgtgaccccccccttcggcagcctgagaagcggcggcctgctgctgagcagagacgtgcccagagagaccagaagcagcagcgagagcctgatcttcagcggcaaccagggcagaggccaccagagacccctgccccccagcgagggcctgagccccagaccccccaacagccccagcatcagcatcccctgcatgggcagcaaggccagcagcccccacggcctgggcagccccctggtggccagccccagactggagaagagactgggcggcctggccccccagagaggcagcagaatcagcgtgctgagcgccagccccgtgagcgacgtgagctacatgttcggcagcagccagagcctgctgcacagcagcaacagcagccaccagagcagcagcagaagcctggagagccccgccaacagcagcagcagcctgcacagcctgggcagcgtgagcctgtgcaccagacccagcgacttccaggcccccagaaaccccaccctgaccatgggccagcccagaaccccccacagcccccccctggccaaggagcacgccagcagctgcccccccagcatcaccaacagcatggtggacatccccatcgtgctgatcaacggctgccccgagcccggcagcagccccccccagagaacccccggccaccagaacagcgtgcagcccggcgccgccagccccagcaacccctgccccgccaccagaagcaacagccagaccctgagcgacgcccccttcaccacctgccccgagggccccgccagagacatgcagcccaccatgaagttcgtgatggacaccagcaagtactggttcaagcccaacatcaccagagagcaggccatcgagctgctgagaaaggaggagcccggcgccttcgtgatcagagacagcagcagctacagaggcagcttcggcctggccctgaaggtgcaggaggtgcccgccagcgcccagagcagacccggcgaggacagcaacgacctgatcagacacttcctgatcgagagcagcgccaagggcgtgcacctgaagggcgccgacgaggagccctacttcggcagcctgagcgccttcgtgtgccagcacagcatcatggccctggccctgccctgcaagctgaccatcccccagagagagctgggcggcgccgacggcgccagcgacagcaccgacagccccgccagctgccagaagaagagcgccggctgccacaccctgtacctgagcagcgtgagcgtggagaccctgaccggcgccctggccgtgcagaaggccatcagcaccaccttcgagagagacatcctgcccacccccaccgtggtgcacttcaaggtgaccgagcagggcatcaccctgaccgacgtgcagagaaaggtgttcttcagaagacactaccccctgaccaccctgagattctgcggcatggaccccgagcagagaaagtggcagaagtactgcaagcccagctggatcttcggcttcgtggccaagagccagaccgagccccaggagaacgtgtgccacctgttcgccgagtacgacatggtgcagcccgccagccaggtgatcggcctggtgaccgccctgctgcaggacgccgagagaatgtag

SEQ ID NO: 102164 - DNA, 2148 bp, synthetic construct; identical to SEQ ID NO: 102163
  misc_feature 1..2148: note = Description of Artificial Sequence: Synthetic coding sequence
  source 1..2148: mol_type = other DNA

SEQ ID NO: 102165 - DNA, 387 bp, synthetic construct
  misc_feature 1..387: note = Description of Artificial Sequence: Synthetic coding sequence
  source 1..387: mol_type = other DNA
atgagacccgtgcccgtgagaggcgtgcacagcctgcaccccagacccttcggcggccccgtgagcctgccctggctgagaaccggcagatgcagatggggcctgggcctgtacagacagcccagcctgctgcccgaggagatctgcggcgtgttcttcagaagacactaccccctgaccaccctgagattctgcggcatggaccccgagcagagaaagtggcagaagtactgcaagcccagctggatcttcggcttcgtggccaagagccagaccgagccccaggagaacgtgtgccacctgttcgccgagtacgacatggtgcagcccgccagccaggtgatcggcctggtgaccgccctgctgcaggacgccgagagaatgtag

SEQ ID NO: 102166 - DNA, 4230 bp, synthetic construct
  misc_feature 1..4230: note = Description of Artificial Sequence: Synthetic coding sequence
  source 1..4230: mol_type = other DNA
atgaagagcagcggccccgtggagagactgctgagagccctgggcagaagagacagcagcagagccgccagcagacccagaaaggccgagccccacagcttcagagagaaggtgttcagaaagaagccccccgtgtgcgccgtgtgcaaggtgaccatcgacggcaccggcgtgagctgcagagtgtgcaaggtggccacccacagaaagtgcgaggccaaggtgaccagcgcctgccaggccctgccccccgtggagctgagaagaaacaccgcccccgtgagaagaatcgagcacctgggcagcaccaagagcctgaaccacagcaagcagagaagcaccctgcccagaagcttcagcctggaccccctgatggagagaagatgggacctggacctgacctacgtgaccgagagaatcctggccgccgccttccccgccagacccgacgagcagagacacagaggccacctgagagagctggcccacgtgctgcagagcaagcacagagacaagtacctgctgttcaacctgagcgagaagagacacgacctgaccagactgaaccccaaggtgcaggacttcggctggcccgagctgcacgccccccccctggacaagctgtgcagcatctgcaaggccatggagacctggctgagcgccgacccccagcacgtggtggtgctgtactgcaagggcaacaagggcaagctgggcgtgatcgtgagcgcctacatgcactacagcaagatcagcgccggcgccgaccaggccctggccaccctgaccatgagaaagttctgcgaggacaaggtggccaccgagctgcagcccagccagagaagatacatcagctacttcagcggcctgctgagcggcagcatcagaatgaacagcagccccctgttcctgcactacgtgctgatccccatgctgcccgccttcgagcccggcaccggcttccagcccttcctgaagatctaccagagcatgcagctggtgtacaccagcggcgtgtaccacatcgccggccccggcccccagcagctgtgcatcagcctggagcccgccctgctgctgaagggcgacgtgatggtgacctgctaccacaagggcggcagaggcaccgacagaaccctggtgttcagagtgcagttccacacctgcaccatccacggcccccagctgaccttccccaaggaccagctggacgaggcctggaccgacgagagattccccttccaggccagcgtggagttcgtgttcagcagcagccccgagaagatcaagggcagcacccccagaaacgaccccagcgtgagcgtggactacaacaccaccgagcccgccgtgagatgggacagctacgagaacttcaaccagcaccacgaggacagcgtggacggcagcctgacccacaccagaggccccctggacggcagcccctacgcccaggtgcagagaccccccagacagaccccccccgcccccagccccgagcccccccccccccccatgctgagcgtgagcagcgacagcggccacagcagcaccctgaccaccgagcccgccgccgagagccccggcagacccccccccaccgccgccgagagacaggagctggacagactgctgggcggctgcggcgtggccagcggcggcagaggcgccggcagagagaccgccatcctggacgacgaggagcagcccaccgtgggcggcggcccccacctgggcgtgtaccccggccacagacccggcctgagcagacactgcagctgcagacagggctacagagagccctgcggcgtgcccaacggcggctactacagacccgagggcaccctggagagaagaagactggcctacggcggctacgagggcagcccccagggctacgccgaggccagcatggagaagagaagactgtgcagaagcctgagcgagggcctgtacccctacccccccgagatgggcaagcccgccaccggcgacttcggctacagagcccccggctacagagaggtggtgatcctggaggaccccggcctgcccgccctgtacccctgccccgcctgcgaggagaagctggccctgcccaccgccgccctgtacggcctgagactggagagagaggccggcgagggctgggccagcgaggccggcaagcccctgctgcaccccgtgagacccggccaccccctgcccctgctgctgcccgcctgcggccaccaccacgcccccatgcccgactacagctgcctgaagccccccaaggccggcgaggagggccacgagggctgcagctacaccatgtgccccgagggcagatacggccaccccggctaccccgccctggtgacctacagctacggcggcgccgtgcccagctactgccccgcctacggcagagtgccccacagctgcggcagccccggcgagggcagaggctaccccagccccggcgcccacagccccagagccggcagcatcagccccggcagccccccctacccccagagcagaaagctgagctacgagatccccaccgaggagggcggcgacagataccccctgcccggccacctggccagcgccggccccctggccagcgccgagagcctggagcccgtgagctggagagagggccccagcggccacagcaccctgcccagaagccccagagacgccccctgcagcgccagcagcgagctgagcggccccagcacccccctgcacaccagcagccccgtgcagggcaaggagagcaccagaagacaggacaccagaagccccaccagcgcccccacccagagactgagccccggcgaggccctgccccccgtgagccaggccggcaccggcaaggcccccgagctgcccagcggcagcggccccgagcccctggcccccagccccgtgagccccaccttcccccccagcagccccagcgactggccccaggagagaagccccggcggccacagcgacggcgccagccccagaagccccgtgcccaccaccctgcccggcctgagacacgccccctggcagggccccagaggcccccccgacagccccgacggcagccccctgacccccgtgcccagccagatgccctggctggtggccagccccgagcccccccagagcagccccacccccgccttccccctggccgccagctacgacaccaacggcctgagccagccccccctgcccgagaagagacacctgcccggccccggccagcagcccggcccctggggccccgagcaggccagcagccccgccagaggcatcagccaccacgtgaccttcgcccccctgctgagcgacaacgtgccccagacccccgagccccccacccaggagagccagagcaacgtgaagttcgtgcaggacaccagcaagttctggtacaagccccacctgagcagagaccaggccatcgccctgctgaaggacaaggaccccggcgccttcctgatcagagacagccacagcttccagggcgcctacggcctggccctgaaggtggccacccccccccccagcgcccagccctggaagggcgaccccgtggagcagctggtgagacacttcctgatcgagaccggccccaagggcgtgaagatcaagggctgccccagcgagccctacttcggcagcctgagcgccctggtgagccagcacagcatcagccccatcagcctgccctgctgcctgagaatccccagcaaggaccccctggaggagacccccgaggcccccgtgcccaccaacatgagcaccgccgccgacctgctgagacagggcgccgcctgcagcgtgctgtacctgaccagcgtggagaccgagagcctgaccggcccccaggccgtggccagagccagcagcgccgccctgagctgcagccccagacccacccccgccgtggtgcacttcaaggtgagcgcccagggcatcaccctgaccgacaaccagagaaagctgttcttcagaagacactaccccgtgaacagcatcaccttcagcagcaccgacccccaggacagaagatggaccaaccccgacggcaccaccagcaagatcttcggcttcgtggccaagaagcccggcagcccctgggagaacgtgtgccacctgttcgccgagctggaccccgaccagcccgccggcgccatcgtgaccttcatcaccaaggtgctgctgggccagagaaagtag

SEQ ID NO: 102167 - DNA, 4260 bp, synthetic construct
  misc_feature 1..4260: note = Description of Artificial Sequence: Synthetic coding sequence
  source 1..4260: mol_type = other DNA
atggacggcggcggcgtgtgcgtgggcagaggcgacctgctgagcagcccccaggccctgggccagctgctgagaaaggagagcagacccagaagagccatgaagcccagaaaggccgagccccacagcttcagagagaaggtgttcagaaagaagccccccgtgtgcgccgtgtgcaaggtgaccatcgacggcaccggcgtgagctgcagagtgtgcaaggtggccacccacagaaagtgcgaggccaaggtgaccagcgcctgccaggccctgccccccgtggagctgagaagaaacaccgcccccgtgagaagaatcgagcacctgggcagcaccaagagcctgaaccacagcaagcagagaagcaccctgcccagaagcttcagcctggaccccctgatggagagaagatgggacctggacctgacctacgtgaccgagagaatcctggccgccgccttccccgccagacccgacgagcagagacacagaggccacctgagagagctggcccacgtgctgcagagcaagcacagagacaagtacctgctgttcaacctgagcgagaagagacacgacctgaccagactgaaccccaaggtgcaggacttcggctggcccgagctgcacgccccccccctggacaagctgtgcagcatctgcaaggccatggagacctggctgagcgccgacccccagcacgtggtggtgctgtactgcaagggcaacaagggcaagctgggcgtgatcgtgagcgcctacatgcactacagcaagatcagcgccggcgccgaccaggccctggccaccctgaccatgagaaagttctgcgaggacaaggtggccaccgagctgcagcccagccagagaagatacatcagctacttcagcggcctgctgagcggcagcatcagaatgaacagcagccccctgttcctgcactacgtgctgatccccatgctgcccgccttcgagcccggcaccggcttccagcccttcctgaagatctaccagagcatgcagctggtgtacaccagcggcgtgtaccacatcgccggccccggcccccagcagctgtgcatcagcctggagcccgccctgctgctgaagggcgacgtgatggtgacctgctaccacaagggcggcagaggcaccgacagaaccctggtgttcagagtgcagttccacacctgcaccatccacggcccccagctgaccttccccaaggaccagctggacgaggcctggaccgacgagagattccccttccaggccagcgtggagttcgtgttcagcagcagccccgagaagatcaagggcagcacccccagaaacgaccccagcgtgagcgtggactacaacaccaccgagcccgccgtgagatgggacagctacgagaacttcaaccagcaccacgaggacagcgtggacggcagcctgacccacaccagaggccccctggacggcagcccctacgcccaggtgcagagaccccccagacagaccccccccgcccccagccccgagcccccccccccccccatgctgagcgtgagcagcgacagcggccacagcagcaccctgaccaccgagcccgccgccgagagccccggcagacccccccccaccgccgccgagagacaggagctggacagactgctgggcggctgcggcgtggccagcggcggcagaggcgccggcagagagaccgccatcctggacgacgaggagcagcccaccgtgggcggcggcccccacctgggcgtgtaccccggccacagacccggcctgagcagacactgcagctgcagacagggctacagagagccctgcggcgtgcccaacggcggctactacagacccgagggcaccctggagagaagaagactggcctacggcggctacgagggcagcccccagggctacgccgaggccagcatggagaagagaagactgtgcagaagcctgagcgagggcctgtacccctacccccccgagatgggcaagcccgccaccggcgacttcggctacagagcccccggctacagagaggtggtgatcctggaggaccccggcctgcccgccctgtacccctgccccgcctgcgaggagaagctggccctgcccaccgccgccctgtacggcctgagactggagagagaggccggcgagggctgggccagcgaggccggcaagcccctgctgcaccccgtgagacccggccaccccctgcccctgctgctgcccgcctgcggccaccaccacgcccccatgcccgactacagctgcctgaagccccccaaggccggcgaggagggccacgagggctgcagctacaccatgtgccccgagggcagatacggccaccccggctaccccgccctggtgacctacagctacggcggcgccgtgcccagctactgccccgcctacggcagagtgccccacagctgcggcagccccggcgagggcagaggctaccccagccccggcgcccacagccccagagccggcagcatcagccccggcagccccccctacccccagagcagaaagctgagctacgagatccccaccgaggagggcggcgacagataccccctgcccggccacctggccagcgccggccccctggccagcgccgagagcctggagcccgtgagctggagagagggccccagcggccacagcaccctgcccagaagccccagagacgccccctgcagcgccagcagcgagctgagcggccccagcacccccctgcacaccagcagccccgtgcagggcaaggagagcaccagaagacaggacaccagaagccccaccagcgcccccacccagagactgagccccggcgaggccctgccccccgtgagccaggccggcaccggcaaggcccccgagctgcccagcggcagcggccccgagcccctggcccccagccccgtgagccccaccttcccccccagcagccccagcgactggccccaggagagaagccccggcggccacagcgacggcgccagccccagaagccccgtgcccaccaccctgcccggcctgagacacgccccctggcagggccccagaggcccccccgacagccccgacggcagccccctgacccccgtgcccagccagatgccctggctggtggccagccccgagcccccccagagcagccccacccccgccttccccctggccgccagctacgacaccaacggcctgagccagccccccctgcccgagaagagacacctgcccggccccggccagcagcccggcccctggggccccgagcaggccagcagccccgccagaggcatcagccaccacgtgaccttcgcccccctgctgagcgacaacgtgccccagacccccgagccccccacccaggagagccagagcaacgtgaagttcgtgcaggacaccagcaagttctggtacaagccccacctgagcagagaccaggccatcgccctgctgaaggacaaggaccccggcgccttcctgatcagagacagccacagcttccagggcgcctacggcctggccctgaaggtggccacccccccccccagcgcccagccctggaagggcgaccccgtggagcagctggtgagacacttcctgatcgagaccggccccaagggcgtgaagatcaagggctgccccagcgagccctacttcggcagcctgagcgccctggtgagccagcacagcatcagccccatcagcctgccctgctgcctgagaatccccagcaaggaccccctggaggagacccccgaggcccccgtgcccaccaacatgagcaccgccgccgacctgctgagacagggcgccgcctgcagcgtgctgtacctgaccagcgtggagaccgagagcctgaccggcccccaggccgtggccagagccagcagcgccgccctgagctgcagccccagacccacccccgccgtggtgcacttcaaggtgagcgcccagggcatcaccctgaccgacaaccagagaaagctgttcttcagaagacactaccccgtgaacagcatcaccttcagcagcaccgacccccaggacagaagatggaccaaccccgacggcaccaccagcaagatcttcggcttcgtggccaagaagcccggcagcccctgggagaacgtgtgccacctgttcgccgagctggaccccgaccagcccgccggcgccatcgtgaccttcatcaccaaggtgctgctgggccagagaaagtag
